United States Patent Application Publication US 2018/0126003 A1 - sequence listing, part 178

SEQ ID NO: 315931 - DNA, 792 bp, Artificial Sequence
  derived and/or modified sequence
atgcccaaccccgtggcctactacctgcaccacagcccctggtggttccacagattcgagaccctgagcaaccacttcatcgagctgctggtgcccttcttcctgttcctgggcagaagagcctgcatcatccacggcgtgctgcagatcctgttccaggccgtgctgatcgtgagcggcaacctgagcttcctgaactggctgaccatggtgcccagcctggcctgcttcgacgacgccaccctgggcttcctgttccccagcggccccggcagcctgaaggacagagtgctgcagatgcagagagacatcagaggcgccagacccgagcccagattcggcagcgtggtgagaagagccgccaacgtgagcctgggcgtgctgctggcctggctgagcgtgcccgtggtgctgaacctgctgagcagcagacaggtgatgaacacccacttcaacagcctgcacatcgtgaacacctacggcgccttcggcagcatcaccaaggagagagccgaggtgatcctgcagggcaccgccagcagcaacgccagcgcccccgacgccatgtgggaggactacgagttcaagtgcaagcccggcgaccccagcagaagaccctgcctgatcagcccctaccactacagactggactggctgatgtggttcgccgccttccagacctacgagcacaacgactggatcatccacctggccggcaagctgctggccagcgacgccgaggccctgagcctgctggcccacaaccccttcgccggcagaccccccccctag

SEQ ID NO: 315932 - DNA, 558 bp, Artificial Sequence
  derived and/or modified sequence
atgagaccggactctcccaccatggctgccccagccgaatctctgcgaagaaggaagacagggtacagcgaccctgagcctgagtcccccccagcacccggtaggggccctgcagggtcacctgcccacttacacacgggtactttctggctgaccaggattgtgctactgaaggctctggcattcgtttattttgtagcttttctcgtcgccttccaccagaacaaacaacttattggtgatcgcggtctgcttccatgtcgggtgtttctcaaaaacttccagcaatattttcaggatcgcacctcttgggaggtcttcagctacatgccaactattctgtggctcatggattggagcgatatgaatagcaacctggacctgctggctctgttgggactcggaatctccagttttgtgcttatcaccgggtgtgctaacatgttgttgatggcggcactgtggggcttgtatatgagtttggtgaacgttgggcacgtgtggtgtccaagcctggctagtgctatatccctcccgagcatgcacgggggccagtag

SEQ ID NO: 315933 - DNA, 501 bp, Artificial Sequence
  derived and/or modified sequence
atggcagcacccgcagagagtctacgcagaaggaagaccgggtactcagacccagagccagagtcgcctccggccccaggccgaggccctgcgggtagccccgcccacctacacaccggcactttttggctcacaaggatcgtgctcctcaaggctcttgcctttgtatactttgtggcttttctcgtcgcctttcaccagaataaacagctgattggagacagagggctgttgccatgtcgggtgtttctgaagaattttcaacagtattttcaggatcggacatcatgggaagtgttctcctacatgcctacaattttgtggctcatggactggtccgacatgaattccaatctggacctgttagctctgctcgggctcggcatcagtagcttcgtcctaataacagggtgtgcaaatatgttgctgatggcagcactgtggggcttgtacatgtctttggtgaatgtaggtcacgtctggtatagctttggcaagtag

SEQ ID NO: 315934 - DNA, 558 bp, Artificial Sequence
  derived and/or modified sequence
atgaggccagacagccccaccatggccgccccagctgagagcctgcggcggaggaagacaggctacagcgaccctgagcctgagagccccccagcccctggccggggccctgctggcagccctgcccacctgcacacaggcaccttctggctgacccgcatcgtgctgctgaaggccctggcctttgtgtactttgtggccttcctggtggccttccaccagaacaagcagctgattggagaccggggcctgctgccctgcagggtcttcctgaagaacttccagcagtacttccaggacaggacctcctgggaggtgttctcctacatgcccaccatcctgtggctgatggactggagcgacatgaacagcaacctggacctgctggccctgctgggcctgggcatcagcagctttgtgctgatcaccggctgtgccaacatgctgctgatggccgccctgtggggcctgtacatgagcctggtgaatgtgggccacgtgtggtgccccagcctggccagcgccatcagcctgcccagcatgcacggcggccagtag

SEQ ID NO: 315935 - DNA, 501 bp, Artificial Sequence
  derived and/or modified sequence
atggccgccccagctgagagcctgcggcggaggaagacaggctacagcgaccctgagcctgagagccccccagcccctggccggggccctgctggcagccctgcccacctgcacacaggcaccttctggctgaccagaattgtgctgctgaaggccctggcctttgtgtactttgtggccttcctggtggccttccaccagaacaagcagctgattggagaccggggcctgctgccctgcagggtcttcctgaagaacttccagcagtacttccaggacaggacctcctgggaggtgttctcctacatgcccaccatcctgtggctgatggactggagcgacatgaacagcaacctggacctgctggccctgctgggcctgggcatcagcagctttgtgctgatcaccggctgtgccaacatgctgctgatggccgccctgtggggcctgtacatgagcctggtgaatgtgggccacgtgtggtacagctttgggaagtag

SEQ ID NO: 315936 - DNA, 1091 bp, Artificial Sequence
  derived and/or modified sequence
acatgcgccctgacagcccaacaatggcggcgcccgcggagtcgctgaggaggcggaagactgggtactcggatccggagcctgagtcgccgcccgcgccggggcgtggccccgcaggctctccggcccatctccacacgggcaccttctggctgacccggatcgtgctcctgaaggccctagccttcgtgtacttcgtggcattcctggtggctttccatcagaacaagcagctcatcggtgacagggggctgcttccctgcagagtgttcctgaagaacttccagcagtacttccaggacaggacgagctgggaagtcttcagctacatgcccaccatcctctggctgatggactggtcagacatgaactccaacctggacttgctggctcttctcggactgggcatctcgtctttcgtactgatcacgggctgcgccaacatgcttctcatggctgccctgtggggcctctacatgtccctggttaatgtgggccatgtctggtgcccttccttagcctctgccatcagccttcccagtatgcacggagggcagtgatgggcgcttgtgatctgatccgtgcctcctccctggatgtgggagctcctgggcttccaggccccgggcacctagagacggatggtcgcacgcatgattgtcggcatctcacagcggctcagcacgtcactttggactgtcgcgcagaaattcagaagactcgtagtagcttcggcagtgctctccctgccttccgagcagccatgcgtctttgaactgtcttcccttccctgatcttggagaacatagagctgccagttactgaggatgggagtcccagcttctggagacggggttcctggggatcttcctgtgccctctgtggacgctgtcaaggctgccccagcatacccccacatcccggattgtcctgtggggcttccggtggctgatcttcaggatcatgcttggagcaggcctgatcaagatccggggggaccggtgctggcgagacctcacctgcatggacttccactatgagacccagccgatgcccaatcctgtggcgtactacctgcaccactcaccctg

SEQ ID NO: 315937 - DNA, 558 bp, Artificial Sequence
  derived and/or modified sequence
atgcggcccgacagccccaccatggccgcccccgccgagagcctgcgccgtcgaaagaccggctatagcgacccagaacctgagtccccccctgcacccggacggggacctgcagggagtcccgctcacctgcatactggcacattttggctgacccggatcgttctgctgaaagcgctggcttttgtgtatttcgtggccttcttagtagcttttcaccaaaataagcagctgattggggacagaggacttttgccatgtagagtattcctgaagaactttcagcagtacttccaggacagaaccagttgggaggtcttctcatacatgccaacgatcttatggctcatggattggagtgacatgaatagcaatctggatttgctggcgctcctgggcctgggaataagttcctttgtcctgattactggatgcgcaaatatgctgctgatggccgccttatggggactgtacatgagcctagtcaacgttgggcacgtatggtgtcctagcctcgctagtgcaatctccctgccgtccatgcatggagggcagtag

SEQ ID NO: 315938 - DNA, 501 bp, Artificial Sequence
  derived and/or modified sequence
atggccgcccccgccgagagcctgcggcggcggaagaccggctacagcgacccagagccggagagcccccccgcgccgggccgtggtcctgctggttcccctgcgcacctgcataccggcaccttctggctgacccgaattgtcctgttgaaggcccttgcatttgtttatttcgtcgcttttcttgttgcattccatcaaaataaacagctcattggagatcggggactcctgccatgtcgggtgttcctgaaaaacttccagcagtactttcaggaccggacctcctgggaggtgttcagttacatgcccactatcctttggttaatggactggtctgatatgaatagtaatcttgacctacttgcactcttagggctcgggataagtagcttcgttcttattacaggctgcgccaacatgctactcatggccgcactgtggggtctttacatgtcacttgttaacgtggggcacgtgtggtatagttttggcaagtag

SEQ ID NO: 315939 - DNA, 558 bp, Artificial Sequence
  derived and/or modified sequence
atgcgccctgattctccaacaatggccgcacctgccgagtccctccggagaagaaaaacaggatacagtgaccctgagcccgaaagcccgccagctccaggcaggggtccggcaggtagtcccgcacaccttcataccggcacattttggctgacacgcatcgtgcttctcaaggcacttgcctttgtctactttgtagcgtttctggtggccttccaccagaataaacagctaatcggcgatcgagggctactcccttgccgtgtctttctcaaaaattttcaacagtatttccaggatcggaccagttgggaagtgttctcttatatgcccactattctgtggctgatggactggtctgacatgaactcaaacttggacttgcttgctctactgggtctggggatctccagcttcgtcctgatcactggctgtgccaacatgctccttatggcggcactgtggggattatacatgtcactggtgaatgtgggccacgtgtggtgcccatccctggcgtcggctataagtcttccttcaatgcacggcggtcagtag

SEQ ID NO: 315940 - DNA, 501 bp, Artificial Sequence
  derived and/or modified sequence
atggcagcacccgcagagtcccttcgcagacgaaaaaccgggtactccgaccctgagcccgagtccccacccgctccagggagagggccagcaggttctcctgcacacctgcataccggaaccttctggttgacgaggattgtcctgctgaaggcattagcttttgtgtattttgtggcatttctggtcgcctttcatcagaataaacagttaatcggggatcgcggtctgttaccatgcagagtctttttgaaaaatttccagcaatattttcaggatcggacctcttgggaagtctttagttacatgccaactatcctgtggctcatggattggtccgacatgaatagcaacctcgacctgttagcccttctgggacttggaatcagcagctttgttcttatcacagggtgcgccaacatgcttctcatggccgctctttgggggctatacatgtcactcgtaaatgtcggccatgtctggtattctttcggcaagtag

SEQ ID NO: 315941 - DNA, 558 bp, Artificial Sequence
  derived and/or modified sequence
atgagacccgacagccccaccatggccgcccccgccgagagcctgagaagaagaaagaccggctacagcgaccccgagcccgagagcccccccgcccccggcagaggccccgccggcagccccgcccacctgcacaccggcaccttctggctgaccagaatcgtgctgctgaaggccctggccttcgtgtacttcgtggccttcctggtggccttccaccagaacaagcagctgatcggcgacagaggcctgctgccctgcagagtgttcctgaagaacttccagcagtacttccaggacagaaccagctgggaggtgttcagctacatgcccaccatcctgtggctgatggactggagcgacatgaacagcaacctggacctgctggccctgctgggcctgggcatcagcagcttcgtgctgatcaccggctgcgccaacatgctgctgatggccgccctgtggggcctgtacatgagcctggtgaacgtgggccacgtgtggtgccccagcctggccagcgccatcagcctgcccagcatgcacggcggccagtag

SEQ ID NO: 315942 - DNA, 501 bp, Artificial Sequence
  derived and/or modified sequence
atggccgcccccgccgagagcctgagaagaagaaagaccggctacagcgaccccgagcccgagagcccccccgcccccggcagaggccccgccggcagccccgcccacctgcacaccggcaccttctggctgaccagaatcgtgctgctgaaggccctggccttcgtgtacttcgtggccttcctggtggccttccaccagaacaagcagctgatcggcgacagaggcctgctgccctgcagagtgttcctgaagaacttccagcagtacttccaggacagaaccagctgggaggtgttcagctacatgcccaccatcctgtggctgatggactggagcgacatgaacagcaacctggacctgctggccctgctgggcctgggcatcagcagcttcgtgctgatcaccggctgcgccaacatgctgctgatggccgccctgtggggcctgtacatgagcctggtgaacgtgggccacgtgtggtacagcttcggcaagtag

SEQ ID NO: 315943 - protein, 1704 aa, Artificial Sequence
  derived and/or modified sequence
MAKPTSKDSGLKEKFKILLGLGTPRPNPRSAEGKQTEFIITAEILRELSMECGLNNRIRMIGQICEVAKTKKFEEGERLGVLRALFFKVIKDYPSNEDLHERLEVFKALTDNGRHITYLEEELADFVLQWMDVGLSSEFLLVLVNLVKFNSCYLDEYIARMVQMICLLCVRTASSVDIEVSLQVLDAVVCYNCLPAESLPLFIVTLCRTINVKELCEPCWKLMRNLLGTHLGHSAIYNMCHLMEDRAYMEDAPLLRGAVFFVGMALWGAHRLYSLRNSPTSVLPSFYQAMACPNEVVSYEIVLSITRLIKKYRKELQVVAWDILLNIIERLLQQLQTLDSPELRTIVHDLLTTVEELCDQNEFHGSQERYFELVERCADQRPESSLLNLISYRAQSIHPAKDGWIQNLQALMERFFRSESRGAVRIKVLDVLSFVLLINRQFYEEELINSVVISQLSHIPEDKDHQVRKLATQLLVDLAEGCHTHHFNSLLDIIEKVMARSLSPPPELEERDVAAYSASLEDVKTAVLGLLVILQTKLYTLPASHATRVYEMLVSHIQLHYKHSYTLPIASSIRLQAFDFLLLLRADSLHRLGLPNKDGVVRFSPYCVCDYMEPERGSEKKTSGPLSPPTGPPGPAPAGPAVRLGSVPYSLLFRVLLQCLKQESDWKVLKLVLGRLPESLRYKVLIFTSPCSVDQLCSALCSMLSGPKTLERLRGAPEGFSRTDLHLAVVPVLTALISYHNYLDKTKQREMVYCLEQGLIHRCASQCVVALSICSVEMPDIIIKALPVLVVKLTHISATASMAVPLLEFLSTLARLPHLYRNFAAEQYASVFAISLPYTNPSKFNQYIVCLAHHVIAMWFIRCRLPFRKDFVPFITKGLRSNVLLSFDDTPEKDSFRARSTSLNERPKSRIQTSLTSASLGSADENSVAQADDSLKNLHLELTETCLDMMARYVFSNFTAVPKRSPVGEFLLAGGRTKTWLVGNKLVTVTTSVGTGTRSLLGLDSGELQSGPESSSSPGVHVRQTKEAPAKLESQAGQQVSRGARDRVRSMSGGHGLRVGALDVPASQFLGSATSPGPRTAPAAKPEKASAGTRVPVQEKTNLAAYVPLLTQGWAEILVRRPTGNTSWLMSLENPLSPFSSDINNMPLQELSNALMAAERFKEHRDTALYKSLSVPAASTAKPPPLPRSNTDSAVVMEEGSPGEVPVLVEPPGLEDVEAALGMDRRTDAYSRSSSVSSQEEKSLHAEELVGRGIPIERVVSSEGGRPSVDLSFQPSQPLSKSSSSPELQTLQDILGDPGDKADVGRLSPEVKARSQSGTLDGESAAWSASGEDSRGQPEGPLPSSSPRSPSGLRPRGYTISDSAPSRRGKRVERDALKSRATASNAEKVPGINPSFVFLQLYHSPFFGDESNKPILLPNESQSFERSVQLLDQIPSYDTHKIAVLYVGEGQSNSELAILSNEHGSYRYTEFLTGLGRLIELKDCQPDKVYLGGLDVCGEDGQFTYCWHDDIMQAVFHIATLMPTKDVDKHRCDKKRHLGNDFVSIVYNDSGEDFKLGTIKGQFNFVHVIVTPLDYECNLVSLQCRKDMEGLVDTSVAKIVSDRNLPFVARQMALHANMASQVHHSRSNPTDIYPSKWIARLRHIKRLRQRICEEAAYSNPSLPLVHPPSHSKAPAQTPAEPTPGYEVGQRKRLISSVEDFTEFV

SEQ ID NO: 315944 - DNA, 5115 bp, Artificial Sequence
  derived and/or modified sequence
atggccaagcccaccagcaaggacagcggcctgaaggagaagttcaagatcctgctgggcctgggcacccccagacccaaccccagaagcgccgagggcaagcagaccgagttcatcatcaccgccgagatcctgagagagctgagcatggagtgcggcctgaacaacagaatcagaatgatcggccagatctgcgaggtggccaagaccaagaagttcgaggagggcgagagactgggcgtgctgagagccctgttcttcaaggtgatcaaggactaccccagcaacgaggacctgcacgagagactggaggtgttcaaggccctgaccgacaacggcagacacatcacctacctggaggaggagctggccgacttcgtgctgcagtggatggacgtgggcctgagcagcgagttcctgctggtgctggtgaacctggtgaagttcaacagctgctacctggacgagtacatcgccagaatggtgcagatgatctgcctgctgtgcgtgagaaccgccagcagcgtggacatcgaggtgagcctgcaggtgctggacgccgtggtgtgctacaactgcctgcccgccgagagcctgcccctgttcatcgtgaccctgtgcagaaccatcaacgtgaaggagctgtgcgagccctgctggaagctgatgagaaacctgctgggcacccacctgggccacagcgccatctacaacatgtgccacctgatggaggacagagcctacatggaggacgcccccctgctgagaggcgccgtgttcttcgtgggcatggccctgtggggcgcccacagactgtacagcctgagaaacagccccaccagcgtgctgcccagcttctaccaggccatggcctgccccaacgaggtggtgagctacgagatcgtgctgagcatcaccagactgatcaagaagtacagaaaggagctgcaggtggtggcctgggacatcctgctgaacatcatcgagagactgctgcagcagctgcagaccctggacagccccgagctgagaaccatcgtgcacgacctgctgaccaccgtggaggagctgtgcgaccagaacgagttccacggcagccaggagagatacttcgagctggtggagagatgcgccgaccagagacccgagagcagcctgctgaacctgatcagctacagagcccagagcatccaccccgccaaggacggctggatccagaacctgcaggccctgatggagagattcttcagaagcgagagcagaggcgccgtgagaatcaaggtgctggacgtgctgagcttcgtgctgctgatcaacagacagttctacgaggaggagctgatcaacagcgtggtgatcagccagctgagccacatccccgaggacaaggaccaccaggtgagaaagctggccacccagctgctggtggacctggccgagggctgccacacccaccacttcaacagcctgctggacatcatcgagaaggtgatggccagaagcctgagccccccccccgagctggaggagagagacgtggccgcctacagcgccagcctggaggacgtgaagaccgccgtgctgggcctgctggtgatcctgcagaccaagctgtacaccctgcccgccagccacgccaccagagtgtacgagatgctggtgagccacatccagctgcactacaagcacagctacaccctgcccatcgccagcagcatcagactgcaggccttcgacttcctgctgctgctgagagccgacagcctgcacagactgggcctgcccaacaaggacggcgtggtgagattcagcccctactgcgtgtgcgactacatggagcccgagagaggcagcgagaagaagaccagcggccccctgagcccccccaccggcccccccggccccgcccccgccggccccgccgtgagactgggcagcgtgccctacagcctgctgttcagagtgctgctgcagtgcctgaagcaggagagcgactggaaggtgctgaagctggtgctgggcagactgcccgagagcctgagatacaaggtgctgatcttcaccagcccctgcagcgtggaccagctgtgcagcgccctgtgcagcatgctgagcggccccaagaccctggagagactgagaggcgcccccgagggcttcagcagaaccgacctgcacctggccgtggtgcccgtgctgaccgccctgatcagctaccacaactacctggacaagaccaagcagagagagatggtgtactgcctggagcagggcctgatccacagatgcgccagccagtgcgtggtggccctgagcatctgcagcgtggagatgcccgacatcatcatcaaggccctgcccgtgctggtggtgaagctgacccacatcagcgccaccgccagcatggccgtgcccctgctggagttcctgagcaccctggccagactgccccacctgtacagaaacttcgccgccgagcagtacgccagcgtgttcgccatcagcctgccctacaccaaccccagcaagttcaaccagtacatcgtgtgcctggcccaccacgtgatcgccatgtggttcatcagatgcagactgcccttcagaaaggacttcgtgcccttcatcaccaagggcctgagaagcaacgtgctgctgagcttcgacgacacccccgagaaggacagcttcagagccagaagcaccagcctgaacgagagacccaagagcagaatccagaccagcctgaccagcgccagcctgggcagcgccgacgagaacagcgtggcccaggccgacgacagcctgaagaacctgcacctggagctgaccgagacctgcctggacatgatggccagatacgtgttcagcaacttcaccgccgtgcccaagagaagccccgtgggcgagttcctgctggccggcggcagaaccaagacctggctggtgggcaacaagctggtgaccgtgaccaccagcgtgggcaccggcaccagaagcctgctgggcctggacagcggcgagctgcagagcggccccgagagcagcagcagccccggcgtgcacgtgagacagaccaaggaggcccccgccaagctggagagccaggccggccagcaggtgagcagaggcgccagagacagagtgagaagcatgagcggcggccacggcctgagagtgggcgccctggacgtgcccgccagccagttcctgggcagcgccaccagccccggccccagaaccgcccccgccgccaagcccgagaaggccagcgccggcaccagagtgcccgtgcaggagaagaccaacctggccgcctacgtgcccctgctgacccagggctgggccgagatcctggtgagaagacccaccggcaacaccagctggctgatgagcctggagaaccccctgagccccttcagcagcgacatcaacaacatgcccctgcaggagctgagcaacgccctgatggccgccgagagattcaaggagcacagagacaccgccctgtacaagagcctgagcgtgcccgccgccagcaccgccaagcccccccccctgcccagaagcaacaccgacagcgccgtggtgatggaggagggcagccccggcgaggtgcccgtgctggtggagccccccggcctggaggacgtggaggccgccctgggcatggacagaagaaccgacgcctacagcagaagcagcagcgtgagcagccaggaggagaagagcctgcacgccgaggagctggtgggcagaggcatccccatcgagagagtggtgagcagcgagggcggcagacccagcgtggacctgagcttccagcccagccagcccctgagcaagagcagcagcagccccgagctgcagaccctgcaggacatcctgggcgaccccggcgacaaggccgacgtgggcagactgagccccgaggtgaaggccagaagccagagcggcaccctggacggcgagagcgccgcctggagcgccagcggcgaggacagcagaggccagcccgagggccccctgcccagcagcagccccagaagccccagcggcctgagacccagaggctacaccatcagcgacagcgcccccagcagaagaggcaagagagtggagagagacgccctgaagagcagagccaccgccagcaacgccgagaaggtgcccggcatcaaccccagcttcgtgttcctgcagctgtaccacagccccttcttcggcgacgagagcaacaagcccatcctgctgcccaacgagagccagagcttcgagagaagcgtgcagctgctggaccagatccccagctacgacacccacaagatcgccgtgctgtacgtgggcgagggccagagcaacagcgagctggccatcctgagcaacgagcacggcagctacagatacaccgagttcctgaccggcctgggcagactgatcgagctgaaggactgccagcccgacaaggtgtacctgggcggcctggacgtgtgcggcgaggacggccagttcacctactgctggcacgacgacatcatgcaggccgtgttccacatcgccaccctgatgcccaccaaggacgtggacaagcacagatgcgacaagaagagacacctgggcaacgacttcgtgagcatcgtgtacaacgacagcggcgaggacttcaagctgggcaccatcaagggccagttcaacttcgtgcacgtgatcgtgacccccctggactacgagtgcaacctggtgagcctgcagtgcagaaaggacatggagggcctggtggacaccagcgtggccaagatcgtgagcgacagaaacctgcccttcgtggccagacagatggccctgcacgccaacatggccagccaggtgcaccacagcagaagcaaccccaccgacatctaccccagcaagtggatcgccagactgagacacatcaagagactgagacagagaatctgcgaggaggccgcctacagcaaccccagcctgcccctggtgcacccccccagccacagcaaggcccccgcccagacccccgccgagcccacccccggctacgaggtgggccagagaaagagactgatcagcagcgtggaggacttcaccgagttcgtgtag

SEQ ID NO: 315945 - DNA, 5115 bp, Artificial Sequence
  derived and/or modified sequence
atggctaaaccgacttccaaagacagtggcttgaaggaaaagtttaagatattactgggtcttggaaccccacgaccaaacccccggagtgctgaaggaaagcaaacagaatttattatcaccgcagaaattcttagagaacttagcatggaatgcggactgaataatcgcatacggatgataggacagatttgcgaggtggccaagactaaaaaatttgaagagggcgagcgcctgggagttttgagggcgttgttctttaaggttatcaaagactacccttccaacgaggacctgcacgaacgacttgaagttttcaaagccttaaccgacaacgggcggcacattacatacctcgaagaggagctggcagattttgtccttcagtggatggatgtaggcttatcttccgagttcctcttggttctggtcaaccttgtgaagtttaacagctgctatctagacgaatacatcgctcgcatggtgcagatgatctgcctcctgtgtgttcgcaccgcgtcatccgttgatattgaggtgtcgcttcaggtcctcgatgccgtggtttgctataattgtttgccggccgagtcattgcccttattcatcgttaccttatgccggaccattaacgttaaagagctgtgcgaaccgtgctggaaactcatgcgcaatcttttagggacccacctggggcactccgccatttataatatgtgtcatctgatggaagatagggcctatatggaagacgctcccctgctgagaggcgcggtgtttttcgtaggaatggccctgtggggggctcaccgtctttacagcctgagaaattcacctacatctgtcctgcccagtttctaccaggccatggcatgtcccaatgaggtggtgtcatatgagatcgtgctgtccatcacacgcctcatcaagaagtaccggaaagagttacaggtggtcgcttgggatattctcttgaacataattgagcggcttctccagcagctacagacactagatagccccgagctgcgcactattgtgcacgacttgctgacaaccgtggaggaactttgcgaccagaatgagtttcatggatcacaggagcgatatttcgagctagtggagagatgtgccgatcagcgccccgagagcagcctcctcaatctcatcagctatcgcgcgcagagtatccaccctgccaaggatgggtggatccaaaatctgcaggctctaatggaaagatttttcaggtctgagtcaagaggcgccgtgcgcatcaaagttctagatgtgttatcatttgtcctcctaatcaatagacagttctatgaagaggaactcattaactccgtggtgatcagtcaattatcccacattcccgaagacaaggatcaccaggtaagaaagctggcaacacagctgctcgtagacctcgccgagggatgccacacgcatcattttaactcgttgctggacatcatagagaaagtcatggcccggtctttgagccctccacctgagcttgaagaacgagatgtggccgcatacagtgccagtctggaagacgtgaaaactgctgtcctaggactcctggtcatactccaaacgaagctttacaccttaccagcctcccatgcaacccgggtctacgagatgctggtgagccacatccagctccactacaagcacagttacaccttacctatcgccagtagcattaggctccaagcattcgactttttgctgctcctcagagcagacagtctccacaggttggggctgcctaacaaggatggagtggtcagatttagcccctactgtgtctgtgactacatggagccagaaagaggtagtgaaaagaagacttcaggtccattgtctcctcccaccgggccacccggccccgccccagctgggccagccgtgcggttgggaagcgttccctattctttgctcttcagagtgctactccagtgccttaaacaagagtcagactggaaagtgctgaaattagtactgggcagactgcctgagagcctgcgttataaggtcttaatcttcacaagcccatgttctgttgatcagttgtgctctgccctatgttctatgctatcgggccccaaaactcttgagcgtctgcgtggtgcgcctgaggggttctctaggaccgacctgcatctcgctgtagtgccagtactaactgcacttattagctatcataattacctggataagaccaagcagcgagagatggtttattgcctcgaacaaggtctgatccaccgatgcgcatctcagtgcgtggtggcactgtccatctgcagtgtggagatgcccgatattattattaaggctctccccgtactggtggtcaaacttacccacatatccgccaccgctagtatggcagtgcccctcctggagttcctgagcactttggcaagattgcctcatctctataggaattttgccgcggagcagtatgcctcagtgttcgccatcagcctgccatacactaacccgtccaaattcaatcagtacatcgtgtgcctggcccaccacgtcatcgctatgtggtttattcggtgccgattgccttttaggaaggattttgttccgttcatcactaaggggctgcggagtaacgtgttattgtcctttgatgacacaccagagaaggactcatttcgagcccgatcaacctccctgaacgagagacctaagtcccgtatccaaacatcactaacgtctgcaagtctggggagtgccgacgaaaactccgtggcgcaagccgatgatagcctcaaaaatctccatcttgagctgaccgaaacctgtttggatatgatggctagatatgtgttttcaaacttcacagcagtccccaaacgatccccagtaggtgagttcttgctggccgggggtcggacaaagacttggctagtcggcaataagctggtaaccgtgacgacttctgttggaacgggcaccaggtccctgctaggattagattctggggaactgcaatcaggacctgagagctcttcttcccccggtgttcatgttcgtcaaactaaggaggctcctgctaaactggagtcccaagcggggcagcaggtctcacgtggggcaagggatcgtgttaggtctatgtcgggagggcatggcttgcgcgttggggcactagatgtaccagcaagtcaattcctcggtagcgctaccagccctggtccacggaccgccccggccgcaaagcctgagaaagcgtccgctggaacccgcgtgcccgtgcaggagaagacaaacctggccgcatatgtgcctctgctgacgcaggggtgggccgaaatattggtcagacgtcctacagggaacaccagctggctcatgagtctggaaaatccattgtcaccattttcaagcgatataaataacatgcccctccaggaacttagcaacgccctaatggccgcggaacggtttaaagagcacagggatacagcactttacaagtcgctgtctgtcccagccgcgagcaccgctaaaccacctcccctccctcggtctaatacggattccgctgtggtcatggaagaagggagccccggcgaggtacccgttctggttgaaccccccggcctggaggacgtggaggcagcactgggaatggatcggcgcacagatgcatactcccgatcgtcctctgtgtcttcacaggaagagaaatccctgcacgctgaagaactcgtgggtcggggcatcccgatcgagcgggtagtctccagcgagggcggaagaccctctgtggatttgtccttccagccttcacagccactgagcaaatcaagtagcagtcccgagctgcaaacactccaggacatcctcggggaccccggcgacaaggcagatgttggacggctctcccctgaagtcaaggctagatctcaaagcggaactcttgacggagagagcgccgcctggtccgcgtcgggtgaagacagccgcgggcagccagagggtcctctccccagttcgtccccgaggagccccagcggtttgaggcctcggggatacacgattagcgacagcgccccttctcgcaggggtaaaagagttgaacgcgatgctctgaaaagtagagccacggcatctaatgccgagaaggtacccgggatcaacccttctttcgtgttcctgcagctgtatcatagccctttcttcggagacgagtccaacaagcccatcctgctccccaacgaaagtcagtcctttgaaagaagcgttcagctgctggaccagatcccctcatatgatacacataagattgccgtactgtacgtcggcgaagggcaatctaactcagagttagcgattctcagcaacgagcatggttcatatcgctatacagaattcctcaccggcctgggcagactgatcgaactgaaggactgtcagcctgacaaggtctacctgggcggacttgatgtctgtggtgaggacggacaatttacctactgttggcacgatgacatcatgcaagccgtctttcatatagcaactttgatgccaacgaaagatgtggataagcaccgatgtgacaagaagaggcacttgggaaacgattttgtttctattgtctataacgactccggcgaggacttcaaactaggaacaatcaaggggcagttcaatttcgtccacgtgattgtgacacctttggattatgagtgcaacctggtctctcttcagtgcagaaaggatatggagggactcgtagatacctccgttgcgaagatcgtatccgataggaacctgcctttcgtggccaggcaaatggccctgcatgccaatatggcttcgcaggtgcaccattcccgctcaaatcccacagatatctatccatccaaatggatcgcccggctgcggcatattaaaagactgcggcagaggatttgtgaggaggctgcctattccaacccaagcttacccctggtccacccccccagccactccaaagcgcctgctcagaccccagccgagcccacaccgggatatgaggtgggccagaggaagagattgattagttctgtggaggacttcactgaattcgtgtag

SEQ ID NO: 315946 - DNA, 5115 bp, Artificial Sequence
  derived and/or modified sequence
atggccaagcccaccagcaaggacagcggcctgaaggagaagttcaagatcctgctgggcctgggcaccccccggcccaaccccaggtctgctgagggcaagcagacagagttcatcatcacagctgagatcctgcgggagctgtccatggagtgtggcctgaacaaccgcatccgcatgattggccagatctgtgaggtggccaagaccaagaagtttgaggagggggagcggctgggcgtgctgcgggccctcttcttcaaggtgatcaaggactaccccagcaatgaagacctgcacgagcggctggaggtgttcaaggccctgacagacaatggccgccacatcacctacctggaggaggagctggccgactttgtgctgcagtggatggatgtgggcctgagcagcgagttcctgctggtgctggtgaacctggtgaagttcaacagctgctacctggatgagtacatcgccaggatggtgcagatgatctgcctgctgtgtgtgaggacagccagctctgtggacatcgaggtgtccctgcaggtgctggatgctgtggtgtgctacaactgcctgcctgctgagagcctgcccctcttcatcgtgaccctgtgcaggaccatcaacgtgaaggagctgtgtgagccctgctggaagctgatgaggaacctgctgggcacccacctgggccacagcgccatctacaacatgtgccacctgatggaggaccgggcctacatggaggatgcccccctgctgcggggagctgtgttctttgtgggcatggccctgtggggcgcccaccggctgtacagcctgaggaacagccccacctctgtgctgcccagcttctaccaggccatggcctgccccaatgaggtggtgtcctatgaaattgtgctgagcatcaccaggctcatcaagaagtacaggaaggagctgcaggtggtggcctgggacatcctgctgaacatcatcgagcggctgctgcagcagctgcagaccctggacagccctgagctgcggaccatcgtgcatgacctgctgaccaccgtggaggagctgtgtgaccagaatgagttccacggcagccaggagcgctactttgagctggtggagcgctgtgccgaccagaggcctgagagcagcctgctgaacctgatctcctaccgggcccagagcatccacccagccaaggatggctggatccagaacctgcaggccctgatggagcgcttcttccgctctgagagcagaggagctgtgcgcatcaaggtgctggatgtgctgagctttgtgctgctgatcaaccggcagttctatgaggaggagctgatcaacagcgtggtgatcagccagctgagccacatccctgaggacaaggaccaccaggtgaggaagctggccacccagctgctggtggacctggccgagggctgccacacccaccacttcaacagcctgctggacatcatcgagaaggtgatggcccggagcctgagccccccacctgagctggaggagagagatgtggccgcctacagcgccagcctggaggatgtgaagacagctgtgctgggcctgctggtgatcctgcagaccaagctgtacaccctgcctgccagccacgccaccagggtgtatgagatgctggtgagccacatccagctgcactacaagcacagctacaccctgcccatcgccagcagcatccggctgcaggcctttgacttcctgctgctgctgcgggctgacagcctgcaccggctgggcctgcccaacaaggatggagtggtgcgcttcagcccctactgtgtgtgtgactacatggagcctgagcggggcagcgagaagaagaccagcggccccctgagcccccccaccggccccccaggccctgccccagctggccctgctgtgcggctgggctctgtgccctacagcctgctcttccgggtgctgctgcagtgcctgaagcaggagagtgactggaaggtgctgaagctggtgctgggccgcctgcctgagagcctgcgctacaaggtgctgatcttcaccagcccctgcagcgtggaccagctgtgcagcgccctgtgcagcatgctgagcggccccaagaccctggagcggctgcggggggcccctgagggcttcagcaggacagacctgcacctggccgtggtgcctgtgctgacagccctgatctcctaccacaactacctggacaagaccaagcagcgggagatggtgtactgcctggagcagggcctcatccaccgctgtgccagccagtgtgtggtggccctgagcatctgcagcgtggagatgccagacatcatcatcaaggccctgcctgtgctggtggtgaagctgacccacatcagcgccacagcctccatggctgtgcccctgctggagttcctgagcaccctggcccggctgccccacctgtacagaaactttgctgctgagcagtatgcctctgtgtttgccatcagcctgccctacaccaaccccagcaagttcaaccagtacatcgtgtgcctggcccaccacgtgattgccatgtggttcatccgctgccgcctgcccttcaggaaggactttgtgcccttcatcaccaagggcctgcggagcaatgtgctgctgagctttgatgacaccccagagaaggacagcttccgggcccggagcaccagcctgaatgaaagacccaagagccgcatccagaccagcctgaccagcgccagcctgggcagcgcagatgaaaattctgtggcccaggctgatgacagcctgaagaacctgcacctggagctgacagagacctgcctggacatgatggcccgctacgtgttcagcaacttcaccgctgtgcccaagaggagccctgtgggggagttcctgctggccggcggccgcaccaagacctggctggtgggcaacaagctggtgacagtgaccacctctgtgggcaccggcaccaggagcctgctgggcctggacagcggggagctgcagagcggccctgagagcagcagcagccctggggtgcacgtgcggcagaccaaggaggccccagccaagctggagagccaggccggccagcaggtgtccagaggagcccgggacagagtgcgctccatgtctgggggccacggcctgcgggtgggcgccctggatgtgcctgccagccagttcctgggcagcgccaccagccctggccccaggacagccccagctgccaagccagagaaggccagcgctggcaccagggtgcctgtgcaggagaagaccaacctggccgcctacgtgcccctgctgacccagggctgggccgagatcctggtgcggcggcccactggaaacacctcctggctgatgagcctggagaaccccctgagccccttcagcagtgacatcaacaacatgcccctgcaggagctgagcaatgccctgatggctgctgagcgcttcaaggagcaccgggacacagccctgtacaagagcctgtctgtgcctgctgccagcacagccaagcccccacccctgcccaggagcaacacagattctgctgtggtgatggaggagggcagccctggagaggtgcctgtgctggtggagcccccaggcctggaggatgtggaggccgccctgggcatggacagaagaacagatgcctacagccgcagcagctctgtgagcagccaggaggagaagagcctgcacgccgaggagctggtgggccggggcatccccatcgagcgggtggtgagcagcgagggcggccggcccagcgtggacctgtccttccagcccagccagcccctgagcaagagcagcagcagccctgagctgcagaccctgcaggacatcctgggggaccccggggacaaggcagatgtgggccgcctgagccctgaggtgaaggcccggagccagagcggcaccctggatggagagagcgctgcctggagcgccagcggggaggacagccggggccagcctgagggccccctgcccagcagcagccccaggagccccagcggcctgcggccccggggctacaccatcagtgacagcgcccccagcagaagaggcaagagggtggagagagatgccctgaagagccgggccacagccagcaatgctgagaaggtgcccggcatcaaccccagctttgtgttcctgcagctgtaccacagccccttctttggagatgagagcaacaagcccatcctgctgcccaatgaaagccagagctttgagaggtctgtgcagctgctggaccagatccccagctatgacacccacaagattgctgtgctgtatgtgggggagggccagagcaacagcgagctggccatcctgagcaatgaacatggcagctaccgctacacagagttcctgaccggcctgggccgcctgattgagctgaaggactgccagcctgacaaggtgtacctgggcggcctggatgtgtgtggagaagatggccagttcacctactgctggcatgatgacatcatgcaggccgtgttccacatcgccaccctgatgcccaccaaggatgtggacaagcaccgctgtgacaagaagaggcacctgggcaatgactttgtgtccatcgtgtacaatgacagcggggaggacttcaagctgggcaccatcaagggccagttcaactttgtgcacgtgattgtgacccccctggactatgagtgcaacctggtgtccctgcagtgcaggaaggacatggagggcctggtggacacctctgtggccaagatcgtgtctgacaggaacctgccctttgtggcccggcagatggccctgcacgccaacatggccagccaggtgcaccacagccgcagcaaccccacagacatctaccccagcaagtggatcgcccggctgcggcacatcaagaggctgcggcagaggatctgtgaggaggccgcctacagcaaccccagcctgcccctggtgcacccccccagccacagcaaggccccagcccagaccccagctgagcccaccccaggctatgaggtgggccagaggaagaggctcatcagctctgtggaggacttcacagaatttgtgtag

SEQ ID NO: 315947 - DNA, 5115 bp, Artificial Sequence
  derived and/or modified sequence
atggccaagcccaccagcaaggacagcggcctgaaggagaagttcaagatcctactgggactgggtacacctcgccctaaccctagatcagctgaaggaaagcagacagagttcattattacggccgagattctgcgtgagctgtcaatggagtgcggactgaacaacaggattcggatgattgggcaaatttgtgaagttgccaaaaccaagaaatttgaggaaggcgaaagactaggtgtgttgcgcgcattgttcttcaaagtgataaaggactaccctagtaatgaggatctccacgagagactcgaagtctttaaggctctgactgacaacgggcggcacattacctacctcgaagaagagttggctgatttcgttttacagtggatggatgtgggtctctcttcagaatttctgttagtgttggtgaacctagtgaagttcaactcgtgctacctggatgaatatatagcacggatggttcagatgatatgccttctttgcgtcaggactgcttctagcgtcgacatagaggtctccttgcaggtgctggatgcagtggtttgctacaattgtctccccgctgagagcctccccctttttatcgtgaccctgtgtaggaccattaatgtgaaagagctgtgtgagccctgctggaagttgatgcggaacctgctgggcactcatctaggacattctgccatatataatatgtgtcaccttatggaggatcgcgcttatatggaggatgcccctctactgagaggggctgtgttcttcgttgggatggctctgtggggcgcacacagactatactcactgcgcaacagccccacaagtgtcctccctagtttttaccaggcaatggcctgccccaacgaagtggtgagctatgagattgtcctcagcatcacccgactcatcaagaaataccgcaaggagctgcaggtagtcgcttgggatatcctgctgaacattatagaacggctgttacaacagctgcagaccttggattcccctgaattacggaccattgtgcacgatcttctgacaacagtggaggagctctgtgatcagaacgaatttcacgggtcccaagagcgctattttgagctggtggagaggtgtgcggatcagagaccagaaagcagcttgttgaacctgatttcgtacagagcccaaagtatccacccagccaaagacggatggattcagaatcttcaggcccttatggagaggttcttccgatctgaatccagaggggccgtgaggatcaaggtacttgacgtcttgtctttcgtgcttctgattaatagacagttctacgaagaagagcttatcaatagtgtggtgatatctcaactgagccacatcccggaggataaagatcatcaggtgagaaagctagccacccagctcttggttgatctcgccgaaggttgccatacccatcacttcaactctctgctcgacatcattgaaaaagtgatggctcggtcactgtctccccctccggagctggaggagcgagatgtggcagcatattctgcttccctggaggacgtgaagactgctgtgctcggtctgctagttatcttacaaaccaaattatacacgttgccagcatcacacgccacaagggtctacgagatgctggtgagccacatccagctgcactataaacacagttacaccttgccgatcgcctccagcattcggctacaggctttcgattttctcctgctcttgagagccgactctctgcaccggttaggcctccccaacaaagatggcgtcgtgagattcagcccctattgcgtgtgcgactacatggaacccgagcggggctctgaaaagaaaacttccggtccattatcccccccaaccgggccacccggtccagcccctgcaggtcctgcagtcaggttagggtccgtgccttattcactcctgttcagagtcctcctgcaatgtctgaaacaggagagcgattggaaggtcttaaaactcgtgctcggacgtctccccgaatcgctgcggtataaagtgttgatatttaccagtccttgctccgttgatcaactgtgctcagccctttgctcaatgctatcagggcccaaaaccttggagagactgcgtggcgcaccggaaggtttttcaaggacggacttgcatcttgccgttgtcccggtccttacagccctgatttcctatcataactatctggacaagacgaagcagcgcgagatggtctattgcttggagcaaggcctaatccacagatgcgcatcgcaatgcgtggttgcgctgagcatttgttccgtggagatgcccgacattattatcaaggccctgcctgtgctggtcgtcaagctgacgcatatctcggccacggcatccatggccgtaccactgctcgagttcctctcaaccctagcacggctcccccacctctacagaaattttgccgccgagcagtacgccagcgtgtttgctatctcgctgccctacaccaaccctagcaagttcaatcagtatatcgtttgtttagcacatcatgtcatcgcaatgtggttcattcggtgccggctccccttccgcaaggatttcgtgccctttattacaaaaggattgaggtcaaatgttctgctgagcttcgatgacacgcccgagaaggattcgtttcgcgcccgtagcacttccctaaacgaaaggcccaaatcccggattcagacttcactgacctcggcgtcacttggatccgctgacgagaattccgttgctcaggcagacgacagtctcaaaaacctgcacctggagttaacagagacgtgcctggatatgatggcccgatacgtgttcagtaactttacagccgttcctaagcgctccccagtgggcgaattcctactggcaggtgggcggaccaagacctggctggtaggaaacaagctggttaccgttaccactagcgtgggaaccggcaccaggagcttactgggattggacagcggtgagctgcagtccgggcccgaatctagctctagccccggcgtgcacgtgaggcaaaccaaggaggccccagctaaactggaatcacaggcgggccagcaagtgtccaggggtgccagggatcgcgtgcggtcaatgtcgggagggcatgggctgagagtgggtgctcttgacgtgccggcaagccagtttcttgggtccgccacatctcctggtcctcgcaccgctccagccgctaagccagagaaggccagtgccggaacgagggtgcccgtgcaggagaaaactaatctggccgcctacgtacctctgctgacccaggggtgggcagaaattctggtgaggagaccgactggcaataccagctggttaatgtccctcgaaaatcccttgtctccattttcgtcggatatcaacaatatgcctttgcaggagctgtccaatgctttgatggctgcagagagattcaaggagcacagggacacggctttgtataagtccttatccgtgcctgcagcctcgacagcgaagcctcctccgctgccacgcagtaacacagacagtgccgtcgtgatggaggagggcagccccggagaagttcctgtgctcgtggaacctcccgggctcgaagacgtggaggccgcgctagggatggacagacgtactgacgcctattcaagatcctcttctgtgtccagccaggaggaaaagtctcttcatgcggaagagttggtggggcgcggcatccccattgaacgagtggtgagcagcgagggggggcgccctagcgtggatctttcattccagccctcacagccactttctaagtctagctcttccccagagcttcagacccttcaggatattcttggcgacccgggcgacaaggcagacgtcggccgcctgagcccggaggtaaaggctagatcgcagagtgggactttagatggagaaagtgccgcctggagtgcctcaggggaagactctcgcggtcagccagagggccccctgcctagcagtagtcctcggagcccaagtgggctcaggcctcgcgggtacactataagcgactctgccccatcaaggagaggtaaacgcgtggagagagacgcgctcaagtcccgggccactgcctcaaacgctgaaaaggtgcctggaatcaatcctagctttgtgtttctccagctgtatcattcaccgttcttcggtgacgaaagcaataagccaattctcctcccaaatgagtcccagtcattcgagcgctcggtccagctgctggaccagatcccatcgtatgatactcataaaattgccgttctttacgtaggagaaggacagagcaatagcgaactagcgatactctctaatgagcacggaagttacagatataccgagtttttgactggcctcggccggttaatcgaactcaaggactgtcagccagacaaagtctatcttggtggactcgacgtgtgtggtgaagacggtcaattcacttactgttggcatgatgacataatgcaggctgtctttcacatcgccacactgatgcccacgaaggacgtggacaaacatcgctgcgacaaaaagagacacctcggcaatgatttcgtttccattgtctacaatgacagcggcgaggactttaagctgggcaccattaagggacagtttaacttcgtgcacgtcattgtgacccctctggattatgagtgcaaccttgtgagcttgcaatgtcggaaggatatggagggtttggtcgatactagcgtggccaagatcgtgtcagaccggaatttgccatttgttgcaaggcagatggctttacatgccaatatggcgagccaggtccaccattcaagatcaaaccccacagacatctaccctagcaaatggattgcaaggctccggcatattaaacgcctccgtcagcgcatctgtgaggaagccgcatacagcaatccctcgctccctttggttcacccccccagtcactcaaaggctccagcccagacacccgctgaacccacccctgggtacgaagtggggcaaaggaagcggcttatcagctctgtggaagatttcactgagtttgtctag

SEQ ID NO: 315948 - DNA, 5115 bp, Artificial Sequence
  derived and/or modified sequence
atggccaaacccacgtcaaaagactccgggctaaaagagaagttcaaaatcctgctgggcctcggcaccccaaggcccaaccctagatctgctgagggcaaacagactgaattcattattaccgccgagatcctcagagaactgtcgatggagtgtggtttaaacaatcgcataagaatgatcggacagatctgtgaggtggccaagactaagaaatttgaggagggtgaacggctgggagtcctgcgagcactgtttttcaaagtcatcaaagactatccttcgaatgaagacctgcacgaacgacttgaggtgttcaaggcactgaccgataacgggcgacacattacttatttggaggaagagttggctgactttgtgctgcagtggatggacgttgggctgtcaagcgaattcttgttagtactggttaacttggtcaaattcaatagctgttatcttgacgaatatattgcccgaatggtgcagatgatctgtctactgtgcgtgcgaaccgcttcttctgtggacatcgaagtctctctccaggttcttgatgctgtcgtatgttataactgtctgcccgcagagtccctccctttgttcatcgtcaccctctgccgtacaatcaatgtcaaagagttgtgtgagccatgttggaaattgatgcgaaacttactgggaacccacctgggacacagcgcgatctacaatatgtgccatctgatggaagacagggcctacatggaggacgctcctcttctgcgcggagccgtcttctttgtcgggatggctctgtggggggctcaccgtctctattctcttcgtaactcccctactagcgtgctcccttctttctatcaggcgatggcttgtccgaacgaagtcgtgtcttacgaaatcgtgttgtccatcactcgattgatcaagaagtaccgcaaagaactgcaggttgtggcctgggacatcctgttgaacattatcgagagactgctgcagcaactgcagacgctcgactctcccgagttgaggactattgtacacgatctgctgacaactgtggaggagctgtgtgatcagaatgaatttcatgggagccaagagaggtacttcgaactggtggagagatgtgcagatcagagacccgaatcttcgctgctgaacctcatttcgtaccgggctcagtctatacatcccgctaaagatggttggattcagaatctgcaggccctgatggagagatttttcagaagcgaatctagaggcgctgtgaggataaaggtgctggacgtattgtcgtttgtcttgctaatcaaccgccagttctacgaggaggagctaattaactcagtggtgatctcccagctgtcccacatcccagaggataaagaccaccaggtccgaaagctggccactcagctgctcgtggaccttgcggaaggatgccatacccatcactttaacagtttgttggatatcattgagaaagtcatggccaggagtctgtctccacctccggaacttgaggagagggacgtggccgcatattctgccagtttagaggatgtgaagacagcagtgctgggactgctggtgatcttgcagactaaactttacaccctgccagccagtcacgctaccagagtgtacgagatgctggtgtcacacatccaactgcactataaacacagttacactctgcctatcgcctcttctatcagactgcaggcttttgatttcctgctcttactgcgggctgattccctgcatcgcctcgggctgcccaataaagacggggtcgtgagattttctccttattgtgtgtgtgactacatggagccggagcggggatcagaaaagaaaacaagtgggccactgtcccccccaacaggcccacctgggccagcccctgccggacccgcagtcagacttggatccgttccttactcactgttgttccgcgtcctcttgcagtgcctaaagcaggaatcagattggaaggttcttaaactggtgctgggcagactgccagaaagtctgcgatacaaagttctgatttttacaagcccttgctctgtcgaccaactttgcagcgctctgtgctctatgctttcaggccctaaaacactggaaaggcttcgaggagcacctgagggcttctctaggactgacctgcaccttgctgtagtacctgtgttgactgccctgatttcataccacaactacctggataaaacgaaacagcgggagatggtttattgtcttgagcagggcctcatccataggtgtgcatctcagtgtgtggttgccctatccatttgcagcgtggagatgcctgacataatcatcaaagctttgcctgtgctcgtggtcaaattgacgcacattagtgccaccgctagtatggctgtaccactcttagagttcttatctaccctcgctcgattgccacatttatatcgcaattttgctgctgaacagtacgcgagcgtattcgctatttcccttccttataccaacccgtctaagttcaaccagtatatcgtgtgcctggcccaccatgtgatagcaatgtggttcatacggtgccgactcccctttagaaaggacttcgtgccttttattactaaaggccttaggagcaacgtgctgctgtcctttgatgacactcccgaaaaggactcttttagggccagatccacatccttgaacgaacggcctaagtcccgcattcagacttcgctgacctctgcctcacttggttcggctgacgagaattctgtagctcaagccgacgattctctgaagaacctgcacctggaattgactgaaacatgcctcgatatgatggcaaggtacgtgttctctaattttacggccgtgcccaagagatcccccgtcggcgaattcttactggctggcggacgcactaagacttggctcgtgggaaataaattggtgactgtaaccacgagtgtgggtacaggaacgagatcattgcttgggctcgacagcggagagctccagtctggaccagagagctccagcagtcccggagtacacgttcgtcagactaaggaagctcccgcaaagctggaatcacaggccggacagcaggtctcccggggtgcccgagatagagtgcggtcaatgtccgggggtcatggcctgagagtgggagcattagatgttcccgctagtcagttccttggcagtgcaacttctcctggcccacgaaccgccccagcagcaaagccagaaaaggccagtgctgggactagggtgcccgtgcaagagaagacgaaccttgcagcctatgtgcccttgttgactcagggctgggccgagattttggttcgcaggccgaccggtaacacctcgtggctgatgtcactggaaaatcctctgagccccttcagcagtgatataaataacatgccactgcaagaactatctaatgcccttatggctgctgagcgattcaaggaacaccgtgacaccgcactgtacaagtctttaagcgtacctgcggcatcaaccgccaagccaccacctctccctcggtccaacacagattctgctgttgttatggaggaaggctcacctggtgaggttcccgtcttagttgagccacctgggctggaagacgtagaggctgcacttggcatggacaggaggactgatgcttacagccgttctagctcggtatcttcccaggaggaaaaatcacttcacgctgaagaacttgttggtaggggcattcccattgagagggtggttagctctgaaggcggacggccaagtgttgacttgagcttccagcccagccagcccctgtctaagtcttccagctcccctgaattgcagactctgcaggacattctgggcgaccctggtgacaaggcagatgtaggaaggctctctcccgaagtgaaggccagaagtcaatcaggaacgttagacggagaatctgctgcttggagtgcatctggggaagactctagaggacaacccgagggaccgctcccatcgtcgagtcctcgaagtcccagcgggctgaggcctcgcggttacactatttcagacagtgccccaagccgaagggggaagcgggtggaaagggacgcactaaagtcccgggctactgccagtaacgcagaaaaagttccagggatcaacccctccttcgttttcctgcagttgtatcatagccccttcttcggggatgagtctaataagcctattctgctccctaatgaaagtcagtcttttgagcgctccgtgcagctgctagatcagatcccttcctatgacacgcataaaatcgccgtgctgtatgttggtgaaggacaatctaactctgagctggcgatcctcagcaacgaacatggctcctatcgctatacagaatttctgactgggcttgggagactgatagagctgaaagactgccagcccgacaaggtgtatctgggaggcctcgatgtgtgcggtgaggacgggcagtttacttactgctggcatgatgatatcatgcaggctgtctttcatatcgctacccttatgcccactaaagacgtggataagcatcggtgtgataaaaaacgccacctgggtaatgacttcgtgtccatagtctacaacgattcaggagaagattttaagctgggaactattaagggccagtttaacttcgtgcatgtcatcgtgacccctttagattacgagtgcaatctggtttccctccaatgcagaaaggatatggaaggtcttgttgacaccagcgttgccaagatcgtctctgatagaaacttaccctttgtggccagacagatggccttacacgcaaacatggcgagccaagttcaccacagccgctccaaccctaccgacatttatccttccaaatggatagctcgccttcggcacattaaacgcctcaggcaacggatatgcgaagaagccgcttatagtaacccctcgctgccactcgtgcaccccccaagccacagcaaggcacctgcgcaaacacccgcagaacccacccccggatacgaggtggggcagagaaagaggctcatatcaagcgtggaggattttacggaattcgtgtag

SEQ ID NO: 315949 - DNA, 5322 bp, Artificial Sequence
  derived and/or modified sequence
ccggcggcgtcccggggccaggggggtgcgcctttctccgcgtcggggcggcccggagcgcggtggcgcggcgcgggaggggttttctggtgcgtcctggtccaccatggccaaaccaacaagcaaagattcaggcttgaaggagaagtttaagattctgttgggactgggaacaccgaggccaaatcccaggtctgcagagggtaaacagacggagtttatcatcaccgcggaaatactgagagaactgagcatggaatgtggcctcaacaatcgcatccggatgatagggcagatttgtgaagtcgcaaaaaccaagaaatttgaagagggcgagcgtttgggggtcctcagagccctcttctttaaggtcatcaaggattacccttccaacgaagaccttcacgaaaggctggaggttttcaaggccctcacagacaatgggagacacatcacctacttggaggaagagctggctgactttgtcctgcagtggatggatgttggcttgtcctcggaattccttctggtgctggtgaacttggtcaaattcaatagctgttacctcgacgagtacatcgcaaggatggttcagatgatctgtctgctgtgcgtccggaccgcgtcctctgtggacatagaggtctccctgcaggtgctggacgccgtggtctgctacaactgcctgccggctgagagcctcccgctgttcatcgttaccctctgtcgcaccatcaacgtcaaggagctctgcgagccttgctggaagctgatgcggaacctccttggcacccacctgggccacagcgccatctacaacatgtgccacctcatggaggacagagcctacatggaggacgcgcccctgctgagaggagccgtgttttttgtgggcatggctctctggggagcccaccggctctattctctcaggaactcgccgacatctgtgttgccatcattttaccaggccatggcatgtccgaacgaggtggtgtcctatgagatcgtcctgtccatcaccaggctcatcaagaagtataggaaggagctccaggtggtggcgtgggacattctgctgaacatcatcgaacggctccttcagcagctccagaccttggacagcccggagctcaggaccatcgtccatgacctgttgaccacggtggaggagctgtgtgaccagaacgagttccacgggtctcaggagagatactttgaactggtggagagatgtgcggaccagaggcctgagtcctccctcctgaacctgatctcctatagagcgcagtccatccacccggccaaggacggctggattcagaacctgcaggcgctgatggagagattcttcaggagcgagtcccgaggcgccgtgcgcatcaaggtgctggacgtgctgtcctttgtgctgctcatcaacaggcagttctatgaggaggagctgattaactcagtggtcatctcgcagctctcccacatccccgaggataaagaccaccaggtccgaaagctggccacccagttgctggtggacctggcagagggctgccacacacaccacttcaacagcctgctggacatcatcgagaaggtgatggcccgctccctctccccacccccggagctggaagaaagggatgtggccgcatactcggcctccttggaggatgtgaagacagccgtcctggggcttctggtcatccttcagaccaagctgtacaccctgcctgcaagccacgccacgcgtgtgtatgagatgctggtcagccacattcagctccactacaagcacagctacaccctgccaatcgcgagcagcatccggctgcaggcctttgacttcctgttgctgctgcgggccgactcactgcaccgcctgggcctgcccaacaaggatggagtcgtgcggttcagcccctactgcgtctgcgactacatggagccagagagaggctctgagaagaagaccagcggccccctttctcctcccacagggcctcctggcccggcgcctgcaggccccgccgtgcggctggggtccgtgccctactccctgctcttccgcgtcctgctgcagtgcttgaagcaggagtctgactggaaggtgctgaagctggttctgggcaggctgcctgagtccctgcgctataaagtgctcatctttacttccccttgcagtgtggaccagctgtgctctgctctctgctccatgctttcaggcccaaagacactggagcggctccgaggcgccccagaaggcttctccagaactgacttgcacctggccgtggttccagtgctgacagcattaatctcttaccataactacctggacaaaaccaaacagcgcgagatggtctactgcctggagcagggcctcatccaccgctgtgccagccagtgcgtcgtggccttgtccatctgcagcgtggagatgcctgacatcatcatcaaggcgctgcctgttctggtggtgaagctcacgcacatctcagccacagccagcatggccgtcccactgctggagttcctgtccactctggccaggctgccgcacctctacaggaactttgccgcggagcagtatgccagtgtgttcgccatctccctgccgtacaccaacccctccaagtttaatcagtacatcgtgtgtctggcccatcacgtcatagccatgtggttcatcaggtgccgcctgcccttccggaaggattttgtccctttcatcactaagggcctgcggtccaatgtcctcttgtcttttgatgacacccccgagaaggacagcttcagggcccggagtactagtctcaacgagagacccaagagcaggatacagacgtccctcaccagtgccagcttggggtctgcagatgagaactccgtggcccaggctgacgatagcctgaaaaacctccacctggagctcacggaaacctgtctggacatgatggctcgatacgtcttctccaacttcacggctgtcccgaagaggtctcctgtgggcgagttcctcctagcgggtggcaggaccaaaacctggctggttgggaacaagcttgtcactgtgacgacaagcgtgggaaccgggacccggtcgttactaggcctggactcgggggagctgcagtccggcccggagtcgagctccagccccggggtgcatgtgagacagaccaaggaggcgccggccaagctggagtcccaggctgggcagcaggtgtcccgtggggcccgggatcgggtccgttccatgtcggggggccatggtcttcgagttggcgccctggacgtgccggcctcccagttcctgggcagtgccacttctccaggaccacggactgcaccagccgcgaaacctgagaaggcctcagctggcacccgggttcctgtgcaggagaagacgaacctggcggcctatgtgcccctgctgacccagggctgggcggagatcctggtccggaggcccacagggaacaccagctggctgatgagcctggagaacccgctcagccctttctcctcggacatcaacaacatgcccctgcaggagctgtctaacgccctcatggcggctgagcgcttcaaggagcaccgggacacagccctgtacaagtcactgtcggtgccggcagccagcacggccaaaccccctcctctgcctcgctccaacacagactccgccgtggtcatggaggagggaagtccgggcgaggttcctgtgctggtggagcccccagggttggaggacgttgaggcagcgctaggcatggacaggcgcacggatgcctacagcaggtcgtcctcagtctccagccaggaggagaagtcgctccacgcggaggagctggttggcaggggcatccccatcgagcgagtcgtctcctcggagggtggccggccctctgtggacctctccttccagccctcgcagcccctgagcaagtccagctcctctcccgagctgcagactctgcaggacatcctcggggaccctggggacaaggccgacgtgggccggctgagccctgaggttaaggcccggtcacagtcagggaccctggacggggaaagtgctgcctggtcggcctcgggcgaagacagtcggggccagcccgagggtcccttgccttccagctccccccgctcgcccagtggcctccggccccgaggttacaccatctccgactcggccccatcacgcaggggcaagagagtagagagggacgccttaaagagcagagccacagcctccaatgcagagaaagtgccaggcatcaaccccagtttcgtgttcctgcagctctaccattcccccttctttggcgacgagtcaaacaagccaatcctgctgcccaatgagtcacagtcctttgagcggtcggtgcagctcctcgaccagatcccatcatacgacacccacaagatcgccgtcctgtatgttggagaaggccagagcaacagcgagctcgccatcctgtccaatgagcatggctcctacaggtacacggagttcctgacgggcctgggccggctcatcgagctgaaggactgccagccggacaaggtgtacctgggaggcctggacgtgtgtggtgaggacggccagttcacctactgctggcacgatgacatcatgcaagccgtcttccacatcgccaccctgatgcccaccaaggacgtggacaagcaccgctgcgacaagaagcgccacctgggcaacgactttgtgtccattgtctacaatgactccggtgaggacttcaagcttggcaccatcaagggccagttcaactttgtccacgtgatcgtcaccccgctggactacgagtgcaacctggtgtccctgcagtgcaggaaagacatggagggccttgtggacaccagcgtggccaagatcgtgtctgaccgcaacctgcccttcgtggcccgccagatggccctgcacgcaaatatggcctcacaggtgcatcatagccgctccaaccccaccgatatctacccctccaagtggattgcccggctccgccacatcaagcggctccgccagcggatctgcgaggaagccgcctactccaaccccagcctacctctggtgcaccctccgtcccatagcaaagcccctgcacagactccagccgagcccacacctggctatgaggtgggccagcggaagcgcctcatctcctcggtggaggacttcaccgagtttgtgtgaggccggggccctccctcctgcactggccttggacggtattgcctgtcagtgaaataaataaagtcctgaccccagtgcacagacatagaggcacagattgc

SEQ ID NO: 315950 - DNA, 2811 bp, Artificial Sequence
  derived and/or modified sequence
gtctcgcgagcccggagcgtggcacgtgggttggtaactgtggcgctgctccgcgtccaccaccacccctgtcctcctcaggccccctccgcctccacccctgccctcctcaggccccctccgcctccacccctgccctactcaggccccctccgcctccacccctgccctcctcaggccccctccgcctccacccctgccctcctcaggccccctccgcctccacccctgccctcctcaggccccctccgcctccacccctgccctcctcaggccccctgcgtccccgcctcgtcctcctcaggccccctccgcctccggctccgtcctcctcaggccccctccgcctccggctccgtcctcctctggccccctccgcccccggccccggccccacggcgggatgcgggacaacaccagccccatcagcgtgattctggtgagctcggggagcaggggcaataagctgctgttcaggtaccccttccagagaagccaggagcacccggcgtcccagacaagtaagccgcgtagcagatacgctgccagcaacacgggcgaccatgctgatgagcaggacggcgattccaggccaacgcagacccgtcagtgataaactgtctgcataacctgtcccgtcgtatcgccaccgtgctgcagcacgaggagcgccgctgccagtacctcacccgggaggccaagctgatcctggcgctccaggatgaggtgtccgccatggctgatggaaatgaaggtcctcagtccccattccatcacatcctgcccaagtgcaagctggccagggacctcaaggaagcttatgacagcctgtgcacgtcgggcgtagttcggcttcacatcaacagctggctggaggtgagcttctgcctgccccacaagatccactatgcggcctccagtctgatccccccagaggccatcgaacggagcctgaaagccatccgcccctaccatgccctgctgctgctcagtgatgagaagtccttgctgggtgagcttcctattgactgctcccctgccctagtgcgggtgatcaagaccacatctgctgtgaagaacctgcagcagctagcccaagatgcggacctggccttgctgcaggttttccagcttgcagctcatctggtgtactggggcaaggccatcatcatctacccgctgtgtgagaacaacgtctacatgctgtctcccaatgccagcgtatgtctgtactccccgctggccgagcagttctcccaccagttcccatctcatgacctgccgtccgttcttgccaagttctccttgccggtctccttgtcagaatttaggaatcccctggcccccgctgtgcaggagacccagctcatccagatggtggtgtggatgctgcagcgccggcttctcatccagctgcacacctatgtctgcctgatggcctcacccagcgaggaggagccccgtccgcgagaggacgacgtccccttcactgcccgggtcggcggtcgcagcctcagcacgcccaacgccctcagctttggctccccaaccagcagcgatgacatgaccctcaccagccccagcatggacaactccagcgcagagctacttcccagcggggactcgccactgaaccagaggatgacggagaacctgctggccagctgtcggagcatgaacgcgcagccatcctcagtgtacccgcagcccagaaccctgaggacctccgcatgtttgccaggctccttcactacttccgcggccgccaccacctggaggagattatgtacaacgagaacacgcggcgctcccagctgctcatgctgtttgacaagttccgcagcgtgctggtggtgaccacccacgaggaccctgtcattgccgtcttccaggctctgctcccctgagcccaggcggagggcggaaggctgctggggtgcgcaggtgggcgctcgcgtctccccaccccagggctccccccgtgctgaggctgagccctcttggccctgaggcctggcattgggtggatgcgggctggccgtggcccagtgaagcctgcagagccccgctgtccttgcccctggtggttccgctgtggggctgctgccctctgtgttcctacgcttccctccagtccttgccgcacgcgtaggcatctccacgctggaggggggcctgccaggactcctgtctctgggtgaggccgcatccttcaaggcccatgtgggctgtgcgtttctcagaccctccttctgtccctacacctgctccttggaccccccagtctgtggccaccctgaagaatgtgcagaaacacttgtgtggcctgtccctgtctctctgacagccttctatttgtgaagtgccctgtggccccctccccagcacctctgtctgccatgcgcttcttcctcccaggctaccctgagcctttcctggcccagtcctcaccacagtccacagaagccgcaaacaggctcatagccaagctgtgacctggtcctgaccatctggggcacgagggcctgggctggccctgctaggctggagaagccctgtcacctgtgcacatcttgctggtggaggcatggcccactgtgcaggaccccaccctcgggggctttcggctcccacactgatgattctccccagcatccacaccgggcctggcgctacgtactcaggcccccagctctcgtgtcctggaggaagagctagctccagacatgggttgatcacctagaggagctctggctaaggcacagttttctagaaataaaacatttattcggtttttaaacaattaaaaaa

SEQ ID NO: 315951 - DNA, 3643 bp, Artificial Sequence
  derived and/or modified sequence
ctcgggaggcgatcgtggccgctgccgccgccagagccggccggagtcggcccggagccgcgtccacgcggagcgggcgggtgggagctggcggctgggcccctgcggcgcccccgcggcctgccccgcgtccgcctccgggccgccgagccgcagccgccgagatgggggccgccccgggccgcgcccccgccgggtcccgcccgccgcgctgccgctgagcgcatgggcccggaccgcgccgcgccgctccgggagccgggcccggggtcccgccaccaccgcgcgcgggacagattgattcactttggagctgtaagtactgatgtattagggtgcagcgctcattgttccttgacgcagagtcccaaaatgaatatccaagagcagggtttccccttggacctcggagcaagtttcaccgaagatgctccccgacccccagtgcctggtgaggagggagaactggtgtccacagacccgaggcccgccagctacagtttctgctccgggaaaggtgttggcattaaaggtgagacttcgacggccactccgaggcgctcggatctggacctggggtatgagcctgagggcagtgcctcccccaccccaccatacttgaagtgggctgagtcactgcattccctgctggatgaccaagatgggataagcctgttcaggactttcctgaagcaggagggctgtgccgacttgctggacttctggtttgcctgcactggcttcaggaagctggagccctgtgactcgaacgaggagaagaggctgaagctggcgagagccatctaccgaaagtacattcttgataacaatggcatcgtgtcccggcagaccaagccagccaccaagagcttcataaagggctgcatcatgaagcagctgatcgatcctgccatgtttgaccaggcccagaccgaaatccaggccactatggaggaaaacacctatccctccttccttaagtctgatatttatttggaatatacgaggacaggctcggagagccccaaagtctgtagtgaccagagctctgggtcagggacagggaagggcatatctggatacctgccgaccttaaatgaagatgaggaatggaagtgtgaccaggacatggatgaggacgatggcagagacgctgctccccccggaagactccctcagaagctgctcctggagacagctgccccgagggtctcctccagtagacggtacagcgaaggcagagagttcaggtatggatcctggcgggagccagtcaacccctattatgtcaatgccggctatgccctggccccagccaccagtgccaacgacagcgagcagcagagcctgtccagcgatgcagacaccctgtccctcacggacagcagcgtggatgggatccccccatacaggatccgtaagcagcaccgcagggagatgcaggagagcgtgcaggtcaatgggcgggtgcccctacctcacattccccgcacgtaccgggtgccgaaggaggtccgcgtggagcctcagaagttcgcggaggagctcatccaccgcctggaggctgtgcagcgcacgcgggaggccgaggagaagctggaggagcggctgaagcgcgtgcgcatggaggaggaaggtgaggacggcgatccatcgtcagggcccccagggccgtgtcacaagctgcctcccgcccccgcttggcaccacttcccgccccgctgtgtggacatgggctgtgccgggctccgggatgcacacgaggagaaccctgagagcatcctggacgagcacgtacagcgtgtgctgaggacacctggccgccagtcgcctgggcctggccatcgctccccggacagtgggcacgtggccaagatgccagtggcactggggggtgccgcctcggggcacgggaagcacgtacccaagtcaggggcgaagctggacgcggccggcctgcaccaccaccgacacgtccaccaccacgtccaccacagcacagcccggcccaaggagcaggtggaggccgaggccacccgcagggcccagagcagcttcgcctggggcctggaaccacacagccatggggcaaggtcccgaggctactcagagagtgttggcgctgcccccaacgccagtgatggcctcgcccacagtgggaaggtgggcgtggcgtgcaaaagaaatgccaagaaggctgagtcggggaagagcgccagcaccgaggtgccaggtgcctcggaggatgcggagaagaaccagaaaatcatgcagtggatcattgagggggaaaaggagatcagcaggcaccgcaggaccggccacgggtcttcggggacgaggaagccacagccccatgagaactccagacccttgtcccttgagcacccctgggccggccctcagctccggacctccgtgcagccctcccacctcttcatccaagaccccaccatgccaccccacccagctcccaaccccctaacccagctggaggaggcgcgccgacgtctggaggaggaagaaaagagagccagccgagcaccctccaagcagaggtatgtgcaggaggttatgcggcggggacgcgcctgcgtcaggccagcgtgcgcgccggtgctgcacgtggtaccagccgtgtcggacatggagctctccgagacagagacaagatcgcagaggaaggtgggcggcgggagtgcccagccgtgtgacagcatcgttgtggcgtactacttctgcggggaacccatcccctaccgcaccctggtgaggggccgcgctgtcaccctgggccagttcaaggagctgctgaccaaaaagggcagctacagatactacttcaagaaagtgagcgacgagtttgactgtggggtggtgtttgaggaggttcgagaggacgaggccgtcctgcccgtctttgaggagaagatcatcggcaaagtggagaaggtggactgataggctggtgggctggccgctgtgccaggcgaggcccttggcgggcacgggtgtcacggccaggcagatgacctcgtactcaggagcccgatggggaacagtgttgggtgtaccacccatccctgtggtctacccgtgtctagaggcaggtagggggtccctccaagtggtccacaagcttctgtcctgcccccaaggaggcagcctggaccactcctcatagcaatacttggagggcccagcccaagtgaggcagccgaggtccctgctgccagcttcaggtgacccccccccatcccccggcacctcccttgggcacgtgtgctgggatctactttccctctgggatttgcccacgtacccaggtctgggtggggcccaggcccggatgcagaggcctgcagggcctctgtcaattgtacgcgccaccgagtgccttcaacacagcttgtctcttgcctgccactgtgtgaatcggcgacggagcactgcacctgcctccagccgccggctgtgcagtcctgggtcctcctttctgagggcccgtgtaaatatgtacatttctcaggctaggccagcaggggctgcccgagtctgtttttcatgcgatgacacttgtacaattaattatcttttcaaaggtacttggataataatgaaataaaactgtttttgaacctgc

SEQ ID NO: 315952 - DNA, 3324 bp, Artificial Sequence
  derived and/or modified sequence
gctgccgctgagcgcatgggcccggaccgcgccgcgccgctccgggagccgggcccggggtcccgccaccaccgcgcgcgggacagattgattcactttggagctgtaagtactgatgtattagggtgcagcgctcattgttccttgacgcagagtcccaaaatgaatatccaagagcagggtttccccttggacctcggagcaagtttcaccgaagatgctccccgacccccagtgcctggtgaggagggagaactggtgtccacagacccgaggcccgccagctacagtttctgctccgggaaaggtgttggcattaaaggtgagacttcgacggccactccgaggcgctcggatctggacctggggtatgagcctgagggcagtgcctcccccaccccaccatacttgaagtgggctgagtcactgcattccctgctggatgaccaagatgggataagcctgttcaggactttcctgaagcaggagggctgtgccgacttgctggacttctggtttgcctgcactggcttcaggaagctggagccctgtgactcgaacgaggagaagaggctgaagctggcgagagccatctaccgaaagtacattcttgataacaatggcatcgtgtcccggcagaccaagccagccaccaagagcttcataaagggctgcatcatgaagcagctgatcgatcctgccatgtttgaccaggcccagaccgaaatccaggccactatggaggaaaacacctatccctccttccttaagtctgatatttatttggaatatacgaggacaggctcggagagccccaaagtctgtagtgaccagagctctgggtcagggacagggaagggcatatctggatacctgccgaccttaaatgaagatgaggaatggaagtgtgaccaggacatggatgaggacgatggcagagacgctgctccccccggaagactccctcagaagctgctcctggagacagctgccccgagggtctcctccagtagacggtacagcgaaggcagagagttcaggtatggatcctggcgggagccagtcaacccctattatgtcaatgccggctatgccctggccccagccaccagtgccaacgacagcgagcagcagagcctgtccagcgatgcagacaccctgtccctcacggacagcagcgtggatgggatccccccatacaggatccgtaagcagcaccgcagggagatgcaggagagcgtgcaggtcaatgggcgggtgcccctacctcacattccccgcacgtaccgggtgccgaaggaggtccgcgtggagcctcagaagttcgcggaggagctcatccaccgcctggaggctgtgcagcgcacgcgggaggccgaggagaagctggaggagcggctgaagcgcgtgcgcatggaggaggaaggtgaggacggcgatccatcgtcagggcccccagggccgtgtcacaagctgcctcccgcccccgcttggcaccacttcccgccccgctgtgtggacatgggctgtgccgggctccgggatgcacacgaggagaaccctgagagcatcctggacgagcacgtacagcgtgtgctgaggacacctggccgccagtcgcctgggcctggccatcgctccccggacagtgggcacgtggccaagatgccagtggcactggggggtgccgcctcggggcacgggaagcacgtacccaagtcaggggcgaagctggacgcggccggcctgcaccaccaccgacacgtccaccaccacgtccaccacagcacagcccggcccaaggagcaggtggaggccgaggccacccgcagggcccagagcagcttcgcctggggcctggaaccacacagccatggggcaaggtcccgaggctactcagagagtgttggcgctgcccccaacgccagtgatggcctcgcccacagtgggaaggtgggcgtggcgtgcaaaagaaatgccaagaaggctgagtcggggaagagcgccagcaccgaggtgccaggtgcctcggaggatgcggagaagaaccagaaaatcatgcagtggatcattgagggggaaaaggagatcagcaggcaccgcaggaccggccacgggtcttcggggacgaggaagccacagccccatgagaactccagacccttgtcccttgagcacccctgggccggccctcagctccggacctccgtgcagccctcccacctcttcatccaagaccccaccatgccaccccacccagctcccaaccccctaacccagctggaggaggcgcgccgacgtctggaggaggaagaaaagagagccagccgagcaccctccaagcagaggacaagatcgcagaggaaggtgggcggcgggagtgcccagccgtgtgacagcatcgttgtggcgtactacttctgcggggaacccatcccctaccgcaccctggtgaggggccgcgctgtcaccctgggccagttcaaggagctgctgaccaaaaagggcagctacagatactacttcaagaaagtgagcgacgagtttgactgtggggtggtgtttgaggaggttcgagaggacgaggccgtcctgcccgtctttgaggagaagatcatcggcaaagtggagaaggtggactgataggctggtgggctggccgctgtgccaggcgaggcccttggcgggcacgggtgtcacggccaggcagatgacctcgtactcaggagcccgatggggaacagtgttgggtgtaccacccatccctgtggtctacccgtgtctagaggcaggtagggggtccctccaagtggtccacaagcttctgtcctgcccccaaggaggcagcctggaccactcctcatagcaatacttggagggcccagcccaagtgaggcagccgaggtccctgctgccagcttcaggtgacccccccccatcccccggcacctcccttgggcacgtgtgctgggatctactttccctctgggatttgcccacgtacccaggtctgggtggggcccaggcccggatgcagaggcctgcagggcctctgtcaattgtacgcgccaccgagtgccttcaacacagcttgtctcttgcctgccactgtgtgaatcggcgacggagcactgcacctgcctccagccgccggctgtgcagtcctgggtcctcctttctgagggcccgtgtaaatatgtacatttctcaggctaggccagcaggggctgcccgagtctgtttttcatgcgatgacacttgtacaattaattatcttttcaaaggtacttggataataatgaaataaaactgtttttgaacctg

SEQ ID NO: 315953 - DNA, 334 bp, Artificial Sequence
  derived and/or modified sequence
gtctggaggaggaagaaaagagagccagccgagcaccctccaagcagaggacaagatcgcagaggaaggtgggcggcgggagtgcccagccgtgtgacagcatcgttgtggcgtactacttctgcggggaacccatcccctaccgcaccctggtgaggggccgcgctgtcaccctgggccagttcaaggagctgctgaccaaaaagggcagctacaggcctccttcccatctgcggtgctgcctgctcactgccctcctcacctccgtcctgcagatactacttcaagaaagtgagcgacgagtttgactgtggggtggtgtttgaggaggttc

SEQ ID NO: 315954 - protein, 102 aa, Artificial Sequence
  derived and/or modified sequence
  misc_feature (1)..(1): Xaa can be any naturally occurring amino acid
XLEEEEKRASRAPSKQRTRSQRKVGGGSAQPCDSIVVAYYFCGEPIPYRTLVRGRAVTLGQFKELLTKKGSYRPPSHLRCCLLTALLTSVLQILLQESERRV

SEQ ID NO: 315955 - DNA, 309 bp, Artificial Sequence
  derived and/or modified sequence
tgactggaggaggaagagaagcgggccagcagagctccctccaagcagcgcacacgatcccaacggaaggtgggcggaggcagcgcccaaccctgtgactcaattgtggtggcatactatttctgtggagaacctatcccctaccgtacattggttcgcggtagagccgtaaccctcgggcagtttaaagagttgctaacaaagaagggctcctaccggcctccaagccatctccgctgttgtctcctcaccgcactcctcacttccgtcctccagatcctgctgcaagaaagcgagagacgagtgtag

SEQ ID NO: 315956 - DNA, 309 bp, Artificial Sequence
  derived and/or modified sequence
tgactggaggaggaggagaagagggccagccgggcccccagcaagcagaggaccaggagccagaggaaggtgggcggcggcagcgcccagccctgtgacagcatcgtggtggcctactacttctgtggggagcccatcccctaccgcaccctggtgcggggccgggctgtgaccctgggccagttcaaggagctgctgaccaagaagggcagctaccggccccccagccacctgcgctgctgcctgctgacagccctgctgacctctgtgctgcagatcctgctgcaggagagcgagcggcgggtgtag

SEQ ID NO: 315957 - DNA, 309 bp, Artificial Sequence
  derived and/or modified sequence
tgactggaggaggaggagaagcgggccagccgggcccccagcaagcagaggacccggtcccaacgaaaggtgggagggggtagtgcccagccttgtgattctatcgtggtggcatactatttttgcggtgaacctatcccatatcgtaccttggtgagaggcagagcggtaactttgggccaatttaaagaactgttgacaaagaagggatcctaccgccccccctcccacctccggtgctgtctgctcactgcgctgctgacgtctgtcctgcaaatcctactacaggagtccgaaagacgagtctag

SEQ ID NO: 315958 - DNA, 309 bp, Artificial Sequence
  derived and/or modified sequence
tagttggaggaggaggaaaaaagggcctctcgcgcaccctcaaagcaacgaaccaggagccagaggaaggtgggcggaggatccgcacagccttgcgattccatcgtcgtcgcctactacttctgcggcgagcctataccctatagaactttggtcaggggcagagcggtgacactgggccagttcaaggaactcctgacaaagaagggtagctatagacctcctagtcacctaaggtgttgtctgctaactgcgcttctgacatccgtccttcaaattcttctgcaggaaagcgagcgaagggtttag

SEQ ID NO: 315959 - DNA, 309 bp, Artificial Sequence
  derived and/or modified sequence
tgactggaggaggaggagaagagagccagcagagcccccagcaagcagagaaccagaagccagagaaaggtgggcggcggcagcgcccagccctgcgacagcatcgtggtggcctactacttctgcggcgagcccatcccctacagaaccctggtgagaggcagagccgtgaccctgggccagttcaaggagctgctgaccaagaagggcagctacagaccccccagccacctgagatgctgcctgctgaccgccctgctgaccagcgtgctgcagatcctgctgcaggagagcgagagaagagtgtag

SEQ ID NO: 315960 - DNA, 189 bp, Artificial Sequence
  derived and/or modified sequence
atgttgcaggtcgtgcaggaagggaacccagcaccgttcattattaatacagtgaagagagggcgcagggaccgggagagacagaggacgccctgggccccccaccctctgggcttccaaggtcgaaggtacatttatgaatctccaaaccatagaggcaaggattccagttttttggcgcagaagtag

SEQ ID NO: 315961 - DNA, 159 bp, Artificial Sequence
  derived and/or modified sequence
atgaaactgtgtgtcacagtcctctctctgctcgtgttggtggccgcattttgctccctggcactgagtgcccccaacagtaagcctaaggaggcgtcgaagagcgcgctaacacctgttagccccggaagcagatctacatgtatgacctggaactag

SEQ ID NO: 315962 - DNA, 159 bp, Artificial Sequence
  derived and/or modified sequence
atgaagctgtgtgtgacagtgctgagcctgctggtgctggtggccgccttctgcagcctggccctgagcgcccccaacagcaagcccaaggaggccagcaagagcgccctgacccctgtgtccccaggcagccgcagcacctgcatgacctggaactag

SEQ ID NO: 315963 - DNA, 159 bp, Artificial Sequence
  derived and/or modified sequence
atgaagctgtgcgtgaccgtgctgagcctgctggtgctggtggccgccttctgcagcctggccctgagcgcccccaacagcaagcccaaggaggccagcaagagcgccctgacccccgtgagccccggcagcagaagcacctgcatgacctggaactag

SEQ ID NO: 315964 - DNA, 808 bp, Artificial Sequence
  derived and/or modified sequence
agccatggccgccggccccgcgccgccccccggccgcccccgggcgcagatgccgcatctgaggaaggtgcgaggcgggcagcgacgtcgtgcagtggttggcccagaagttctgcgtctcggaggaggaggccctgcacctgggcgccgtcctggtgcagcatggctacatctacccgctgcgcgacccccgtagcctcatgctccggccagacgagacgccctacaggttccaggtcaggctcgggggtgcaggtgggagccggtgggacccccacccccacccacccagcttaccaactcggggagacaggaggggcgccgagcttgctgggattggagtgggactccgccatgtcgccgtgggctggtggtccatcgccccctccccaaaagtcctggaccgcaagtacggatgtggtgagaaggacccggctgagggatggagcctcagttttcctggggaccacagcagggccccacaaggggtcgtatgtgcagaggattctgccatcttcctgggggtccctaggcccaggtcctgagggaggggctgtgaaggcctgaggacagcattcctgccctccctaaccacatcagggtcccgggccgacctgccgtcggttgtacccctccccaggcacagactgtgactacatccaagacttgtgcaggcccccagccccaccccgccttgaatgggggcttagggtgaccagtgagggaggcagtgtctgaacagggccctaaggagcgagttgacctcagttctagttggagagactggccagtggtcagtggagtctct

SEQ ID NO: 315965 - protein, 261 aa, Artificial Sequence
  derived and/or modified sequence
MAAGPAPPPGRPRAQMPHLRKMERVVVSMQDPDQGVKMRSQRLLVTVIPHAVTGSDVVQWLAQKFCVSEEEALHLGAVLVQHGYIYPLRDPRSLMLRPDETPYRFQTPYFWTSTLRPAAELDYAIYLAKKNIRKRGTLVDYEKDCYDRLHKKINHAWDLVLMQAREQLRAAKQRSKGDRLVIACQEQTYWLVNRPPPGAPDVLEQGPGRGSCAASRVLMVEASRTRGTRPEGASEPRSSKTLCSNQSHPDPTSGKMHLEPH

SEQ ID NO: 315966 - DNA, 786 bp, Artificial Sequence
  derived and/or modified sequence
atggccgccggccccgcccccccccccggcagacccagagcccagatgccccacctgagaaagatggagagagtggtggtgagcatgcaggaccccgaccagggcgtgaagatgagaagccagagactgctggtgaccgtgatcccccacgccgtgaccggcagcgacgtggtgcagtggctggcccagaagttctgcgtgagcgaggaggaggccctgcacctgggcgccgtgctggtgcagcacggctacatctaccccctgagagaccccagaagcctgatgctgagacccgacgagaccccctacagattccagaccccctacttctggaccagcaccctgagacccgccgccgagctggactacgccatctacctggccaagaagaacatcagaaagagaggcaccctggtggactacgagaaggactgctacgacagactgcacaagaagatcaaccacgcctgggacctggtgctgatgcaggccagagagcagctgagagccgccaagcagagaagcaagggcgacagactggtgatcgcctgccaggagcagacctactggctggtgaacagacccccccccggcgcccccgacgtgctggagcagggccccggcagaggcagctgcgccgccagcagagtgctgatggtggaggccagcagaaccagaggcaccagacccgagggcgccagcgagcccagaagcagcaagaccctgtgcagcaaccagagccaccccgaccccaccagcggcaagatgcacctggagccccactag

SEQ ID NO: 315967 - DNA, 786 bp, Artificial Sequence
  derived and/or modified sequence
atggctgccggtcctgcccctcctcctggtcgccctcgcgcacagatgccgcacctgcgcaaaatggaacgggtcgtagttagtatgcaggatccggatcagggtgtgaagatgcgctctcaaaggttgctcgtgacagtcattcctcacgcagtcaccggctctgatgtggttcagtggctggctcagaaattctgcgtcagcgaggaagaggccctgcacttaggcgcagtactcgtgcagcacgggtatatttatccgctgcgcgaccccaggagccttatgctccggcctgacgagactccataccggtttcagaccccttatttctggacatcaactctacgaccagccgcggagttagattacgcaatctatctggcaaagaagaacattcggaaacgagggactcttgttgactacgagaaggattgttatgacagactgcataagaaaataaaccatgcttgggacctggttttaatgcaggcgcgggagcaactgcgggcagccaaacagcggagcaagggcgacagactggtcatcgcatgccaggagcaaacatactggttggtgaatagaccccctcctggagcgcctgacgtgttggaacagggacccggccgcggttcctgcgcggcgtccagggtactcatggttgaggcctctagaactcggggtacccggcctgaaggcgccagcgagcctcgatcgtctaagactctgtgcagcaatcagagccacccagatcccacgagtggcaagatgcacctggaacctcattag

SEQ ID NO: 315968 - DNA, 786 bp, Artificial Sequence
  derived and/or modified sequence
atggctgctggccctgcccctcctcctggccggccccgggcccagatgccccacctgaggaagatggagcgggtggtggtgtccatgcaggaccctgaccagggcgtgaagatgaggagccagaggctgctggtgaccgtcatcccccatgctgtgactggaagtgatgtggtgcagtggctggcccagaagttctgtgtgtctgaggaggaggccctgcacctgggcgctgtgctggtgcagcacggctacatctaccccctgcgggaccccaggagcctgatgctgcggccagatgagaccccctaccgcttccagaccccctacttctggaccagcaccctgcggcctgctgctgagctggactatgccatctacctggccaagaagaacatcaggaagaggggcaccctggtggactatgagaaggactgctatgaccggctgcacaagaagatcaaccacgcctgggacctggtgctgatgcaggcccgggagcagctgcgggccgccaagcagaggagcaagggggaccggctggtgattgcctgccaggagcagacctactggctggtgaacagacctcctcctggggccccagatgtgctggagcagggccctggccggggcagctgtgccgccagccgggtgctgatggtggaggccagcaggacccggggcaccaggcctgagggcgccagcgagcccaggagcagcaagaccctgtgcagcaaccagagccacccagaccccaccagcggcaagatgcacctggagccccactag

SEQ ID NO: 315969 - DNA, 786 bp, Artificial Sequence
  derived and/or modified sequence
atggccgccggccccgcccccccccccggccggccccgggcccagatgccacatctcagaaaaatggaacgtgtggtcgtctcaatgcaggaccctgatcagggcgtcaaaatgaggagccaaagactactcgtgaccgtgattccgcacgccgtgacaggctcagacgtcgtgcaatggctcgctcagaagttctgcgtatccgaagaggaagccctgcatctaggagctgtcctcgtacaacacggatacatttacccactgcgcgacccccggagtctcatgcttcgacctgacgagactccataccgatttcagaccccatacttttggacctctacacttaggcctgcagctgaactcgattatgcaatctacctggccaaaaagaacattagaaagagaggtactcttgtggattatgagaaggactgctatgatcgtctacataagaagatcaaccatgcctgggaccttgtgttaatgcaagctcgcgaacaacttcgcgccgcaaagcaacgctccaagggtgaccgcttagtgatcgcgtgtcaggagcaaacatattggctggtgaataggccacccccaggcgctcctgatgttcttgaacagggtccgggaaggggttcgtgcgccgcaagtcgcgtgctgatggtcgaagcttccaggacacgtggtaccaggccagagggcgcatccgagccccggagtagcaaaactctgtgctcaaaccaatctcatccggacccaacaagtggaaaaatgcatcttgagccgcactag

SEQ ID NO: 315970 - DNA, 786 bp, Artificial Sequence
  derived and/or modified sequence
atggcagcaggacccgctcccccacctggaaggcctcgggcacaaatgcctcacttgcgcaaaatggaacgtgtggtcgtctctatgcaggaccctgaccagggcgtgaagatgcgctcccagcggctactggtgactgtgattccacacgccgtgactggaagtgatgtcgttcagtggctggctcaaaagttctgcgtttcagaggaggaggcattacacctaggcgcagtattggtgcaacatggctatatctaccctctgcgggaccccagatctctcatgttgaggcccgacgaaaccccttacagattccagaccccctacttctggacaagcactctccgccctgcagctgaactggactacgccatatatctcgcaaagaaaaatatcaggaagcggggaacacttgtggattacgaaaaggactgttatgaccgcctacataagaaaatcaatcacgcctgggacctggtgctgatgcaggctagggagcagctgagagccgctaagcagagatctaagggcgaccggcttgtgattgcttgccaggaacagacctattggctggtcaacaggccaccgcctggtgctcccgatgtcctggaacagggcccaggccgtgggagttgcgctgcctcgcgggtgctgatggtagaggcctccaggacgagaggaacacggccagaaggagcatcagagcccagaagcagtaagaccctctgttctaatcaatcccatccggaccccacctcaggaaagatgcaccttgaaccccattag

SEQ ID NO: 315971 - DNA, 918 bp, Artificial Sequence
  derived and/or modified sequence
atccccgccggcctcgccccgcagccatggccgccggccccgcgccgccccccggccgcccccgggcgcagatgccgcatctgaggaagatggagcgggtggtcgtgagcatgcaggaccccgaccagggcgtgaagatgcggagccagcgcctgctggtcaccgtcattccccacgcggtgacaggcagcgacgtcgtgcagtggttggcccagaagttctgcgtctcggaggaggaggccctgcacctgggcgccgtcctggtgcagcatggctacatctacccgctgcgcgacccccgtagcctcatgctccggccagacgagacgccctacaggttccagaccccgtacttctggacaagtaccctgaggccggctgcagagctggactatgccatctacctggccaagaagaacatccgaaaacgggggaccctggtggattatgagaaggactgctatgaccggctacacaagaagatcaaccacgcatgggacctggtgctgatgcaggcgagggagcagctgagggcagccaagcagcgcagcaagggggacaggctggtcattgcgtgccaggagcagacctactggctggtgaacaggcccccgcccggggcccccgatgtgctggagcagggtccagggcggggatcctgcgctgccagccgtgtgctcatggtggaggcctccagaaccagagggaccagaccagagggagcatctgagccccgcagcagcaaaaccctttgttcaaaccagtcccatccagacccaacatctggaaagatgcacctagaacctcactgataaaacttcttaagttcacgaccctaacatttccccatacaaagctggtcagagagagcggggacacaggccaggactcgcagcgcgtccgcctcctccgctctgg

SEQ ID NO: 315972 - DNA, 99 bp, Artificial Sequence
  derived and/or modified sequence
atggccccgaagcgacagtcccctctgcccccacaaaagaagaaaccgaggccacctcctgccctgggccccgaagagactagcgccagcgcaggctag

SEQ ID NO: 315973 - protein, 1169 aa, Artificial Sequence
  derived and/or modified sequence
MSTLLDIKSSVLRQVQVCPSFRRRTEQDPGSASADPQEPATGAWKPGDGVEFFAHMRLMLKKGEGRQGLPCLEAWGSPCRQSPHPGPHTQVPLRSGSPAPPEPVDPSLGLRALAPEEVEMLYEEALYTVLYRAGTMGPDQVDDEEALLSYLQQVFGTSLEEHTEAIERVRKAKAPTYALKVSVMRAKNLLAKDPNGFSDPYCMLGILPASDATREPRAQKEQRFGFRKGSKRGGPLPAKCIQVTEVKSSTLNPVWKEHFLFEIEDVSTDQLHLDIWDHDDDVSLVEACRKLNEVIGLKGMGRYFKQIVKSARANGTAGPTEDHTDDFLGCLNIPVREVPVAGVDRWFKLEPRSSASRVQGHCHLVLKLITTQRDTAMSQRGRSGFLSHLLLLSHLLRLEHSAEEPNSSSWRGELSTPAATILCLHGAQSNLSPLQLAVLHWQVSSRHHQTCTLDYSYLLGLLEDMQAHWEEAPSLPQEQEESLADSLSAFSEFGLQLLRQLRDYFPATNSTAVHRLELLLKCLGKLQLFQPSFEICPFESELNMDIAAALKRGNREWYDRILNDKSPREQPGPQRLPGLVVLADAVYDDLQFCYSVYASLFHSILNVDVFTLTFRQLERLVAEEAWVLTEELSPKMTLEVASGLFELYLTLADLQRFWDSIPGRDSRSLALAGIHAPFLPAVKLWFQVLRDQAKWRLQGAVDMDTLEPVDASSRHSSSAATAGLCLSHIQELWVRLAWPDPAQAQGLGTQLGQDVCEATLFYTELLRKKVDTQPGAAGEAVSEALCVVLNNVELVRKAAGQALKGLAWPEGATGPEGVLPRPLLSCTQALDDDLQREAHTVTAHLTSKMVGDIRKYVQHISLSPDSIQNDEAVAPLMKYLDEKLALLNASLVKGNLSRVLEALWELLLQAILQALGANRDVSADFYSRFHFTLEALVSFFHAEGQGLPLESLRDGSYKRLKEELRLHKCSTRECIEQFYLDKLKQRTLEQNRFGRLSVRCHYEAAEQRLAVEVLHAADLLPLDANGLSDPFVIVELGPPHLFPLVRSQRTQVKTRTLHPVYDELFYFSVPAEACRRRAACVLFTVMDHDWLSTNDFAGEAALGLGGVTGVARPQVGGGARAGQPVTLHLCRPRAQVRSALRRLEGRTSKEAQEFVKKLKELEKCMEADP

SEQ ID NO: 315974 - DNA, 3510 bp, Artificial Sequence
  derived and/or modified sequence
atgtcaaccttgctagacatcaagagcagcgtgctgagacaggtccaggtctgccctagctttagaaggaggaccgaacaggaccccgggagcgctagcgcagacccccaggagcccgcaactggagcttggaaacctggcgacggggtcgaattctttgctcacatgcgcctgatgctgaagaaaggcgaaggtcggcagggcctgccgtgtctggaagcttgggggtccccttgtcgacagtcaccccaccccggcccgcacactcaggtcccgttgaggtccggttcgccagccccgcctgaacctgtggaccctagcctcgggctgcgggcacttgcacccgaggaggtggaaatgttgtatgaggaagcgctgtataccgtgctctatagggccggcacgatgggcccagatcaggttgatgacgaggaggccctcttaagctacttacaacaggtttttggaaccagcctggaagaacacaccgaggctatcgagcgagtgcggaaggctaaagccccaacttatgccctgaaggtcagcgtgatgagggccaagaacctcctggcaaaggatcccaatggattctcagatccctactgtatgctcggaattctgcccgcctccgatgccactcgtgagccccgcgctcagaaggaacaacgcttcggttttcggaaaggaagcaaacggggaggccctctaccagcaaagtgcatacaggtgacagaagttaagtcgtcaactctgaatcccgtttggaaggagcacttcctcttcgagatcgaagacgttagtacagaccaactgcatcttgacatttgggatcacgacgacgacgtgtcactcgtggaggcctgccggaaactgaacgaggtcatcggattgaagggtatgggacggtattttaagcagatcgtcaagagcgctagagccaacgggacagctggtcctactgaggaccacaccgacgactttctggggtgccttaacataccagtgagagaggtgccagtcgcaggcgtggaccgctggttcaagttggagccacggtcaagcgcgtcaagggtgcagggacattgccacctggtgttgaaactgatcaccactcagcgggacacagcaatgtcacagcgggggagatccggttttctttcacatttactcctgctgagccacctgttacgactcgaacatagtgcggaagagcccaacagttcaagttggcggggtgagctgtcgacaccggcagccaccatattatgcctacatggtgctcagtcaaacctatccccactacaattggctgtgctccactggcaggtatctagtagacatcatcagacttgcaccctggactactcgtacctcctgggcctgctcgaagacatgcaagctcattgggaggaggctcctagcttaccccaggagcaggaggagtccctcgctgattctctgtccgcgttctccgaattcggcctgcaactcctgagacagctccgggattacttccccgccactaatagtaccgcggtgcatcgactggaactgctccttaagtgtctgggtaaacttcagctgttccaaccctcctttgaaatttgcccgtttgaatccgagctcaacatggacatcgccgctgccctgaaacgcggtaatcgcgagtggtatgatagaattctgaacgacaagtccccaagagaacagcccggacctcagcggctgcctggtcttgtggtactcgcagacgccgtctacgacgatctacagttttgttattcagtttatgcaagtctcttccactcaatcctcaacgtcgacgtgtttacccttacatttaggcagctcgagcgcttagttgctgaagaggcatgggttctgacagaggaactttccccgaagatgacactcgaagtggcttccggcctcttcgaactctatctgaccttggcagatctacagaggttttgggactctatccccggccgggattcccggtccttggccttggccggaattcacgcccccttcttgccagctgtcaagctgtggttccaggttcttcgcgaccaggccaagtggcgtctccagggggccgttgacatggacaccctcgagcccgtggatgcttccagcaggcattcatcaagcgcagcaacagctggactgtgcttgtcccacatccaggagctgtgggtacgcctcgcctggcctgatcccgctcaggctcaaggattaggaacccagctcggccaagacgtgtgcgaggcaaccctattctataccgaactcctacggaagaaagtggatactcaaccaggcgctgccggcgaggccgtcagcgaggctctgtgcgtcgtgctcaacaacgtagagttagttagaaaggccgctggccaggcattaaagggattggcatggcccgagggtgccaccggccccgaaggtgtactgcctaggccactgctatcatgtacacaggccctggacgatgacctgcagagagaagctcacaccgtcactgcacacctgacttcaaagatggttggcgacattcgcaagtatgtccagcacatcagcctgagcccagacagcatacaaaatgatgaggccgttgctcccctcatgaagtatttggatgaaaagttggcactgctgaatgcctccttagtgaaaggaaacctgtcaagggtgctcgaggcgctatgggaactgctgctgcaggcaatcctccaggctttgggtgccaatagggacgtgtcagccgacttttatagccgtttccactttaccctcgaagccttggtgagcttcttccacgccgaggggcaaggcctgccactcgaatctctccgggacggctcctataaacgcctgaaggaagaattgcggcttcacaaatgttcaacccgggaatgcatcgagcagttttatctcgacaaattaaagcaacgaacactagaacagaaccgcttcgggcggctctcagtgagatgccactatgaggctgcggagcaaagattggccgtggaagtgctgcatgcggcagatctgcttcctctggatgccaacgggctctcagatccttttgtgattgtggagctgggacctccccatctctttccgctggtgagaagtcagcgcacacaggttaaaacaaggactctacatcccgtgtatgatgagctgttctacttttcagtgcccgccgaggcatgtcggagacgcgcagcgtgcgtgctttttactgtcatggaccatgactggctctccactaatgatttcgcgggcgaggccgcactcgggctcggcggtgtcacaggtgtcgcacggccccaagtcggcggtggagcacgcgctgggcagcctgtgacgctacatttatgcaggccacgggcccaggtgagaagcgcccttcgcagattggagggtcgaacatccaaagaagctcaggagttcgtgaaaaaacttaaggagctggagaaatgtatggaggccgacccttag

SEQ ID NO: 315975 - DNA, 3510 bp, Artificial Sequence
  derived and/or modified sequence
atgtccactttactggacatcaagagcagcgtgctaaggcaggtccaggtatgcccttcattccgccgccggacagaacaagatccaggctcagccagtgcagacccccaggagccagcgacaggggcatggaagccaggggacggtgtggagtttttcgcccacatgcggctcatgctgaaaaaaggtgagggacggcagggactcccgtgtctggaagcttggggatccccctgcagacaaagcccccatccaggaccacacactcaagtccctctgcggtccgggtcacccgcgccacccgagcctgtggatccctcgctgggtctgcgggcactggcacccgaggaagtggaaatgttatacgaggaggctctctacacagtcttgtacagagcagggacaatgggaccagatcaggtggatgatgaggaggccctgctctcatacctccagcaggttttcgggacttcactcgaggaacatacggaggcgatcgaacgggtgaggaaggcaaaagcgccaacctacgctttaaaggtgtctgtgatgagggccaagaacctgctggccaaagatcccaatggcttcagcgacccttactgcatgttaggcattcttcccgcgtccgatgccactcgtgaacctcgtgcccagaaagagcagcgctttggcttcaggaaaggctcgaaaaggggaggcccactacccgctaagtgcattcaggtgacagaagtgaagagcagcactttgaaccctgtgtggaaagagcacttcttgtttgaaatcgaagacgtgtcgacagatcaactgcacctcgacatctgggaccacgatgacgacgtcagcctagtggaagcttgccgtaaactgaatgaagtgatcggtcttaaaggcatggggagatactttaaacaaattgtcaagtctgctcgggccaatggtaccgccggtccgactgaggaccacacagacgattttttagggtgtttaaatattcccgttagagaggtccccgttgccggggtcgaccggtggttcaagctggagccccggtcttccgcatctcgagtgcagggccactgtcacctggtgcttaaattgatcactacacagagagataccgcaatgagtcaacgcggaaggtccggatttctctcccacctcctgctcttaagccacctactgaggctggagcactcggccgaggagcccaattccagctcctggcgaggcgagctgagcacacccgcagccaccattctgtgtctgcatggcgcccaatctaacctgagtcctctgcagctcgccgtcctgcactggcaagtcagcagtcggcatcaccagacctgtacgctcgattactcctaccttttaggactgctggaagacatgcaagcgcactgggaagaagcaccgagccttccccaggaacaggaggagagtctggctgattccctgtcagccttctcagagttcggtttacagctgcttaggcagttgagggattacttcccagctacaaattccactgcagtacaccggctggagctgttactgaagtgtctggggaagctgcagctattccagccatcattcgagatctgccccttcgaatccgaactgaacatggatattgcggctgccctcaagagaggtaacagagagtggtacgatcggatcctcaacgacaagagtcccagggaacagccagggccgcaacgattaccggggctcgtggtgttggccgacgcggtgtacgacgacctacagttctgttacagcgtttacgcttctttgttccattccatcctcaacgtggacgtatttacgttgacattcagacagctggagcgcctcgtggctgaggaagcttgggtgcttactgaggagctgtcccctaaaatgacactggaggtcgccagcgggctttttgaactttatttgacgctcgcagacctgcagaggttctgggactccatcccaggaagggattcacgtagtcttgcgctcgccgggattcacgctcctttccttccggcagttaagctgtggttccaggttctgcgcgaccaggcaaagtggagactacagggcgcagtggacatggatacgctagagccagtcgatgcaagtagccgtcacagttctagtgcagccactgctgggttgtgcctgagccacatccaggagctgtgggtacgactggcctggcctgaccctgcgcaggcgcagggtttgggaactcaactgggtcaggacgtttgtgaggccaccctgttttatacggaactgcttagaaagaaggttgatactcagcctggagctgcaggcgaggcggtgtctgaggccctctgtgtggttctcaataacgtcgaactcgtgcggaaagcagcaggacaggccctaaaaggactggcctggccagaaggcgctaccggccctgaaggcgttttgcccagacccctcctcagctgtactcaggcgttagacgacgaccttcagcgggaggcacataccgttaccgctcacctgacaagcaagatggtgggtgacatcaggaagtatgtgcagcacataagcctgtctcccgactcgatacagaatgacgaggcagtggcaccattgatgaagtatctcgatgaaaaactagccttgctgaacgccagcctggtcaaggggaacctctcacgggtgctcgaagcactctgggaactgctattacaggcgatcctccaggctctgggtgccaatagggatgtctcggccgatttttatagccgctttcacttcacccttgaagccttggtatctttttttcacgctgaaggacagggacttcctctcgagtcactccgagacgggtcctataaacggctcaaggaggagctgcggctgcacaagtgcagcacgcgtgaatgtatcgaacaattttacctcgacaagctgaaacaacgcaccctggagcaaaatcgttttggccgcctttcggtaagatgccattacgaagccgccgagcagcgactggccgtcgaggttctgcatgccgccgatctgcttccactcgacgccaatgggctttccgacccatttgtgattgtcgagcttggtccccctcatcttttccctctggtgcgctctcaacggacgcaggtcaaaacccgtaccctacatcctgtgtatgatgagctgttctacttctccgttccagctgaggcttgccggcgccgggccgcctgcgttttgttcacagtaatggatcatgattggctctcaacaaatgatttcgctggagaagccgcattgggccttggcggtgtgaccggcgtcgcgcgcccacaagtgggcggcggggcccgcgcggggcaacccgtgactcttcacctgtgtcggccaagggctcaagtgaggagcgctctgcgacggttagagggtcgcaccagcaaagaagcccaggaattcgtcaaaaagctgaaggaattagagaaatgtatggaagctgacccctag

SEQ ID NO: 315976 - DNA, 3510 bp, Artificial Sequence
  derived and/or modified sequence
atgagcaccctgctggacatcaagagctctgtgctgcggcaggtgcaggtgtgccccagcttcagaagaagaacagagcaggaccccggcagcgccagcgctgacccccaggagcccgccactggagcctggaagccaggagatggagtggagttctttgcccacatgaggctgatgctgaagaagggggagggccggcagggcctgccctgcctggaggcctggggcagcccctgccggcagagcccccaccctggcccccacacccaggtgcccctgcggagcggcagccctgcccctcctgagcctgtggaccccagcctgggcctgcgggccctggcccctgaggaggtggagatgctgtatgaggaggccctgtacacagtgctgtacagagctggcaccatgggccctgaccaggtggatgatgaggaggccctgctgagctacctgcagcaggtgtttggcaccagcctggaggagcacacagaggccatcgagcgggtgaggaaggccaaggcccccacctacgccctgaaggtgtctgtgatgagggccaagaacctgctggccaaggaccccaacggcttcagtgacccctactgcatgctgggcatcctgcctgccagtgatgccacccgggagccccgggcccagaaggagcagcgcttcggcttcaggaagggcagcaagagaggaggccccctgcctgccaagtgcatccaggtgacagaggtgaagagcagcaccctgaaccctgtgtggaaggagcacttcctgtttgaaattgaagatgtgtccacagaccagctgcacctggacatctgggaccatgatgatgatgtgtccctggtggaggcctgcaggaagctgaatgaggtgattggcctgaagggcatgggccgctacttcaagcagatcgtgaagagcgcccgggccaacggcacagctggccccacagaggaccacacagatgacttcctgggctgcctgaacatccctgtgcgggaggtgcctgtggccggcgtggaccgctggttcaagctggagcccaggagcagcgccagccgggtgcagggccactgccacctggtgctgaagctgatcaccacccagagggacacagccatgagccagaggggccgcagcggcttcctgagccacctgctgctgctgagccacctgctgcggctggagcacagcgctgaggagcccaacagcagctcctggagaggagagctgagcaccccagctgccaccatcctgtgcctgcatggagcccagagcaacctgagccccctgcagctggccgtgctgcactggcaggtgagcagccgccaccaccagacctgcaccctggactacagctacctgctgggcctgctggaggacatgcaggcccactgggaggaggcccccagcctgccccaggagcaggaggagagcctggccgacagcctgagcgccttcagcgagtttggcctgcagctgctgcggcagctgcgggactacttccctgccaccaacagcacagctgtgcaccggctggagctgctgctgaagtgcctgggcaagctgcagctgttccagcccagctttgagatctgcccctttgagagcgagctgaacatggacattgctgctgccctgaagaggggcaaccgggagtggtatgaccgcatcctgaatgacaagagcccccgggagcagcccggcccccagaggctgcccggcctggtggtgctggctgatgctgtgtatgatgacctgcagttctgctacagcgtgtatgccagcctcttccacagcatcctgaatgtggatgtgttcaccctgaccttccggcagctggagcggctggtggccgaggaggcctgggtgctgacagaggagctgagccccaagatgaccctggaggtggccagcggcctgtttgagctgtacctgaccctggccgacctgcagcgcttctgggacagcatccctggccgggacagccgcagcctggccctggccggcatccacgcccccttcctgcctgctgtgaagctgtggttccaggtgctgcgggaccaggccaagtggaggctgcagggcgctgtggacatggacaccctggagcctgtggatgccagcagccgccacagcagcagcgctgccacagctggcctgtgcctgagccacatccaggagctgtgggtgcggctggcctggccagaccctgcccaggcccagggcctgggcacccagctgggccaggatgtgtgtgaggccaccctcttctacacagagctgctgaggaagaaggtggacacccagcccggggctgctggggaggccgtgtctgaggccctgtgtgtggtgctgaacaacgtggagctggtgaggaaggctgctggccaggccctgaagggcctggcctggccagagggcgccactggacctgagggcgtgctgccccggcccctgctgagctgcacccaggccctggatgatgacctgcagcgggaggcccacacagtgacagcccacctgaccagcaagatggtgggggacatcagaaaatatgtgcagcacatcagcctgagcccagacagcatccagaatgatgaggccgtggcccccctgatgaagtacctggatgagaagctggccctgctgaatgccagcctggtgaagggcaacctgagccgggtgctggaggccctgtgggagctgctgctgcaggccatcctgcaggccctgggcgccaacagagatgtgtctgctgacttctacagccgcttccacttcaccctggaggccctggtgtccttcttccacgccgagggccagggcctgcccctggagagcctgagagatggcagctacaagaggctgaaggaggagctgcggctgcacaagtgcagcaccagagaatgtattgagcagttctacctggacaagctgaagcagaggaccctggagcagaacagatttggccgcctgtctgtgcgctgccactatgaggccgctgagcagaggctggccgtggaggtgctgcacgccgctgacctgctgcccctggatgccaacggcctgagtgacccctttgtgattgtggagctgggccccccccacctgttccccctggtgcgcagccagaggacccaggtgaagaccaggaccctgcaccctgtgtatgatgagctgttctacttctctgtgcctgctgaggcctgcagaagaagagctgcctgtgtgctcttcaccgtgatggaccatgactggctgagcaccaatgactttgctggggaggccgccctgggcctgggcggcgtgactggagtggcccggccccaggtgggcggcggggcccgggccggccagcctgtgaccctgcacctgtgccggccccgggcccaggtgcgcagcgccctgcggcggctggagggccgcaccagcaaggaggcccaggagtttgtgaagaagctgaaggagctggagaagtgcatggaggccgacccctag

SEQ ID NO: 315977 - DNA, 3510 bp, Artificial Sequence
  derived and/or modified sequence
atgagcaccctgctggacatcaagagcagcgtgctgcggcaggtgcaagtgtgcccaagtttccgaaggcgcaccgagcaggatccaggctctgcctcggcagacccgcaagagcctgccacgggcgcttggaaacctggcgatggcgttgaattttttgcacatatgagactaatgctgaagaaaggcgaggggaggcagggcctgccatgcctggaggcatggggatcgccgtgccgtcagtccccccacccaggcccgcacacacaggttccactgagaagcggaagtccagctcccccagagcccgtcgacccatctctgggtctcagagccctcgccccggaggaagtggaaatgttatacgaggaggctctatacaccgtactctatcgtgccgggacaatgggcccagatcaagtggatgatgaagaggccttactgtcttaccttcaacaggtattcggaacttccctggaagaacacactgaggccatcgagcgggtccgcaaagctaaagctcctacttatgcactaaaggtctctgtgatgcgagctaaaaacctcttggctaaagaccccaacggattttcagacccctactgcatgctgggcattctgcccgcgagtgacgctacacgcgagcctagagcccaaaaggagcaacggttcggatttagaaagggctctaagcggggcggccctctgcccgcaaagtgcattcaggtcactgaggtgaagagctcgaccctgaatcccgtttggaaggagcacttcctgtttgagatcgaagatgtatcgaccgaccagttacacctggacatctgggaccatgacgatgatgtgtcccttgtggaggcctgcaggaagctgaacgaggtaatcggacttaagggcatgggtcgatacttcaagcaaatcgtgaagtccgcccgcgccaatgggactgcagggccgacagaagatcacacggacgatttcctaggctgcttgaatatcccagtccgggaggtgcccgtggccggtgttgaccgttggttcaagctcgaaccccgctccagcgcctcaagggtccagggtcattgccatctagtgcttaaactcataaccacccaacgcgacaccgcgatgagtcaacgcggtagaagcggttttctgtcccacctgttgctgctctcccacctgcttcgcctcgaacacagtgcggaggaaccaaattcgagctcctggcggggggaactgagcaccccagctgcaaccatcctgtgtctacacggggcgcagtccaacctaagcccgcttcagctagcagtacttcattggcaggtgagctcccggcaccaccagacatgcaccctcgactactcatatttgttagggctgctggaggacatgcaagcgcactgggaggaagcacctagcttaccccaggaacaggaggagtctctcgccgacagtcttagcgctttctctgagttcggactgcagttgttgagacagctgcgagactattttcccgctacaaatagtacagctgtgcatagattggagctgctgctgaagtgcctcggcaagcttcaactgtttcagccatcctttgagatctgccccttcgagtccgagctcaacatggatatcgcagccgccctcaaacgcggcaatagagaatggtacgacagaatcttaaatgataaatcaccccgggagcagccaggcccacagaggcttccaggcttagtcgtcctcgccgacgccgtttatgatgacctgcagttttgttatagcgtctacgcctccctgttccacagtattctgaatgtagacgtgtttacactcacttttaggcagttggaaagattggttgccgaggaggcgtgggtgcttactgaggagctatcacccaaaatgacattagaagttgcatctgggctgtttgagttatacctcaccctcgcagacctgcagagattctgggattccattcccggtcgagatagccggtcgctggcgctcgccggaattcacgcccccttcctgcccgcagtcaaattatggtttcaggtgttgcgggatcaggctaagtggcgcctgcagggcgcagtcgacatggacacattggaaccagtggacgcctcatcgagacattcttccagcgccgctactgcgggcttgtgtttgtcacatatccaggagttgtgggtgcggctggcttggcccgacccagctcaggcgcagggtttgggcacccagctgggccaagatgtttgcgaggccaccctgttctatactgaactactcagaaaaaaggtggacactcagcctggggccgctggagaggcggtctctgaggcattgtgtgtggttttaaacaatgtagagcttgtcagaaaagccgctggtcaggcacttaaaggcctcgcctggcctgaaggtgcaacaggaccggagggagtcctgccacgacctctcctcagctgtacccaagctttggatgatgacctgcagcgtgaagcacacacagtcacagcacaccttaccagtaaaatggtcggagatattaggaaatatgttcaacacattagcttgtcccctgattccattcagaacgatgaggccgtcgcacccctgatgaagtatctagacgagaagctggcactgctcaacgccagccttgttaagggcaacctctcacgggtgctggaggccctctgggagctgttgctacaagccattctacaggcgctgggcgctaatcgagacgtttctgccgacttctactcgaggtttcactttactctggaggcactcgtgtcctttttccacgccgagggacagggattaccactcgagtcattacgtgacggctcttacaagcgtttaaaggaagaactgaggctccacaagtgctccacacgcgaatgcatcgagcagttctacttagacaaattaaagcaaagaaccctcgaacagaacaggttcggccggctgtccgtgcgttgccattacgaggctgcagagcaaagactagccgttgaagtgctgcacgccgctgacctgctgcctctggacgctaatggactgtccgaccctttcgttatagtcgagctgggcccaccccatttgttccccttagttaggtcccagcgcacccaggtgaagacccgcaccctgcatccagtctatgatgaattgttttacttctccgttcccgcagaagcctgccgccgccgcgcggcgtgcgtgctgtttaccgtcatggatcatgattggctgtccaccaatgatttcgcaggcgaggccgcactgggactcggaggcgtgaccggggttgccagaccccaggtgggcggcggagcaagagcaggccaacccgtgaccctgcatctatgccgacctcgagctcaagtccgctccgccctgcgacgcctggaaggccgcactagcaaagaagcccaggagtttgtgaaaaaactgaaagagctggaaaaatgcatggaggccgatccgtag

SEQ ID NO: 315978 - DNA, 3510 bp, Artificial Sequence
  derived and/or modified sequence
atgagcaccctgctggacatcaagagcagcgtgctgcggcaggtgcaggtgtgccctagtttccgaagacgaacagagcaggaccctggctctgcttctgccgaccctcaagagcccgccaccggcgcctggaaacccggggacggcgtggaattcttcgcccacatgagactgatgctgaaaaagggcgagggtcggcagggcttgccgtgcctggaagcctggggcagtccgtgccgacagagcccacaccctggcccgcatactcaggtgccgctccggagcggcagtcccgcgcctcccgagcccgtagatccctccctgggccttcgagccctcgcgccagaggaagttgagatgctatatgaagaagcgctctacaccgtgttgtacagagccggtaccatgggcccagatcaggtggatgatgaagaggccctgctttcttacctccagcaagtcttcggcaccagtctcgaggaacatacggaggccattgagagagtccggaaagcaaaggcacccacatacgccctcaaggtgtcggtgatgagggccaaaaacttgctcgccaaggatcccaacggattcagtgacccatactgcatgctcggcatactgccagctagtgacgctacacgcgaaccccgggcccaaaaagaacagcgatttggctttaggaagggtagtaagaggggggggcctcttccagccaagtgtatccaggtgacggaagtcaagtcaagcaccctgaatccggtttggaaggagcacttcttattcgaaatcgaagatgtgtcgactgaccaattgcacctggacatttgggatcacgatgatgatgtgtcactcgttgaggcctgcagaaagctgaacgaggtgattggtctgaaaggcatgggtaggtactttaagcagattgtcaaatctgcccgagcaaatgggactgcaggccccacagaggatcacaccgatgatttcctgggatgcctgaacattcccgtgcgtgaggtccccgtggctggcgttgaccggtggtttaagctggaacccagatcgtcggcttccagggtgcagggacactgtcatctggtgcttaagttaattaccacccagcgggataccgccatgtcgcaacgcgggcgcagcgggttcctcagtcatctcctgctattgtcacacctgcttcgccttgagcattcagccgaagaacctaactcatcatcttggaggggtgagctgtctactcctgccgctaccatcctatgtctccatggcgcccagagcaacctatctcctttgcagctagctgtgctgcattggcaggtctctagtagacatcaccaaacctgcacccttgattattcatatctcctaggactccttgaggatatgcaggcccactgggaggaagccccttcattgccgcaggaacaggaggagtcgttggctgatagcctgagtgccttctccgagtttgggctgcagcttcttagacagctgagggactactttccagccacaaatagtacggccgttcacaggctggagcttctgctgaagtgcctcggaaaactccagctgtttcagcccagcttcgagatttgcccgtttgaatctgaattaaacatggatatcgccgctgccttaaaaaggggaaaccgcgagtggtatgatcgcatcctaaacgataagagccctagggaacagcctggcccccaacggctgcccggtctcgtggtactcgctgatgccgtgtacgatgaccttcagttctgttactcagtctacgcaagtctctttcattccatccttaacgtggatgtgtttacgctaacattccgccaactagagaggctggtggccgaagaagcttgggtactgaccgaggaactgagccctaaaatgacacttgaagtggcctcggggctctttgaactgtaccttacacttgcggatctgcagaggttttgggattccatccccggtagagacagtcggtcactcgcattggccggtattcacgcaccgttcttacccgccgttaagctctggtttcaggtgttgagggatcaggccaagtggcgccttcagggtgcagtggatatggacaccctggaacccgtggatgctagctcaagacatagttcgtccgctgccactgcaggattatgcctgtcccacatacaggaactgtgggtgcgcctcgcctggcccgacccggcccaggcccagggtctgggcacacagctgggccaggacgtctgtgaagctaccctgttttacacagaactccttaggaagaaagtggacactcagccaggggctgccggagaagccgtctctgaagctttatgcgtcgtactgaacaatgtggagttagtccggaaagcagccgggcaggcccttaaagggctagcatggcccgaaggggctacaggacctgagggagttttacccaggccactgttatcttgtactcaagctcttgatgatgatctgcaaagggaggcccacacagtgaccgcgcatctgacttcgaaaatggtgggagacatccgcaaatacgtgcagcatatatcactctcacctgattctatccagaacgatgaggccgttgcacctctgatgaagtacttagacgaaaagttggctttattgaatgcatctctcgtaaagggtaacctgtcacgcgtactggaggcactttgggaactcttgcttcaagccattctgcaagcactaggagctaatagggatgtcagtgctgacttttattctagatttcattttactctggaagccttggtctccttttttcacgcagaagggcaaggactgccactcgagtcgctgagggacggcagctacaagcggttgaaagaggaactgcgactccataaatgctccacacgggaatgtattgagcaattttacctggataaactcaaacagcggacacttgagcagaacaggttcggccgactaagtgtaaggtgtcattatgaagccgcagagcagcgtctggctgtggaggttttacacgctgcagatctactccccctggacgccaatggcctttcagacccattcgtcatcgtggagctagggcctcctcatctgtttcctctggtaaggagccaaaggacccaagttaaaacccgaactctccaccccgtgtacgatgaactgttttattttagcgttccggccgaggcatgtagaagaagggcggcctgtgtccttttcacagtcatggaccacgattggcttagcacgaacgatttcgcaggtgaagctgccctggggttggggggtgtgaccggtgttgccaggccacaggtgggtggcggtgcaagggctggccagcctgtcacattgcacctgtgcaggcctagagcccaggtccgcagcgcactgcgtagactggaaggacgcacctcgaaagaggcccaggagtttgtgaagaagcttaaagaactcgaaaagtgcatggaagctgatccatag

SEQ ID NO: 315979 - DNA, 3510 bp, Artificial Sequence
  derived and/or modified sequence
atgtccactctgttagatattaagtcatctgtactccggcaagtgcaggtttgccctagcttccgccgtcggactgagcaggaccctgggtccgccagtgctgacccccaggagccagccacaggcgcttggaagccaggggacggcgttgaatttttcgctcatatgaggctgatgctcaagaagggcgagggtcgccagggtttaccgtgcctggaggcttggggctcaccatgccgccagtctccccaccccggaccacacactcaggtgcccctccgcagtgggagccctgccccaccagaaccagtggacccatcacttggcttgcgagccctcgctccagaagaagttgaaatgctctacgaggaagctctctataccgtgctgtatagagcagggactatgggtccagatcaggtcgacgacgaagaggctcttctgtcgtatctacagcaggtgttcggcacatctttggaagagcatactgaggcaatcgagcgagtcaggaaggcaaaagctcctacttatgccctgaaggtaagcgtgatgagagcaaaaaatctgctggctaaggatccaaatggcttcagcgacccttactgcatgctgggcattttacccgctagcgacgcgacgagggagccacgggcacaaaaggagcagcggttcgggtttagaaaaggaagcaagcgcggaggacctctcccggctaagtgcatacaggtgacagaagtcaagtcctctactctcaacccagtctggaaggagcacttcctgttcgagatcgaagatgtttctaccgatcagttgcacctcgacatctgggatcacgatgatgacgtgtcactggtggaggcttgccggaagttaaatgaagtgattggcctgaaagggatgggcaggtattttaagcagatcgttaaaagtgcaagggcaaacgggactgctggacccacagaggaccacacggacgattttttgggttgtctaaacattccggtgcgggaggttcctgtcgccggtgtcgatcggtggtttaagctggagccacgtagttcggcaagcagggtgcagggccattgtcatctggtgcttaaactcattaccacacaacgagacaccgctatgtctcaaagagggcgatcaggattcctctcgcacctgttgctattgtcacatcttctgagattggagcattctgccgaggagcccaacagcagctcatggagaggtgagctgtcaaccccagccgctacaatcttatgcctccacggcgctcagagtaatctgtccccactgcagctcgcagtgcttcattggcaagtgtcgtcccggcaccaccagacctgtaccctcgattattcttacctacttggtcttttggaagacatgcaggcccattgggaggaggccccatccctgccccaggagcaggaagaatctctggccgacagcttgagcgcttttagcgagtttggcctccaactgctccggcagttgcgcgattatttcccagcaaccaactctaccgccgtgcaccgcctggagctgctgctcaagtgcctgggtaagctgcagctgttccagccatcatttgagatttgtcctttcgaatccgagctaaacatggacattgcggctgcactgaagagaggcaatcgagagtggtatgataggatcttgaacgacaaatcacctagagaacagcctggacctcaaaggttgcccggtcttgttgtactggccgatgcagtctatgatgacctgcagttctgttacagcgtgtacgcctccctgttccacagcatcctgaacgtggatgtgttcactctgacttttaggcagctagaaagactcgttgccgaggaagcctgggttctgaccgaagagctctctcctaaaatgaccctggaagtcgcttcagggctatttgaactgtatctaactctggcagatctacagagattctgggactcgataccgggtagggacagtcgttctctagcactcgccggtatccacgctcctttcctacctgcagtgaaactatggtttcaggtgttaagggatcaggcaaagtggagacttcaaggcgcagttgacatggatactcttgagccagtcgacgcaagttcccgtcactccagtagcgctgcaacagcagggctttgcctgagtcatatccaggagttgtgggttaggctcgcctggcccgaccccgctcaggcacaggggttggggactcagcttgggcaagacgtctgcgaggctactttgttctacaccgagctcctgaggaagaaagtggatacccaaccaggggctgcgggagaagcggtatcagaagctctgtgtgtggtcctgaacaacgttgaactcgtacggaaggccgcaggtcaggctctaaaagggcttgcatggccggaaggtgccacagggccagaaggggtgctgcccaggccattactgtcctgcactcaggctctggacgacgacctgcagcgtgaagcgcacaccgtgaccgcccacttgaccagcaagatggtcggtgatattcgaaaatacgttcagcacatctctctgtcacccgattctatccaaaatgacgaagcggtcgcacccctgatgaaatatctcgacgaaaagttagcgctgctcaacgccagtctcgttaaaggcaacttgagcagggtgctggaagccctgtgggaacttctgctccaggccatcctccaggccctcggcgctaatcgcgatgtatctgccgatttttatagccgcttccatttcactcttgaggccttggtttcattcttccatgcggaaggacaggggctccctctggagagcctgcgcgacggttcttataagagactgaaagaagagcttcgtcttcacaagtgtagcacgagagaatgtattgagcagttttacctggataaactgaagcaaagaaccctggagcaaaacaggttcggacggctcagcgtgcgctgtcactatgaagcagcggagcagagattggccgttgaagtgctgcatgctgccgatcttttgcctcttgatgctaatgggctgtcagatccatttgtgattgtggaattgggcccaccacatctgtttccgctggtgaggagccagcgcacccaagtcaagacaagaactcttcaccctgtttacgatgagctcttttacttctcagtacccgctgaagcttgtcgtcggagagccgcatgtgttctttttaccgtgatggaccacgactggctgtcaaccaatgacttcgcgggtgaagcagcgctcggcctcggaggcgttacaggggtcgccaggcctcaggtcgggggaggagccagagccggacagcccgtcacactacatttgtgcaggcccagggcccaggtccgtagcgcactccgtcgattagagggacgtacctctaaggaggcccaggaattcgtgaaaaaactaaaggaattggagaagtgcatggaggctgacccatag

SEQ ID NO: 315980 - DNA, 3510 bp, Artificial Sequence
  derived and/or modified sequence
atgagtacactgctcgacataaaaagctccgtcctccgccaagtgcaggtctgccccagctttcgcaggagaacggaacaggaccccggttcggcatccgcagacccacaggagccagctaccggtgcttggaaaccgggagacggagttgagttttttgcccatatgcgcctaatgctcaagaaaggggagggacgtcaagggttaccctgcctagaagcctggggcagcccatgccgacaaagtccccacccgggtccacatacacaggtcccattaaggtccggaagtcccgcaccgccagagcctgtggatccatccctgggcctccgcgcactagctccagaagaggtggagatgctgtacgaagaagctctgtacactgtgctgtatcgagcaggcacaatgggacccgatcaggttgacgatgaagaagcattgttaagctatctccagcaggtgttcggcacatcactcgaagagcacactgaggcaatcgagcgggtgagaaaggctaaggcaccaacctacgctttgaaggtgagtgtcatgagggccaagaacctgctggctaaagatcctaatggcttttccgatccttactgtatgttgggcatcctgcccgcttccgacgccacacgggagcccagggcgcaaaaggagcaacgtttcgggttccggaagggctccaaacgcggaggccctctgcctgccaagtgcatccaggtgaccgaagttaaatcaagcactctcaaccccgtttggaaagagcatttcttgtttgagattgaggacgtgtcaactgaccagctgcacctcgatatttgggatcacgacgacgatgtctcacttgtggaggcctgcaggaagcttaacgaagttatcgggctgaagggaatgggacggtatttcaagcagatcgtgaaatcggcgcgtgccaatgggacagccggacctactgaggaccatacagacgactttctcgggtgcctgaacatccctgtgcgcgaagtacccgtggccggtgttgatcgctggttcaagcttgaacccaggtcctctgccagccgggtgcaaggacattgccatctggtgctgaagttaatcactactcagagggacaccgccatgtctcagagggggcgaagcgggttccttagtcatttgctgctgctcagtcatctgctccgcctggagcatagcgctgaggagcctaattccagctcttggaggggagagctgtccacacctgccgcaactatcctatgtctgcatggggcacagtcaaaccttagcccactgcaactggcggtcctgcattggcaagtgtccagccgccatcaccaaacttgcacgctcgattactcctaccttctagggctacttgaagatatgcaagctcattgggaggaggccccaagtctaccgcaggagcaggaggaatcactggctgatagcctgagtgcattttcggaattcggattgcagctgctgcgccaactccgcgattacttcccagccacaaacagcacggctgtgcatcggctggagttactcctaaaatgcctcgggaagttacagctgtttcagccatcctttgaaatctgcccattcgagtctgagctgaacatggatattgccgcagcgctgaagcgcggaaaccgcgaatggtacgataggattcttaacgataagagcccgcgagaacagcccggaccacagcggctgcctggactggtagtgctagcggatgcagtctacgatgatctccagttctgctactcggtgtatgctagtctgttccattcaatcctaaatgtggatgtgttcacactgacgttccgtcagttggaaaggctggtggccgaggaagcatgggtgctgaccgaagaactgtctcccaaaatgaccttggaggtagcgtcaggactttttgagttgtatctcaccctggcagaccttcagagattctgggacagcatccccggtcgcgactctcgtagcttggccctggcgggaatccacgctccttttctccccgctgtgaaactctggttccaggtgttgcgggaccaggccaagtggcggctgcagggagcagttgacatggataccctcgagcctgttgatgcctcctcgagacatagttcttcagcagcaaccgctgggctgtgtctgtcgcatattcaggagctgtgggtccgcctcgcatggcccgaccctgctcaagctcaagggctggggacacagctcggccaggatgtatgtgaagcaaccctcttctataccgagctgttgaggaagaaggtggacactcagcctggagcggcaggcgaagcagtgtctgaggccttatgcgttgtgctgaataatgtcgagcttgttcgcaaagctgccggtcaggctctgaaggggctggcctggcccgaaggcgcaaccggacctgaaggggtattgcccaggccgcttttgtcatgcacccaggctctggatgacgacctgcagagggaagcacatacagttaccgcccacttgactagcaagatggtaggcgatattcgtaagtatgtgcagcacatttccctttccccagatagtatccagaacgatgaggctgtggccccactaatgaagtatctagatgagaaactagcattactcaacgccagccttgtaaagggcaacctcagtcgtgtcctcgaagctctgtgggagctcttgttgcaggccatcctccaagccctgggcgcaaacagagatgttagcgcagacttctattctagattccattttaccctggaagctctcgtttcattttttcacgccgagggccagggactaccacttgagagccttagagacgggagctacaagcggctgaaggaggagctgagactgcataagtgtagtaccagggagtgcattgaacagttttacctggataagctaaagcagcggactttggaacagaataggttcggccgactctccgtccgctgtcactatgaggctgcagaacagagactcgcagtagaggtacttcatgccgctgacttactgcccctagatgctaacgggctgagtgaccctttcgtcattgtggaacttggacctccacacctttttccactggttaggtcccagaggacccaggtcaagaccaggaccctgcaccctgtttatgatgaactgttttattttagcgtaccagccgaggcttgtcggagaagggcggcatgcgtgctctttacagtgatggaccacgactggttgtccaccaacgactttgctggagaggctgctctggggctcgggggagtgactggagtggctcgaccacaggtgggcggaggggcaagggctgggcagccagtgacactgcatctgtgcaggccgagggcccaggtgcggagtgccctacgacgccttgagggtagaacaagtaaagaggcccaggaattcgtcaagaaactgaaagaactcgagaagtgtatggaggcagatccatag

SEQ ID NO: 315981 - DNA, 4574 bp, Artificial Sequence
  derived and/or modified sequence
gcgcgcgcggctgggagcggtagctgtgcctcggcgtccccgagctggtgccgagcgcagcgccccaggagcccccccatccccgcgccggcccacggtcacccgccatgtcgaccttgctggacattaagagcagcgtgctcaggcaggtgcaggtgtgcccgtccttccgccgcaggactgagcaggacccagggagtgccagcgccgacccgcaggagcctgccacgggggcctggaaacccggggatggcgtggagttctttgcccacatgcgcctcatgctgaagaagggggaaggcagacagggcttgccgtgcctcgaggcctggggctctccctgccgtcagagccctcaccctgggccccacacacaggtccccctgcgcagtggctcgccagcacccccggagcctgtggatcccagcctcggcctgagagccctggccccagaggaggtggagatgctctacgaggaggccctgtacacggtgctttaccgcgcgggtaccatgggccctgaccaggtggacgacgaggaggccctgctcagctatctccagcaggtgtttggcaccagccttgaggagcacactgaggccatcgagcgagtgaggaaggccaaggcccccacgtatgccctgaaagtctctgtcatgcgtgccaagaaccttctggccaaggaccccaacggcttcagcgacccatactgcatgctgggcatcctgcctgcctcggacgccacgcgggagccccgtgcacagaaggagcagcgcttcggcttccgcaagggcagcaagcgcggtggacccctgcctgccaagtgcatccaggtcaccgaggtgaagagcagcaccctgaaccccgtctggaaggagcacttcctcttcgagattgaggatgtgagcacggaccagctgcacctggacatctgggatcatgacgacgatgtatccctggtagaagcgtgcaggaagctgaatgaagtcatcggcctgaagggcatgggcaggtacttcaaacagatcgtcaagtcagcccgcgcaaacgggacagcaggacccaccgaggaccacaccgatgacttcctggggtgcctcaacatacctgtccgggaggtgcctgtggctggcgtcgaccgctggttcaagctggagccacgctccagtgcctcgcgtgtgcagggacactgccacctggttctcaagctgatcactacgcagagggatacggccatgagccagcgcgggcgatccggcttcctgtcccacctgctgctgctcagccatctgctgcggttggagcactcagcagaggagcccaactccagcagctggcgaggagagctcagcacaccagccgccaccatcctctgcctgcacggagcccagagcaacctgtcacccttgcagctggccgtgctgcactggcaggtcagcagccgccaccatcaaacctgcacgctggactacagctacctgctggggctgctggaggacatgcaggcacactgggaagaggctccttcactgccccaggagcaggaggagagcctggctgatagcctttccgccttctctgagttcgggctgcagctgctgcgccagctccgagactacttccctgccaccaacagcaccgctgtccaccgcctggagctgctgctgaagtgtctgggcaagctgcagctcttccaaccctcctttgagatctgccccttcgagtcggagctgaacatggacattgctgcggccctgaagagaggcaaccgtgagtggtacgacaggatcctgaatgacaagagtccccgagagcagccaggaccacagcgcctgcctgggctggttgtgctggctgacgccgtctatgatgaccttcagttctgctacagtgtgtacgccagcctcttccacagcatcctcaatgtggacgtcttcaccctgaccttccggcagctggagcgtctggtggctgaggaggcgtgggtgctgacggaggagctgagccccaagatgaccctggaggtggcctcggggctctttgagctctacctgaccctggctgacctccagcgcttctgggatagcatccctggccgggacagccgctctctggccctggctggcatccacgcccccttcctgcctgctgtgaagctctggttccaagtgctgagggaccaggccaagtggaggcttcagggagccgtggacatggacacgctggagcccgtggacgcctcctccaggcacagcagctccgcagccactgctggtctctgcctcagccacatccaggagttgtgggtgcgcctggcgtggcctgaccctgcccaggctcaggggctgggcacccagcttggccaggacgtgtgtgaggccaccctcttctatacggagctgcttcggaagaaggtggacactcagccaggggcggccggtgaagcagtgagcgaggcgctctgcgtggtcctcaacaatgtggagctcgtgcgcaaggctgctgggcaggccttgaagggcctggcatggccagagggggccacggggcccgagggggtgctcccccgccctctgctcagctgcacacaggccctggacgatgatctgcaacgggaggcccacacggtgacagcgcacctgacctctaagatggtgggcgacatccgcaagtatgtacagcacatcagtctctcgcctgactccatccagaacgatgaggccgtggccccgctcatgaagtacctggatgagaagctggccctgctgaacgcctcgctggtgaaggggaacctgagcagggtgctggaggccctgtgggagctactcctccaggccattctgcaggcgctgggtgcaaaccgtgacgtctctgctgatttctacagccgcttccatttcacgctggaggccctggtcagttttttccacgcagagggtcagggtttgcccctggagagcctgagggatggaagctacaagaggctgaaggaggagctgcggctgcacaaatgttccacccgcgagtgcatcgagcagttctacctggacaagctcaaacagaggaccctggagcagaaccggtttggacgcctgagcgtccgttgccattacgaggcggctgagcagcggctggccgtggaggtgctgcacgccgcggacctgctccccctggacgccaacggcttaagtgacccctttgtgatcgtggagctgggcccaccgcatctctttccactggtccgcagccagaggacccaggtgaagacccggacgctgcaccctgtatacgacgaactcttctacttttccgtgcctgccgaggcgtgccgccgccgcgcggcctgtgtgttgttcaccgtcatggaccacgactggctgtccaccaacgacttcgctggggaggcggccctcggcctaggtggcgtcactggtgtcgcccggccccaggtgggcgggggtgcaagggctgggcagcctgtcaccctgcacctgtgccggcccagagcccaggtgagatctgcgctgaggaggctggaaggccgcaccagcaaggaggcgcaggagttcgtgaagaaactcaaggagctggagaagtgcatggaggcggacccctgagtccatcagctgccagccccggccctggcccccaccccaagttccctgaagcatcctccagctcactgtggccagctttgtgcaaccagggcccacggcgcccctcctgtgctgtgacgtgtgtgtcgtggctggccccgcggcgcctaccgccctggccgtgtctgtctggtgtgtgctgtgaacccctgcacccaaccccacatctgggtggccaacttggcaggacttggccagcagctgcccaggacacagtgcaggccagagcgggcttgaccacctggtgggcctccctgcccgcttccttgggctccccggccctgggtgggcggtgggcagctggtctccagggactcagtgagtggctgtgctctctgcacaacgggcaatgtgcagacgcatttttggtaatcacagctggggagtgaaaagggtgccactggcaccactgggtggatggtccagagcctccacccacagaggggatgcaaagggcaggtgagtcaagaaccgcataggtctccagtccccacggggctcccaggccggggaaaggttcccctgaggtcactctgaggccagggacgtcacccaaggctggtggtcagtgtgaagggctccgtgccaactggtcagctgtccttcacgcacatatccgtggccacctgagacctgctccacgacccttccaggcagagccgagagttcgccccaacccttccccaggcccagtgtgaaaaacagactcacaaggggcttcttggcctgcagcttcatttgcgagagcgccgaggcaggacacagagcacagctgtgctggaagtgtggggagaacccggacagctcagtcctgccagcagccgcaaagagccgaggctgccaggcccatttatgtccctcatgtctctagattttctcgtcacccagcctcaaaaatatatgtgtctgcaaccctca

SEQ ID NO: 315982 - DNA, 4581 bp, Artificial Sequence
  derived and/or modified sequence
ttcgactggaatgagaccccggggagcagcgtttgcagcgggcccgccaggtgacctgcacctgggcaccgccatcggcttcgcaggggccatctggaggagtcggtcacccgccatgtcgaccttgctggacattaagagcagcgtgctcaggcaggtgcaggtgtgcccgtccttccgccgcaggactgagcaggacccagggagtgccagcgccgacccgcaggagcctgccacgggggcctggaaacccggggatggcgtggagttctttgcccacatgcgcctcatgctgaagaagggggaaggcagacagggcttgccgtgcctcgaggcctggggctctccctgccgtcagagccctcaccctgggccccacacacaggtccccctgcgcagtggctcgccagcacccccggagcctgtggatcccagcctcggcctgagagccctggccccagaggaggtggagatgctctacgaggaggccctgtacacggtgctttaccgcgcgggtaccatgggccctgaccaggtggacgacgaggaggccctgctcagctatctccagcaggtgtttggcaccagccttgaggagcacactgaggccatcgagcgagtgaggaaggccaaggcccccacgtatgccctgaaagtctctgtcatgcgtgccaagaaccttctggccaaggaccccaacggcttcagcgacccatactgcatgctgggcatcctgcctgcctcggacgccacgcgggagccccgtgcacagaaggagcagcgcttcggcttccgcaagggcagcaagcgcggtggacccctgcctgccaagtgcatccaggtcaccgaggtgaagagcagcaccctgaaccccgtctggaaggagcacttcctcttcgagattgaggatgtgagcacggaccagctgcacctggacatctgggatcatgacgacgatgtatccctggtagaagcgtgcaggaagctgaatgaagtcatcggcctgaagggcatgggcaggtacttcaaacagatcgtcaagtcagcccgcgcaaacgggacagcaggacccaccgaggaccacaccgatgacttcctggggtgcctcaacatacctgtccgggaggtgcctgtggctggcgtcgaccgctggttcaagctggagccacgctccagtgcctcgcgtgtgcagggacactgccacctggttctcaagctgatcactacgcagagggatacggccatgagccagcgcgggcgatccggcttcctgtcccacctgctgctgctcagccatctgctgcggttggagcactcagcagaggagcccaactccagcagctggcgaggagagctcagcacaccagccgccaccatcctctgcctgcacggagcccagagcaacctgtcacccttgcagctggccgtgctgcactggcaggtcagcagccgccaccatcaaacctgcacgctggactacagctacctgctggggctgctggaggacatgcaggcacactgggaagaggctccttcactgccccaggagcaggaggagagcctggctgatagcctttccgccttctctgagttcgggctgcagctgctgcgccagctccgagactacttccctgccaccaacagcaccgctgtccaccgcctggagctgctgctgaagtgtctgggcaagctgcagctcttccaaccctcctttgagatctgccccttcgagtcggagctgaacatggacattgctgcggccctgaagagaggcaaccgtgagtggtacgacaggatcctgaatgacaagagtccccgagagcagccaggaccacagcgcctgcctgggctggttgtgctggctgacgccgtctatgatgaccttcagttctgctacagtgtgtacgccagcctcttccacagcatcctcaatgtggacgtcttcaccctgaccttccggcagctggagcgtctggtggctgaggaggcgtgggtgctgacggaggagctgagccccaagatgaccctggaggtggcctcggggctctttgagctctacctgaccctggctgacctccagcgcttctgggatagcatccctggccgggacagccgctctctggccctggctggcatccacgcccccttcctgcctgctgtgaagctctggttccaagtgctgagggaccaggccaagtggaggcttcagggagccgtggacatggacacgctggagcccgtggacgcctcctccaggcacagcagctccgcagccactgctggtctctgcctcagccacatccaggagttgtgggtgcgcctggcgtggcctgaccctgcccaggctcaggggctgggcacccagcttggccaggacgtgtgtgaggccaccctcttctatacggagctgcttcggaagaaggtggacactcagccaggggcggccggtgaagcagtgagcgaggcgctctgcgtggtcctcaacaatgtggagctcgtgcgcaaggctgctgggcaggccttgaagggcctggcatggccagagggggccacggggcccgagggggtgctcccccgccctctgctcagctgcacacaggccctggacgatgatctgcaacgggaggcccacacggtgacagcgcacctgacctctaagatggtgggcgacatccgcaagtatgtacagcacatcagtctctcgcctgactccatccagaacgatgaggccgtggccccgctcatgaagtacctggatgagaagctggccctgctgaacgcctcgctggtgaaggggaacctgagcagggtgctggaggccctgtgggagctactcctccaggccattctgcaggcgctgggtgcaaaccgtgacgtctctgctgatttctacagccgcttccatttcacgctggaggccctggtcagttttttccacgcagagggtcagggtttgcccctggagagcctgagggatggaagctacaagaggctgaaggaggagctgcggctgcacaaatgttccacccgcgagtgcatcgagcagttctacctggacaagctcaaacagaggaccctggagcagaaccggtttggacgcctgagcgtccgttgccattacgaggcggctgagcagcggctggccgtggaggtgctgcacgccgcggacctgctccccctggacgccaacggcttaagtgacccctttgtgatcgtggagctgggcccaccgcatctctttccactggtccgcagccagaggacccaggtgaagacccggacgctgcaccctgtatacgacgaactcttctacttttccgtgcctgccgaggcgtgccgccgccgcgcggcctgtgtgttgttcaccgtcatggaccacgactggctgtccaccaacgacttcgctggggaggcggccctcggcctaggtggcgtcactggtgtcgcccggccccaggtgggcgggggtgcaagggctgggcagcctgtcaccctgcacctgtgccggcccagagcccaggtgagatctgcgctgaggaggctggaaggccgcaccagcaaggaggcgcaggagttcgtgaagaaactcaaggagctggagaagtgcatggaggcggacccctgagtccatcagctgccagccccggccctggcccccaccccaagttccctgaagcatcctccagctcactgtggccagctttgtgcaaccagggcccacggcgcccctcctgtgctgtgacgtgtgtgtcgtggctggccccgcggcgcctaccgccctggccgtgtctgtctggtgtgtgctgtgaacccctgcacccaaccccacatctgggtggccaacttggcaggacttggccagcagctgcccaggacacagtgcaggccagagcgggcttgaccacctggtgggcctccctgcccgcttccttgggctccccggccctgggtgggcggtgggcagctggtctccagggactcagtgagtggctgtgctctctgcacaacgggcaatgtgcagacgcatttttggtaatcacagctggggagtgaaaagggtgccactggcaccactgggtggatggtccagagcctccacccacagaggggatgcaaagggcaggtgagtcaagaaccgcataggtctccagtccccacggggctcccaggccggggaaaggttcccctgaggtcactctgaggccagggacgtcacccaaggctggtggtcagtgtgaagggctccgtgccaactggtcagctgtccttcacgcacatatccgtggccacctgagacctgctccacgacccttccaggcagagccgagagttcgccccaacccttccccaggcccagtgtgaaaaacagactcacaaggggcttcttggcctgcagcttcatttgcgagagcgccgaggcaggacacagagcacagctgtgctggaagtgtggggagaacccggacagctcagtcctgccagcagccgcaaagagccgaggctgccaggcccatttatgtccctcatgtctctagattttctcgtcacccagcctcaaaaatatatgtgtctgcaaccctc

SEQ ID NO: 315983 - DNA, 3510 bp, Artificial Sequence
  derived and/or modified sequence
atgagcaccctgctggacatcaagagcagcgtgctgagacaggtgcaggtgtgccccagcttcagaagaagaaccgagcaggaccccggcagcgccagcgccgacccccaggagcccgccaccggcgcctggaagcccggcgacggcgtggagttcttcgcccacatgagactgatgctgaagaagggcgagggcagacagggcctgccctgcctggaggcctggggcagcccctgcagacagagcccccaccccggcccccacacccaggtgcccctgagaagcggcagccccgccccccccgagcccgtggaccccagcctgggcctgagagccctggcccccgaggaggtggagatgctgtacgaggaggccctgtacaccgtgctgtacagagccggcaccatgggccccgaccaggtggacgacgaggaggccctgctgagctacctgcagcaggtgttcggcaccagcctggaggagcacaccgaggccatcgagagagtgagaaaggccaaggcccccacctacgccctgaaggtgagcgtgatgagagccaagaacctgctggccaaggaccccaacggcttcagcgacccctactgcatgctgggcatcctgcccgccagcgacgccaccagagagcccagagcccagaaggagcagagattcggcttcagaaagggcagcaagagaggcggccccctgcccgccaagtgcatccaggtgaccgaggtgaagagcagcaccctgaaccccgtgtggaaggagcacttcctgttcgagatcgaggacgtgagcaccgaccagctgcacctggacatctgggaccacgacgacgacgtgagcctggtggaggcctgcagaaagctgaacgaggtgatcggcctgaagggcatgggcagatacttcaagcagatcgtgaagagcgccagagccaacggcaccgccggccccaccgaggaccacaccgacgacttcctgggctgcctgaacatccccgtgagagaggtgcccgtggccggcgtggacagatggttcaagctggagcccagaagcagcgccagcagagtgcagggccactgccacctggtgctgaagctgatcaccacccagagagacaccgccatgagccagagaggcagaagcggcttcctgagccacctgctgctgctgagccacctgctgagactggagcacagcgccgaggagcccaacagcagcagctggagaggcgagctgagcacccccgccgccaccatcctgtgcctgcacggcgcccagagcaacctgagccccctgcagctggccgtgctgcactggcaggtgagcagcagacaccaccagacctgcaccctggactacagctacctgctgggcctgctggaggacatgcaggcccactgggaggaggcccccagcctgccccaggagcaggaggagagcctggccgacagcctgagcgccttcagcgagttcggcctgcagctgctgagacagctgagagactacttccccgccaccaacagcaccgccgtgcacagactggagctgctgctgaagtgcctgggcaagctgcagctgttccagcccagcttcgagatctgccccttcgagagcgagctgaacatggacatcgccgccgccctgaagagaggcaacagagagtggtacgacagaatcctgaacgacaagagccccagagagcagcccggcccccagagactgcccggcctggtggtgctggccgacgccgtgtacgacgacctgcagttctgctacagcgtgtacgccagcctgttccacagcatcctgaacgtggacgtgttcaccctgaccttcagacagctggagagactggtggccgaggaggcctgggtgctgaccgaggagctgagccccaagatgaccctggaggtggccagcggcctgttcgagctgtacctgaccctggccgacctgcagagattctgggacagcatccccggcagagacagcagaagcctggccctggccggcatccacgcccccttcctgcccgccgtgaagctgtggttccaggtgctgagagaccaggccaagtggagactgcagggcgccgtggacatggacaccctggagcccgtggacgccagcagcagacacagcagcagcgccgccaccgccggcctgtgcctgagccacatccaggagctgtgggtgagactggcctggcccgaccccgcccaggcccagggcctgggcacccagctgggccaggacgtgtgcgaggccaccctgttctacaccgagctgctgagaaagaaggtggacacccagcccggcgccgccggcgaggccgtgagcgaggccctgtgcgtggtgctgaacaacgtggagctggtgagaaaggccgccggccaggccctgaagggcctggcctggcccgagggcgccaccggccccgagggcgtgctgcccagacccctgctgagctgcacccaggccctggacgacgacctgcagagagaggcccacaccgtgaccgcccacctgaccagcaagatggtgggcgacatcagaaagtacgtgcagcacatcagcctgagccccgacagcatccagaacgacgaggccgtggcccccctgatgaagtacctggacgagaagctggccctgctgaacgccagcctggtgaagggcaacctgagcagagtgctggaggccctgtgggagctgctgctgcaggccatcctgcaggccctgggcgccaacagagacgtgagcgccgacttctacagcagattccacttcaccctggaggccctggtgagcttcttccacgccgagggccagggcctgcccctggagagcctgagagacggcagctacaagagactgaaggaggagctgagactgcacaagtgcagcaccagagagtgcatcgagcagttctacctggacaagctgaagcagagaaccctggagcagaacagattcggcagactgagcgtgagatgccactacgaggccgccgagcagagactggccgtggaggtgctgcacgccgccgacctgctgcccctggacgccaacggcctgagcgaccccttcgtgatcgtggagctgggccccccccacctgttccccctggtgagaagccagagaacccaggtgaagaccagaaccctgcaccccgtgtacgacgagctgttctacttcagcgtgcccgccgaggcctgcagaagaagagccgcctgcgtgctgttcaccgtgatggaccacgactggctgagcaccaacgacttcgccggcgaggccgccctgggcctgggcggcgtgaccggcgtggccagaccccaggtgggcggcggcgccagagccggccagcccgtgaccctgcacctgtgcagacccagagcccaggtgagaagcgccctgagaagactggagggcagaaccagcaaggaggcccaggagttcgtgaagaagctgaaggagctggagaagtgcatggaggccgacccctag

SEQ ID NO: 315984 - protein, 499 aa, Artificial Sequence
  derived and/or modified sequence
MLERPPALAMPMPTEGTPPPLSGTPIPVPAYFRHAEPGFSLKRPRGLSRSLPPPPPAKGSIPISRLFPPRTPGWHQLQPRRVSFRGEASETLQSPGYDPSRPESFFQQSFQRLSRLGHGSYGEVFKVRSKEDGRLYAVKRSMSPFRGPKDRARKLAEVGSHEKVGQHPCCVRLEQAWEEGGILYLQTELCGPSLQQHCEAWGASLPEAQVWGYLRDTLLALAHLHSQGLVHLDVKPANIFLGPRGRCKLGDFGLLVELGTAGAGEVQEGDPRYMAPELLQGSYGTAADVFSLGLTILEVACNMELPHGGEGWQQLRQGYLPPEFTAGLSSELRSVLVMMLEPDPKLRATAEALLALPVLRQPRAWGVLWCMAAEALSRGWALWQALLALLCWLWHGLAHPASWLQPLGPPATPPGSPPCSLLLDSSLSSNWDDDSLGPSLSPEAVLARTVGSTSTPRSRCTPRDALDLSDINSEPPRGSFPSFEPRNLLSLFEDTLDPT

SEQ ID NO: 315985 - protein, 499 aa, Artificial Sequence
  derived and/or modified sequence
MLPWPPALAMPMPTEGTPPPLSGTPIPVPAYFRHAEPGFSLKRPRGLSRSLPPPPPAKGSIPISRLFPPRTPGWHQLQPRRVSFRGEASETLQSPGYDPSRPESFFQQSFQRLSRLGHGSYGEVFKVRSKEDGRLYAVKRSMSPFRGPKDRARKLAEVGSHEKVGQHPCCVRLEQAWEEGGILYLQTELCGPSLQQHCEAWGASLPEAQVWGYLRDTLLALAHLHSQGLVHLDVKPANIFLGPRGRCKLGDFGLLVELGTAGAGEVQEGDPRYMAPELLQGSYGTAADVFSLGLTILEVACNMELPHGGEGWQQLRQGYLPPEFTAGLSSELRSVLVMMLEPDPKLRATAEALLALPVLRQPRAWGVLWCMAAEALSRGWALWQALLALLCWLWHGLAHPASWLQPLGPPATPPGSPPCSLLLDSSLSSNWDDDSLGPSLSPEAVLARTVGSTSTPRSRCTPRDALDLSDINSEPPRGSFPSFEPRNLLSLFEDTLDPT

SEQ ID NO: 315986 - protein, 568 aa, Artificial Sequence
  derived and/or modified sequence
MLERPPALAMPMPTEGTPPPLSGTPIPVPAYFRHAEPGFSLKRPRGLSRSLPPPPPAKGSIPISRLFPPRTPGWHQLQPRRVSFRGEASETLQSPGYDPSRPESFFQQSFQRLSRLGHGSYGEVFKVRSKEDGRLYAVKRSMSPFRGPKDRARKLAEVGSHEKVGQHPCCVRLEQAWEEGGILYLQTELCGPSLQQHCEAWGASLPEAQVWGYLRDTLLALAHLHSQGLVHLDVKPANIFLGPRGRCKLGDFGLLVELGTAGAGEVQEGDPRYMAPELLQGSYGTAADVFSLGLTILEVACNMELPHGGEGWQQLRQGYLPPEFTAGLSSELRSVLVMMLEPDPKLRATAEALLALPVLRQPRAWGVLWCMAAEALSRGWALWQALLALLCWLWHGLAHPASWLQPLGPPATPPGSPPCSLLLDSSLSSNWDDDSLGPSLSPEAVLARTVGSTSTPRSRCTPRVLTPLRLSPAAEPSAPGLGPAAEAPCCVEQRGFLSRHIPRSFSAFQAAPPKSACNALHLHGHTQPSAFVWSLTCSSHHGRTFEARTKVDPLFKICGGFLTVFADL

SEQ ID NO: 315987 - protein, 490 aa, Artificial Sequence
  derived and/or modified sequence
MPMPTEGTPPPLSGTPIPVPAYFRHAEPGFSLKRPRGLSRSLPPPPPAKGSIPISRLFPPRTPGWHQLQPRRVSFRGEASETLQSPGYDPSRPESFFQQSFQRLSRLGHGSYGEVFKVRSKEDGRLYAVKRSMSPFRGPKDRARKLAEVGSHEKVGQHPCCVRLEQAWEEGGILYLQTELCGPSLQQHCEAWGASLPEAQVWGYLRDTLLALAHLHSQGLVHLDVKPANIFLGPRGRCKLGDFGLLVELGTAGAGEVQEGDPRYMAPELLQGSYGTAADVFSLGLTILEVACNMELPHGGEGWQQLRQGYLPPEFTAGLSSELRSVLVMMLEPDPKLRATAEALLALPVLRQPRAWGVLWCMAAEALSRGWALWQALLALLCWLWHGLAHPASWLQPLGPPATPPGSPPCSLLLDSSLSSNWDDDSLGPSLSPEAVLARTVGSTSTPRSRCTPRDALDLSDINSEPPRGSFPSFEPRNLLSLFEDTLDPT

SEQ ID NO: 315988 - DNA, 1707 bp, Artificial Sequence
  derived and/or modified sequence
atgctggagagaccccccgccctggccatgcccatgcccaccgagggcacccccccccccctgagcggcacccccatccccgtgcccgcctacttcagacacgccgagcccggcttcagcctgaagagacccagaggcctgagcagaagcctgcccccccccccccccgccaagggcagcatccccatcagcagactgttcccccccagaacccccggctggcaccagctgcagcccagaagagtgagcttcagaggcgaggccagcgagaccctgcagagccccggctacgaccccagcagacccgagagcttcttccagcagagcttccagagactgagcagactgggccacggcagctacggcgaggtgttcaaggtgagaagcaaggaggacggcagactgtacgccgtgaagagaagcatgagccccttcagaggccccaaggacagagccagaaagctggccgaggtgggcagccacgagaaggtgggccagcacccctgctgcgtgagactggagcaggcctgggaggagggcggcatcctgtacctgcagaccgagctgtgcggccccagcctgcagcagcactgcgaggcctggggcgccagcctgcccgaggcccaggtgtggggctacctgagagacaccctgctggccctggcccacctgcacagccagggcctggtgcacctggacgtgaagcccgccaacatcttcctgggccccagaggcagatgcaagctgggcgacttcggcctgctggtggagctgggcaccgccggcgccggcgaggtgcaggagggcgaccccagatacatggcccccgagctgctgcagggcagctacggcaccgccgccgacgtgttcagcctgggcctgaccatcctggaggtggcctgcaacatggagctgccccacggcggcgagggctggcagcagctgagacagggctacctgccccccgagttcaccgccggcctgagcagcgagctgagaagcgtgctggtgatgatgctggagcccgaccccaagctgagagccaccgccgaggccctgctggccctgcccgtgctgagacagcccagagcctggggcgtgctgtggtgcatggccgccgaggccctgagcagaggctgggccctgtggcaggccctgctggccctgctgtgctggctgtggcacggcctggcccaccccgccagctggctgcagcccctgggcccccccgccaccccccccggcagccccccctgcagcctgctgctggacagcagcctgagcagcaactgggacgacgacagcctgggccccagcctgagccccgaggccgtgctggccagaaccgtgggcagcaccagcacccccagaagcagatgcacccccagagtgctgacccccctgagactgagccccgccgccgagcccagcgcccccggcctgggccccgccgccgaggccccctgctgcgtggagcagagaggcttcctgagcagacacatccccagaagcttcagcgccttccaggccgccccccccaagagcgcctgcaacgccctgcacctgcacggccacacccagcccagcgccttcgtgtggagcctgacctgcagcagccaccacggcagaaccttcgaggccagaaccaaggtggaccccctgttcaagatctgcggcggcttcctgaccgtgttcgccgacctgtag

SEQ ID NO: 315989 - DNA, 1500 bp, Artificial Sequence
  derived and/or modified sequence
atgttagaaaggccacctgctctggccatgcccatgcctacggagggtaccccccctccactttctggcacccccataccagtgccggcctacttccgccacgccgagccaggattttccctcaaaagacccagaggcttgtccaggtctctacctccgccaccgcccgcaaagggctccatccccatatcacgcctcttcccccctcgcacccccggctggcaccagctccagccgagacgcgtaagtttccggggggaagcctccgaaactctccaaagtcctggctacgatcccagtcgtccagagtctttttttcagcagtcattccagaggctctccaggctcggccatgggagttatggcgaggtttttaaagttcggagcaaagaggatggccgcttatacgccgtcaaacgttcgatgtccccttttagaggccccaaagatcgagcccggaagttagctgaagtggggtcgcatgaaaaagtaggtcagcatccatgttgcgtccgcctcgagcaggcttgggaggaaggcggcatcctgtaccttcaaacagaactgtgcggacccagcttacagcaacactgtgaggcctggggcgcatctctccctgaggcacaggtgtgggggtatctgcgagacaccctgttggctctggctcacctgcactcccaaggtcttgttcacctggacgtcaaaccagcgaacattttcctggggccaagggggcggtgcaagctgggagatttcgggctgctagttgaacttgggacggctggagccggcgaagttcaggagggtgatccccggtatatggctcccgaattactgcagggctcctacggtactgcagccgatgtattttcattgggactgactatcctagaagtggcctgcaatatggagctgccacacggcggggagggatggcagcagcttcgccagggttatctgccccccgaattcaccgcaggtttaagctctgaactgagatccgttctcgtaatgatgttggaacccgacccgaaattgcgggccacagcagaggccttgttggcattgcctgttctgcggcaaccccgcgcatggggggtgctgtggtgtatggcagctgaggccctatcacgtggttgggcattgtggcaggcactccttgcactcttgtgctggctctggcatggcttagcccaccccgcttcatggctgcagccgctcggcccgcccgccacccccccgggcagcccaccctgtagccttctgctcgattcctcgctgagtagtaattgggacgacgacagcctcgggcctagtctaagccctgaagcagtgctcgcgagaaccgtgggctccacaagcacgccccgatcacggtgtactccgcgcgatgcactcgatttgagtgatatcaactccgagcctccacgcggatcttttcccagtttcgagccgaggaatttgctgagcttatttgaagacaccctagatccaacatag

SEQ ID NO: 315990 - DNA, 1707 bp, Artificial Sequence
  derived and/or modified sequence
atgttggagaggccccccgccttagccatgccaatgccaacagagggtacaccacccccgttatctggaacacctatcccagtccccgcatatttcagacacgccgagcctggatttagtctcaaacgaccacgcggattgagtaggtcacttcccccaccacctccagccaaaggctcaatccccatttctaggcttttcccgccacgcacacccgggtggcaccaattgcagccgcgacgcgtgtcctttaggggggaggcatctgagacacttcagagcccaggttatgatccctctcgcccagaatcgttcttccagcagtccttccagcgactttcccggctgggccatggcagttacggcgaggtatttaaagtgcgtagcaaagaagatggtaggttgtatgcagtcaaacgctcaatgtcacccttccggggtcccaaagacagagccaggaagttggccgaggtgggatctcacgagaaagtggggcagcacccctgttgtgtccgcttagaacaggcgtgggaagagggaggaatcctgtatctccagacagaactgtgtggcccttctctccagcagcattgcgaggcatggggggcatcactccccgaagcccaggtctggggttacctcagagacactctgctggcgctggcccacctacactcacagggccttgtgcacctggatgtaaagcccgccaacatattccttgggcctaggggtaggtgcaagctgggagatttcggtcttctggtcgagcttggcactgccggcgcgggcgaggtgcaggagggcgaccctaggtacatggcacccgagctgctccagggctcttacggaacagcagctgatgtgtttagcctgggactgacaatccttgaggtggcctgcaacatggagcttccccacggtggcgaaggatggcaacagttgaggcaaggctatcttccgccggagttcacagcgggactgtcatccgaactccgaagcgtactggtgatgatgctggaacccgaccccaaattgagagccacggcagaagctcttcttgccctcccagtattgcggcagccacgagcctggggcgtactgtggtgcatggcagctgaggcacttagccggggatgggctttatggcaggcgttactggccctgctatgctggctgtggcacggcttggcgcaccctgcgtcatggctgcagcccctggggccacctgcaacgccacctggaagccctccttgtagtctgctgttggatagctcactctcttccaactgggacgatgactcgctgggacctagtctgagtcctgaggcagtgcttgctcgcaccgttggaagcacctccacccctcgctcccggtgcaccccccgggtccttaccccactcaggttgtccccggccgctgagcccagcgctccaggactgggccccgcagctgaggccccctgttgcgttgagcagcgtggattcctgtctaggcacatacctcgaagcttcagcgctttccaggctgcaccccccaagagtgcgtgcaatgccctccatctccacggccacactcagccatccgcctttgtgtggtccctgacttgcagctcacatcacggccggacattcgaagctaggaccaaagtggatcctctttttaaaatttgtggtggctttctgactgttttcgctgatctgtag

SEQ ID NO: 315991 - DNA, 1500 bp, Artificial Sequence
  derived and/or modified sequence
atgctggagcggcccccagccctggccatgcccatgcccacagagggcaccccaccacccctgagcggcacccccatccctgtgcctgcctacttcagacatgctgagcccggcttcagcctgaagaggccccggggcctgagccgcagcctgcccccacctcctccagccaagggcagcatccccatcagccgcctcttcccccccaggaccccaggctggcaccagctgcagccccggcgggtgtccttccggggggaggccagcgagaccctgcagagccctggctatgaccccagcaggcctgagagcttcttccagcagagcttccagaggctgagccggctgggccacggcagctatggagaggtgttcaaggtgcgcagcaaagaagatggccgcctgtatgctgtgaagaggtccatgagccccttccggggccccaaggaccgggccaggaagctggccgaggtgggcagccatgagaaggtgggccagcacccctgctgcgtgcggctggagcaggcctgggaggagggcggcatcctgtacctgcagacagagctgtgtggccccagcctgcagcagcactgtgaggcctggggcgccagcctgcctgaggcccaggtgtggggctacctgcgggacaccctgctggccctggcccacctgcacagccagggcctggtgcacctggatgtgaagccagccaacatcttcctgggcccccggggccgctgcaagctgggggactttggcctgctggtggagctgggcacagctggagctggggaggtgcaggagggggacccccgctacatggcccctgagctgctgcagggcagctatggaacagctgctgatgtgttcagcctgggcctgaccatcctggaggtggcctgcaacatggagctgccccatggaggagagggctggcagcagctgcggcagggctacctgcccccagagttcaccgctggcctgagcagcgagctgcggtctgtgctggtgatgatgctggagccagaccccaagctgcgggccacagctgaggccctgctggccctgcctgtgctgcggcagccccgggcctggggcgtgctgtggtgcatggctgctgaggccctgagccggggctgggccctgtggcaggccctgctggccctgctgtgctggctgtggcacggcctggcccacccagcctcctggctgcagcccctgggccccccagccaccccacctggcagccccccctgcagcctgctgctggacagcagcctgagcagcaactgggatgatgacagcctgggccccagcctgagccctgaggccgtgctggccaggacagtgggcagcaccagcacccccaggagccgctgcaccccaagagatgccctggacctgagtgacatcaacagcgagcccccccggggcagcttccccagctttgagcccaggaacctgctgagcctgtttgaggacaccctggaccccacctag

SEQ ID NO: 315992 - DNA, 1707 bp, Artificial Sequence
  derived and/or modified sequence
atgctggagcggcccccagccctggccatgcccatgcccacagagggcaccccaccacccctgagcggcacccccatccctgtgcctgcctacttcagacatgctgagcccggcttcagcctgaagaggccccggggcctgagccgcagcctgcccccacctcctccagccaagggcagcatccccatcagccgcctcttcccccccaggaccccaggctggcaccagctgcagccccggcgggtgtccttccggggggaggccagcgagaccctgcagagccctggctatgaccccagcaggcctgagagcttcttccagcagagcttccagaggctgagccggctgggccacggcagctatggagaggtgttcaaggtgcgcagcaaagaagatggccgcctgtatgctgtgaagaggtccatgagccccttccggggccccaaggaccgggccaggaagctggccgaggtgggcagccatgagaaggtgggccagcacccctgctgcgtgcggctggagcaggcctgggaggagggcggcatcctgtacctgcagacagagctgtgtggccccagcctgcagcagcactgtgaggcctggggcgccagcctgcctgaggcccaggtgtggggctacctgcgggacaccctgctggccctggcccacctgcacagccagggcctggtgcacctggatgtgaagccagccaacatcttcctgggcccccggggccgctgcaagctgggggactttggcctgctggtggagctgggcacagctggagctggggaggtgcaggagggggacccccgctacatggcccctgagctgctgcagggcagctatggaacagctgctgatgtgttcagcctgggcctgaccatcctggaggtggcctgcaacatggagctgccccatggaggagagggctggcagcagctgcggcagggctacctgcccccagagttcaccgctggcctgagcagcgagctgcggtctgtgctggtgatgatgctggagccagaccccaagctgcgggccacagctgaggccctgctggccctgcctgtgctgcggcagccccgggcctggggcgtgctgtggtgcatggctgctgaggccctgagccggggctgggccctgtggcaggccctgctggccctgctgtgctggctgtggcacggcctggcccacccagcctcctggctgcagcccctgggccccccagccaccccacctggcagccccccctgcagcctgctgctggacagcagcctgagcagcaactgggatgatgacagcctgggccccagcctgagccctgaggccgtgctggccaggacagtgggcagcaccagcacccccaggagccgctgcaccccccgggtgctgacccccctgcggctgagccctgctgctgagcccagcgcccctggcctgggccctgctgctgaggccccctgctgcgtggagcagaggggcttcctgagccgccacatccccaggagcttcagcgccttccaggccgccccacccaagagcgcctgcaatgccctgcacctgcacggccacacccagcccagcgcctttgtgtggagcctgacctgcagcagccaccacggccgcacctttgaggcccggaccaaggtggaccccctcttcaagatctgtggcggcttcctgactgtgtttgctgacctgtag

SEQ ID NO: 315993 - DNA, 1500 bp, Artificial Sequence
  derived and/or modified sequence
atgctggagcggccccccgccctggccatgcccatgcccaccgagggtaccccacctcctctgtctggaacacccatcccagtcccagcatactttaggcatgccgagcccggattttcgctgaaacggccccggggcctcagtcgctccctgccaccgccaccccctgccaaggggagtataccgattagtagactgttccctcccagaactccaggttggcaccaattacagccccgaagagtgtcgttccgcggagaagcttccgagactctccagtccccgggatacgatcccagccgcccagagagcttttttcagcagtccttccagaggctcagcaggcttgggcatggctcatacggcgaagtctttaaggtacggagtaaggaggacgggcgcctctacgctgtgaagcgctccatgagcccctttcgagggcccaaagacagagcacggaagcttgcagaggtagggagtcatgagaaggttggccagcacccctgttgcgtaaggttagaacaggcctgggaggagggcggcatactttacctgcagaccgaactgtgcggcccttctttacagcagcactgtgaggcatggggagcaagcctcccagaggcccaggtgtgggggtatctcagagatactcttctggctctggctcatttgcactctcagggcctggtccatctcgatgtcaagcctgcaaatatctttttgggacctaggggaagatgtaagttgggtgatttcggcctcctcgtcgagctgggaacagccggggccggggaggtccaagagggtgatcctcggtatatggcgccagagctcctgcagggaagctacggaactgccgccgacgtgttcagcttagggcttacgattttggaagttgcttgtaatatggagctgccacacggaggcgagggctggcagcagctcaggcaggggtacttgccccctgagtttactgctggcctctcctctgagctccgctccgttctggttatgatgcttgaaccagacccaaagctgagggcaacggcagaggctcttctggccttacccgtgctgcgtcagcctcgcgcatggggcgttctctggtgtatggcggcagaagccctgtcccgggggtgggccctgtggcaggctctcttggccctcctgtgttggctgtggcacggtctggcccacccagcaagctggctgcagcctttggggccgcctgcgacacccccaggaagcccgccctgcagcctgttgttggacagcagcctatccagcaattgggacgacgacagcctcggccccagtcttagcccagaggctgtcttagcacgtacggtggggtccacatccactccccgctccagatgcaccccccgggatgcgctggacctgtctgacatcaactcagagcctcccagaggatctttcccgtcctttgagcctcgaaacctcctgtccctcttcgaagatacccttgatccgacttag

SEQ ID NO: 315994 - DNA, 1707 bp, Artificial Sequence
  derived and/or modified sequence
atgctggagcggccccccgccctggccatgcccatgcccaccgagggcactcccccccccctgtccggtacccctatccccgttccagcctattttcgtcatgcggagcccggtttttcactgaaaaggcctcgtgggttgtctcggagtctccctccacctcccccagcgaagggaagtatacccatcagccggctctttccgccccgtacacccggttggcaccagctgcagcctcgaagggtgagctttcggggagaagcttcagagaccctgcagtcgcccggctatgaccctagtcggcccgagagcttcttccaacagagcttccaacggctgtcacgccttggacacgggtcttatggtgaggtgttcaaagtgcggagcaaagaagacggacgcctctatgcggtgaagagaagtatgtccccttttagaggtcctaaggatcgggcccgaaaactggccgaggttgggtctcacgagaaagttggtcaacacccctgctgcgtgagactcgaacaggcctgggaggaaggtgggatcctctatctgcagacagaactctgcggcccctctttgcagcagcactgcgaagcctggggggcctctctcccagaagctcaagtgtggggttatcttagggatacgcttcttgcactcgcccacctgcactcacagggtctggtacacctcgacgtgaagcccgcaaacatttttttgggtcccaggggacgctgtaaactaggggactttgggctcctggttgagctgggtacggccggcgctggagaggttcaggagggtgatcctcgctatatggcacccgagctgctgcaaggtagttatgggacagccgcagacgtgttctcactggggctgacaatcctcgaggtggcctgcaatatggagctgccccacggtggtgaaggatggcagcagttacgccagggatatctcccgccagaattcaccgctggcttatcatctgaactacggtctgtgctggtgatgatgcttgagcccgaccccaagctgagggccactgcagaagccttacttgctctcccagtgctgcgccagcctcgagcatggggggtgttgtggtgtatggccgcggaggcactgtcccgcggatgggccctgtggcaggcactccttgccctgctgtgctggctgtggcatggtctggctcaccccgcaagctggcttcagccgctcggacctccggccactccacctggatctcctccatgctcacttctattggactcgtctctgtctagcaactgggacgacgacagcctcggcccctccctgtcccccgaagcggtcctcgctcgcacggtgggatcgacttccaccccaagaagcagatgtactcccagagtgctcacccccttgagactttcgcctgcagcggagccgtcggccccagggctggggcccgcagccgaggcgccttgctgcgtggagcagaggggcttcctgtccagacacatacctcggagcttcagtgcctttcaggccgccccgccgaaatccgcttgcaatgcattgcacctgcatggccacacccaaccatctgccttcgtctggtctctaacctgtagctcacaccacgggagaaccttcgaggcccggaccaaagtggatccattgtttaaaatctgcggcgggtttctgacagtgtttgccgacctgtag

SEQ ID NO: 315995 - DNA, 1500 bp, Artificial Sequence
  derived and/or modified sequence
atgctggagaggccgccagccctcgctatgcccatgcctactgaggggacacccccacctttgtcaggtacaccaatcccagtgcccgcatatttccgccatgcggagccaggtttcagcttaaagagaccacggggtctctctcgctctctgccccctccacccccagcaaaaggaagcattccaatcagtagactcttccctccacggacccccggttggcatcaactgcagcccaggagagtgtcctttaggggggaggcttccgagacccttcagagtcccggttatgacccatcccgccctgaaagctttttccagcaatcctttcagaggttatctcggctgggacatgggagctacggcgaggtgttcaaggtccgaagtaaggaggatggtcgcctgtacgctgtgaagcggtctatgagcccatttagaggcccaaaagaccgagcgaggaaactagccgaagttggcagccacgaaaaagtggggcagcacccttgttgtgttaggttagaacaggcctgggaagaaggtgggatactgtacttgcagacggagctctgtggaccctcactccagcagcactgtgaagcatggggggcttctctgccagaggcacaagtgtggggttacctgcgggacaccctcctggcccttgcccacctgcacagtcagggtctcgtgcaccttgatgtgaagcctgcgaatatctttttgggtcctcgcggaagatgcaaattaggggactttggcctcctggtggaattgggcacagccggtgccggagaggtgcaagagggagaccctagatacatggcaccggaattgctgcagggcagttatggaactgccgctgacgtgttctctctgggactgacgattttggaggttgcgtgcaatatggaattacctcacggaggagagggctggcagcaactacggcaaggataccttcccccagaatttacggcaggcctcagcagcgagctaaggtcagtgttggtaatgatgttggaacctgacccaaaactgcgcgctacagcagaggctctgctagccctccctgtcctgcgtcaacctagggcctggggtgtgctgtggtgcatggccgcagaggcactaagtcggggttgggcactgtggcaggcgcttctcgcactactgtgttggctgtggcacggactcgctcatcctgcctcctggcttcagcctcttggacctcccgcaacaccgccagggagcccgccttgctccctcctgcttgactctagtctatcgagcaattgggacgacgattctcttggccctagtttgtccccagaagctgtgttggccaggacggttggttccactagtactcctagaagccgatgcacacctagggatgcgctcgatctctccgacatcaacagcgaacctcccagaggatctttcccgtcttttgagcccagaaacctcctgagcctgttcgaggataccctagatcccacctag

SEQ ID NO: 315996 - DNA, 1707 bp, Artificial Sequence
  derived and/or modified sequence
atgttagagagaccccctgcgttggcgatgccaatgccaaccgaaggcactccacctccgctgtctggtacacccatacctgtgccggcatattttcgccacgccgaacctggcttcagcttgaagcgtcccagaggcctgtcccgctccctcccaccacctccaccagcgaaggggtccattcctatttctcgcttgttccctccacggacccccggatggcaccagctccagccccgacgggtcagtttccgaggagaggcttccgagacactgcaaagcccaggttacgacccaagccgccctgaaagcttttttcagcagagctttcagcgcctttctcggcttgggcacggaagttatggagaagtgtttaaagtccgctcaaaagaagatgggcgtctgtatgccgtgaagcgatctatgtctccatttcggggtcccaaggacagggccaggaagctggcagaagtgggcagtcacgagaaggtgggccagcacccatgctgcgtcaggctcgagcaggcctgggaagaaggtggcatcctttatttgcagaccgaactgtgtggacctagtctgcagcagcattgtgaggcttggggtgcctcactgccagaggcccaagtttgggggtatctgagggacaccctgttggccctggcccacctgcacagtcagggcctggtgcacctggacgttaagccagctaacatctttctcgggcctaggggccgatgtaaactgggagacttcgggttgctggttgaactgggtaccgccggtgcaggtgaagtgcaggagggggacccaagatacatggccccagagctcttgcaagggtcctatggtactgccgctgacgttttttcactcggacttaccatcctggaggtggcctgcaatatggagctccctcatgggggagaaggctggcaacaactgcggcagggctatcttccaccggaattcacagctgggctgagttcagagctgcgtagcgtgctggtcatgatgttggagccagaccccaagctgcgcgctacagccgaggccctgctggccctccctgtgctgaggcagcccagagcatggggggtcctgtggtgcatggcagctgaggctcttagccgcggatgggctctgtggcaggcactgttggctttgttgtgttggctgtggcacgggctggcgcaccctgcttcttggttacagcctctcggccctccagcgacacctcccggatccccaccttgttctctattgctggatagttccctgtcatccaattgggatgatgatagtctgggaccttctctcagtcccgaagcagttctggcccgaaccgtcgggagtacatctaccccacgcagccgttgtaccccaagagttctgactcctttgcggctcagccccgcagccgagccgtcggccccaggtctgggtcctgctgctgaggccccttgctgcgttgagcagcgaggatttctttccaggcatatcccgcgatctttcagtgcttttcaagccgcacctcctaagtctgcatgtaacgcccttcatttacacggacatacgcagccctctgctttcgtctggagcctgacatgctcttctcaccatggacgaacgttcgaggccaggacgaaagtggacccccttttcaaaatttgcggaggcttcttgacggtgtttgcagatttatag

SEQ ID NO: 315997 - DNA, 2308 bp, Artificial Sequence
  derived and/or modified sequence
agtcctccgcccgggcgtccggaacagtcgacggcagactccggcccgctgagccacccgaggggtcccgtggcctccgcggacccggaatctgggccctcgcggacccgcgccccgcccagtcgccccagggcttccccacacccacggagtgaagtcagccgcggccctgcctgggaggaacttaccgtctaccgggaaaggtggccagcagatgtgtcgggcctggtgagagggtgaggcgagacggcccgatcgcccagggccccggaagctgcggaggtcacccccgcctggccttagctcagggacaccctggattcacgtgggagcccctgctcctgcctcccccgtcccaccactgaggctgttgggccaggccagtcatgctagaacggcctcctgcactggccatgcccatgcccacggagggcaccccgccacctctgagtggcacccccatcccagtcccagcctacttccgccacgcagaacctggattctccctcaagaggcccagggggctcagccggagcctcccacctccgccccctgccaagggcagcattcccatcagccgcctcttccctcctcggaccccaggctggcaccagctgcagccccggcgggtgtcattccggggcgaggcctcagagactctgcagagccctgggtatgacccaagccggccagagtccttcttccagcagagcttccagaggctcagccgcctgggccatggctcctacggagaggtcttcaaggtgcgctccaaggaggacggccggctctatgcggtaaagcgttccatgtcaccattccggggccccaaggaccgggcccgcaagttggccgaggtgggcagccacgagaaggtggggcagcacccatgctgcgtgcggctggagcaggcctgggaggagggcggcatcctgtacctgcagacggagctgtgcgggcccagcctgcagcaacactgtgaggcctggggtgccagcctgcctgaggcccaggtctggggctacctgcgggacacgctgcttgccctggcccatctgcacagccagggcctggtgcaccttgatgtcaagcctgccaacatcttcctggggccccggggccgctgcaagctgggtgacttcggactgctggtggagctgggtacagcaggagctggtgaggtccaggagggagacccccgctacatggcccccgagctgctgcagggctcctatgggacagcagcggatgtgttcagtctgggcctcaccatcctggaagtggcatgcaacatggagctgccccacggtggggagggctggcagcagctgcgccagggctacctgccccctgagttcactgccggtctgtcttccgagctgcgttctgtccttgtcatgatgctggagccagaccccaagctgcgggccacggccgaggccctgctggcactgcctgtgttgaggcagccgcgggcctggggtgtgctgtggtgcatggcagcggaggccctgagccgagggtgggccctgtggcaggccctgcttgccctgctctgctggctctggcatgggctggctcaccctgccagctggctacagcccctgggcccgccagccaccccgcctggctcaccaccctgcagtttgctcctggacagcagcctctccagcaactgggatgacgacagcctagggccttcactctcccctgaggctgtcctggcccggactgtggggagcacctccaccccccggagcaggtgcacacccagggtcttaacgcccctgaggctgagccctgctgcagaacccagcgctcctggccttgggccagcagctgaagccccatgctgtgtggagcaaagaggtttcctgagcaggcacatcccccggtccttctctgcattccaggcagctccaccaaagtctgcgtgcaacgcccttcatttgcatggacacacgcaaccctcggcgtttgtatggtcattaacatgctcctcccaccacggaagaactttcgaggcccgtaccaaagtagatcctttattcaaaatctgtgggggttttttgactgtttttgctgacctgtgacctctcactgaggacggcagtccaggaccacccccagaggggttcaaagacctccgaaaccagagaccacccccacatacaggtccatggagagggcctggaccatctggacccccacggtcaggccaagtcccagataatagcaccagatgtttcctgtccgacttttggtctccccaaggcgaccagaggccgagctgcccctacacaggcgc

SEQ ID NO: 315998 - DNA, 2136 bp, Artificial Sequence
  derived and/or modified sequence
ctggggagggggaggagcctcgaggccggtttggaatttttggcgcgagcagctccgcgcgcgttcacgggccgttccccctcacgggagtcctccgcccgggcgtccggaacagtcgacggcagactccggcccgctgagccacccgaggggtcccgtggcctccgcggacccggaatctgggccctcgcggacccgcgccccgcccagtcgccccagggcttccccacacccacggagtgaagtcagccgcggccctgcctgggaggaacttaccgtctaccgggaaaggtggccagcagatgtgtcgggcctggtgagagggtgaggcgagacggcccgatcgcccagggccccggaagctgcggaggtcacccccgcctggccttagctcagggacaccctggattcacgtgggagcccctgctcctgcctcccccgtcccaccactgaggctgttgggccaggccagtcatgctagaacggcctcctgcactggccatgcccatgcccacggagggcaccccgccacctctgagtggcacccccatcccagtcccagcctacttccgccacgcagaacctggattctccctcaagaggcccagggggctcagccggagcctcccacctccgccccctgccaagggcagcattcccatcagccgcctcttccctcctcggaccccaggctggcaccagctgcagccccggcgggtgtcattccggggcgaggcctcagagactctgcagagccctgggtatgacccaagccggccagagtccttcttccagcagagcttccagaggctcagccgcctgggccatggctcctacggagaggtcttcaaggtgcgctccaaggaggacggccggctctatgcggtaaagcgttccatgtcaccattccggggccccaaggaccgggcccgcaagttggccgaggtgggcagccacgagaaggtggggcagcacccatgctgcgtgcggctggagcaggcctgggaggagggcggcatcctgtacctgcagacggagctgtgcgggcccagcctgcagcaacactgtgaggcctggggtgccagcctgcctgaggcccaggtctggggctacctgcgggacacgctgcttgccctggcccatctgcacagccagggcctggtgcaccttgatgtcaagcctgccaacatcttcctggggccccggggccgctgcaagctgggtgacttcggactgctggtggagctgggtacagcaggagctggtgaggtccaggagggagacccccgctacatggcccccgagctgctgcagggctcctatgggacagcagcggatgtgttcagtctgggcctcaccatcctggaagtggcatgcaacatggagctgccccacggtggggagggctggcagcagctgcgccagggctacctgccccctgagttcactgccggtctgtcttccgagctgcgttctgtccttgtcatgatgctggagccagaccccaagctgcgggccacggccgaggccctgctggcactgcctgtgttgaggcagccgcgggcctggggtgtgctgtggtgcatggcagcggaggccctgagccgagggtgggccctgtggcaggccctgcttgccctgctctgctggctctggcatgggctggctcaccctgccagctggctacagcccctgggcccgccagccaccccgcctggctcaccaccctgcagtttgctcctggacagcagcctctccagcaactgggatgacgacagcctagggccttcactctcccctgaggctgtcctggcccggactgtggggagcacctccaccccccggagcaggtgcacacccagggatgccctggacctaagtgacatcaactcagagcctcctcggggctccttcccctcctttgagcctcggaacctcctcagcctgtttgaggacaccctagacccaacctgagccccagactctgcctctgcacttttaaccttttatcctgtgtctctcccgtcgcccttgaaagctggggcccctcgggaactcccatggtcttctctgcctggccgtgtctaataaaaagtatttgaaccttgggagcacccaagcttgctcatgtggcaa

SEQ ID NO: 315999 - DNA, 1892 bp, Artificial Sequence
  derived and/or modified sequence
ctcacgggagtcctccgcccgggcgtccggaacagtcgacggcagactccggcccgctgagccacccgaggggtcccgtggcctccgcggacccggaatctgggccctcgcggacccgcgccccgcccagtcgccccagcccgtccactgctctgttcgccagggcttccccacacccacggagtgaagtcagccgcggccctgcctgggaggaacttaccgtctaccgggaaaggtggccagcagatgtgtcgggcctggtgagaggggcctcctgcactggccatgcccatgcccacggagggcaccccgccacctctgagtggcacccccatcccagtcccagcctacttccgccacgcagaacctggattctccctcaagaggcccagggggctcagccggagcctcccacctccgccccctgccaagggcagcattcccatcagccgcctcttccctcctcggaccccaggctggcaccagctgcagccccggcgggtgtcattccggggcgaggcctcagagactctgcagagccctgggtatgacccaagccggccagagtccttcttccagcagagcttccagaggctcagccgcctgggccatggctcctacggagaggtcttcaaggtgcgctccaaggaggacggccggctctatgcggtaaagcgttccatgtcaccattccggggccccaaggaccgggcccgcaagttggccgaggtgggcagccacgagaaggtggggcagcacccatgctgcgtgcggctggagcaggcctgggaggagggcggcatcctgtacctgcagacggagctgtgcgggcccagcctgcagcaacactgtgaggcctggggtgccagcctgcctgaggcccaggtctggggctacctgcgggacacgctgcttgccctggcccatctgcacagccagggcctggtgcaccttgatgtcaagcctgccaacatcttcctggggccccggggccgctgcaagctgggtgacttcggactgctggtggagctgggtacagcaggagctggtgaggtccaggagggagacccccgctacatggcccccgagctgctgcagggctcctatgggacagcagcggatgtgttcagtctgggcctcaccatcctggaagtggcatgcaacatggagctgccccacggtggggagggctggcagcagctgcgccagggctacctgccccctgagttcactgccggtctgtcttccgagctgcgttctgtccttgtcatgatgctggagccagaccccaagctgcgggccacggccgaggccctgctggcactgcctgtgttgaggcagccgcgggcctggggtgtgctgtggtgcatggcagcggaggccctgagccgagggtgggccctgtggcaggccctgcttgccctgctctgctggctctggcatgggctggctcaccctgccagctggctacagcccctgggcccgccagccaccccgcctggctcaccaccctgcagtttgctcctggacagcagcctctccagcaactgggatgacgacagcctagggccttcactctcccctgaggctgtcctggcccggactgtggggagcacctccaccccccggagcaggtgcacacccagggatgccctggacctaagtgacatcaactcagagcctcctcggggctccttcccctcctttgagcctcggaacctcctcagcctgtttgaggacaccctagacccaacctgagccccagactctgcctctgcacttttaaccttttatcctgtgtctctcccgtcgcccttgaaagctggggcccctcgggaactcccatggtcttctctgcctggccgtgtctaataaaaagtatttgaaccttg

SEQ ID NO: 316000 - DNA, 1500 bp, Artificial Sequence
  derived and/or modified sequence
atgctggagagaccccccgccctggccatgcccatgcccaccgagggcacccccccccccctgagcggcacccccatccccgtgcccgcctacttcagacacgccgagcccggcttcagcctgaagagacccagaggcctgagcagaagcctgcccccccccccccccgccaagggcagcatccccatcagcagactgttcccccccagaacccccggctggcaccagctgcagcccagaagagtgagcttcagaggcgaggccagcgagaccctgcagagccccggctacgaccccagcagacccgagagcttcttccagcagagcttccagagactgagcagactgggccacggcagctacggcgaggtgttcaaggtgagaagcaaggaggacggcagactgtacgccgtgaagagaagcatgagccccttcagaggccccaaggacagagccagaaagctggccgaggtgggcagccacgagaaggtgggccagcacccctgctgcgtgagactggagcaggcctgggaggagggcggcatcctgtacctgcagaccgagctgtgcggccccagcctgcagcagcactgcgaggcctggggcgccagcctgcccgaggcccaggtgtggggctacctgagagacaccctgctggccctggcccacctgcacagccagggcctggtgcacctggacgtgaagcccgccaacatcttcctgggccccagaggcagatgcaagctgggcgacttcggcctgctggtggagctgggcaccgccggcgccggcgaggtgcaggagggcgaccccagatacatggcccccgagctgctgcagggcagctacggcaccgccgccgacgtgttcagcctgggcctgaccatcctggaggtggcctgcaacatggagctgccccacggcggcgagggctggcagcagctgagacagggctacctgccccccgagttcaccgccggcctgagcagcgagctgagaagcgtgctggtgatgatgctggagcccgaccccaagctgagagccaccgccgaggccctgctggccctgcccgtgctgagacagcccagagcctggggcgtgctgtggtgcatggccgccgaggccctgagcagaggctgggccctgtggcaggccctgctggccctgctgtgctggctgtggcacggcctggcccaccccgccagctggctgcagcccctgggcccccccgccaccccccccggcagccccccctgcagcctgctgctggacagcagcctgagcagcaactgggacgacgacagcctgggccccagcctgagccccgaggccgtgctggccagaaccgtgggcagcaccagcacccccagaagcagatgcacccccagagacgccctggacctgagcgacatcaacagcgagccccccagaggcagcttccccagcttcgagcccagaaacctgctgagcctgttcgaggacaccctggaccccacctag

SEQ ID NO: 316001 - DNA, 1500 bp, Artificial Sequence
  derived and/or modified sequence
atgctgccctggccccccgccctggccatgcccatgcccaccgagggcacccccccccccctgagcggcacccccatccccgtgcccgcctacttcagacacgccgagcccggcttcagcctgaagagacccagaggcctgagcagaagcctgcccccccccccccccgccaagggcagcatccccatcagcagactgttcccccccagaacccccggctggcaccagctgcagcccagaagagtgagcttcagaggcgaggccagcgagaccctgcagagccccggctacgaccccagcagacccgagagcttcttccagcagagcttccagagactgagcagactgggccacggcagctacggcgaggtgttcaaggtgagaagcaaggaggacggcagactgtacgccgtgaagagaagcatgagccccttcagaggccccaaggacagagccagaaagctggccgaggtgggcagccacgagaaggtgggccagcacccctgctgcgtgagactggagcaggcctgggaggagggcggcatcctgtacctgcagaccgagctgtgcggccccagcctgcagcagcactgcgaggcctggggcgccagcctgcccgaggcccaggtgtggggctacctgagagacaccctgctggccctggcccacctgcacagccagggcctggtgcacctggacgtgaagcccgccaacatcttcctgggccccagaggcagatgcaagctgggcgacttcggcctgctggtggagctgggcaccgccggcgccggcgaggtgcaggagggcgaccccagatacatggcccccgagctgctgcagggcagctacggcaccgccgccgacgtgttcagcctgggcctgaccatcctggaggtggcctgcaacatggagctgccccacggcggcgagggctggcagcagctgagacagggctacctgccccccgagttcaccgccggcctgagcagcgagctgagaagcgtgctggtgatgatgctggagcccgaccccaagctgagagccaccgccgaggccctgctggccctgcccgtgctgagacagcccagagcctggggcgtgctgtggtgcatggccgccgaggccctgagcagaggctgggccctgtggcaggccctgctggccctgctgtgctggctgtggcacggcctggcccaccccgccagctggctgcagcccctgggcccccccgccaccccccccggcagccccccctgcagcctgctgctggacagcagcctgagcagcaactgggacgacgacagcctgggccccagcctgagccccgaggccgtgctggccagaaccgtgggcagcaccagcacccccagaagcagatgcacccccagagacgccctggacctgagcgacatcaacagcgagccccccagaggcagcttccccagcttcgagcccagaaacctgctgagcctgttcgaggacaccctggaccccacctag

SEQ ID NO: 316002 - DNA, 1473 bp, Artificial Sequence
  derived and/or modified sequence
atgcccatgcccaccgagggcacccccccccccctgagcggcacccccatccccgtgcccgcctacttcagacacgccgagcccggcttcagcctgaagagacccagaggcctgagcagaagcctgcccccccccccccccgccaagggcagcatccccatcagcagactgttcccccccagaacccccggctggcaccagctgcagcccagaagagtgagcttcagaggcgaggccagcgagaccctgcagagccccggctacgaccccagcagacccgagagcttcttccagcagagcttccagagactgagcagactgggccacggcagctacggcgaggtgttcaaggtgagaagcaaggaggacggcagactgtacgccgtgaagagaagcatgagccccttcagaggccccaaggacagagccagaaagctggccgaggtgggcagccacgagaaggtgggccagcacccctgctgcgtgagactggagcaggcctgggaggagggcggcatcctgtacctgcagaccgagctgtgcggccccagcctgcagcagcactgcgaggcctggggcgccagcctgcccgaggcccaggtgtggggctacctgagagacaccctgctggccctggcccacctgcacagccagggcctggtgcacctggacgtgaagcccgccaacatcttcctgggccccagaggcagatgcaagctgggcgacttcggcctgctggtggagctgggcaccgccggcgccggcgaggtgcaggagggcgaccccagatacatggcccccgagctgctgcagggcagctacggcaccgccgccgacgtgttcagcctgggcctgaccatcctggaggtggcctgcaacatggagctgccccacggcggcgagggctggcagcagctgagacagggctacctgccccccgagttcaccgccggcctgagcagcgagctgagaagcgtgctggtgatgatgctggagcccgaccccaagctgagagccaccgccgaggccctgctggccctgcccgtgctgagacagcccagagcctggggcgtgctgtggtgcatggccgccgaggccctgagcagaggctgggccctgtggcaggccctgctggccctgctgtgctggctgtggcacggcctggcccaccccgccagctggctgcagcccctgggcccccccgccaccccccccggcagccccccctgcagcctgctgctggacagcagcctgagcagcaactgggacgacgacagcctgggccccagcctgagccccgaggccgtgctggccagaaccgtgggcagcaccagcacccccagaagcagatgcacccccagagacgccctggacctgagcgacatcaacagcgagccccccagaggcagcttccccagcttcgagcccagaaacctgctgagcctgttcgaggacaccctggaccccacctag

SEQ ID NO: 316003 - DNA, 1500 bp, Artificial Sequence
  derived and/or modified sequence
atgctgccatggcctcccgctcttgcgatgcctatgccgactgaggggaccccgccacctctctctggaactcctatcccggtacccgcctacttcagacacgccgagccgggattctccctgaagagaccgagaggactgtcaagatcccttcccccacctccccccgcgaaggggtccatcccaatctctagacttttccctccgcgcacaccagggtggcatcaattacagccccgtagggtgtccttcaggggagaagcgagtgagaccctgcagagcccggggtacgaccccagtcggccagagtcattttttcagcaatcgttccagcgtctaagccgcttgggtcacggctcctacggggaggtctttaaggtgaggtccaaggaggacggccgcttgtatgccgtcaaacgcagcatgtccccgtttcggggaccgaaggatcgcgctaggaaattggcagaagtcggttcacatgagaaagtcggccagcacccgtgctgtgtgagactcgaacaggcatgggaggagggagggattctgtatcttcagacagagctttgcggacccagtttgcaacagcactgcgaggcttggggggcatcactgccagaggcccaggtctggggatacctgagagacacactgctagcgctggcacacttgcattcacaggggctggtccacctcgatgtaaaacccgctaatatcttcctaggcccccgaggacggtgcaagctgggagactttggcttgttggtggagctggggacagccggagccggcgaggtgcaggagggcgacccgaggtacatggcccccgaactgctgcagggcagctacgggactgcagccgatgtttttagtctgggcctgacaatcctggaggtagcatgcaatatggagctgcctcacggcggtgagggttggcagcagctaagacagggatacttgcctcccgagtttaccgccggcctgtcttccgagctgagaagcgtcctggtcatgatgctggaacccgatcctaagctgcgcgccactgccgaggcactgctcgctctgcctgtgctgagacagccaagggcttggggagtgctgtggtgcatggccgccgaggcgctgagtcgcggatgggccctatggcaggctctcctcgcattgctatgctggctctggcacggcctggcccatcctgcttcctggcttcagccacttgggcccccagctacgcctccaggaagtccgccctgctctctgctgctcgattcttccctaagtagcaattgggatgacgattcgttaggcccaagtctcagtcctgaggcggtgctcgccaggactgttgggagcacatcaacccctcgctcccggtgcactccacgggacgctctagatctgagcgatatcaactccgagcctccacgtggttcttttcctagtttcgaacctcgaaacctgctgagcctctttgaagacacactcgaccccacctag

SEQ ID NO: 316004 - DNA, 1473 bp, Artificial Sequence
  derived and/or modified sequence
atgcccatgccaacagagggcacaccaccgcccctgtccggcactcctatccccgttcccgcatactttaggcatgccgaacctggatttagcctgaagcgccctaggggtttgtcccgctccctaccacccccgccccctgcaaaggggtcaattccaatcagtagactcttcccgccgagaacgccaggatggcatcaattgcaacccaggcgtgtaagcttcagaggagaggccagtgagaccctgcagtcccctggttacgacccgtccaggccagagtctttcttccagcagagcttccagcgcctgagccgtttaggccacggttcctatggggaggtcttcaaggtgcgatctaaggaggatggcagactttatgcggtgaaaaggagcatgagtccattccgcggtccaaaggatagagcccgcaagctcgccgaagtcggcagtcacgagaaagtaggtcagcatccctgctgtgtaaggctcgaacaggcctgggaagaggggggcattttatatctgcagaccgaactgtgtggccctagccttcagcagcattgtgaagcctggggcgcctcacttcccgaagcacaggtttgggggtacctgcgcgacactcttttagcactagcgcatttgcattctcagggcctcgtgcatctcgacgtgaagccagctaatatcttcttgggccccagggggcgttgcaagctcggagacttcggtctgctggttgagcttgggacggcaggtgcgggggaggtacaggaaggtgaccctaggtacatggcaccagaattgttgcagggatcatatggcactgccgccgatgtgttttcactaggcctaactattctcgaggtggcctgcaacatggaactgccccacgggggggagggatggcaacagctccgccaggggtacctacctcccgaattcaccgctggacttagctccgaactcaggtctgtcctggttatgatgttggagccggatccaaagctccgcgcaactgcagaagccttactcgctctacctgtcctgcgacagccgcgcgcgtggggagttctgtggtgcatggcggccgaagctcttagccgcgggtgggcgctgtggcaagcactcctggcacttctgtgctggctttggcacggcttggcccaccccgcatcctggctgcaaccattgggtccacctgccaccccaccgggctctccaccttgttctttactactcgatagttccctctcgagtaactgggacgacgactcactaggtccttccttgtcaccagaggccgtgctggccaggactgtgggatccacatctacacccaggagcaggtgtaccccaagagacgctctcgacctgtccgacatcaatagcgaacccccaaggggctcttttccaagcttcgagcctcggaacctcttatcgctcttcgaagacaccctggaccccacgtag

SEQ ID NO: 316005 - DNA, 1500 bp, Artificial Sequence
  derived and/or modified sequence
atgctgccctggcccccagccctggccatgcccatgcccacagagggcaccccaccacccctgagcggcacccccatccctgtgcctgcctacttcagacatgctgagcccggcttcagcctgaagaggccccggggcctgagccgcagcctgcccccacctcctccagccaagggcagcatccccatcagccgcctcttcccccccaggaccccaggctggcaccagctgcagccccggcgggtgtccttccggggggaggccagcgagaccctgcagagccctggctatgaccccagcaggcctgagagcttcttccagcagagcttccagaggctgagccggctgggccacggcagctatggagaggtgttcaaggtgcgcagcaaagaagatggccgcctgtatgctgtgaagaggtccatgagccccttccggggccccaaggaccgggccaggaagctggccgaggtgggcagccatgagaaggtgggccagcacccctgctgcgtgcggctggagcaggcctgggaggagggcggcatcctgtacctgcagacagagctgtgtggccccagcctgcagcagcactgtgaggcctggggcgccagcctgcctgaggcccaggtgtggggctacctgcgggacaccctgctggccctggcccacctgcacagccagggcctggtgcacctggatgtgaagccagccaacatcttcctgggcccccggggccgctgcaagctgggggactttggcctgctggtggagctgggcacagctggagctggggaggtgcaggagggggacccccgctacatggcccctgagctgctgcagggcagctatggaacagctgctgatgtgttcagcctgggcctgaccatcctggaggtggcctgcaacatggagctgccccatggaggagagggctggcagcagctgcggcagggctacctgcccccagagttcaccgctggcctgagcagcgagctgcggtctgtgctggtgatgatgctggagccagaccccaagctgcgggccacagctgaggccctgctggccctgcctgtgctgcggcagccccgggcctggggcgtgctgtggtgcatggctgctgaggccctgagccggggctgggccctgtggcaggccctgctggccctgctgtgctggctgtggcacggcctggcccacccagcctcctggctgcagcccctgggccccccagccaccccacctggcagccccccctgcagcctgctgctggacagcagcctgagcagcaactgggatgatgacagcctgggccccagcctgagccctgaggccgtgctggccaggacagtgggcagcaccagcacccccaggagccgctgcaccccaagagatgccctggacctgagtgacatcaacagcgagcccccccggggcagcttccccagctttgagcccaggaacctgctgagcctgtttgaggacaccctggaccccacctag

SEQ ID NO: 316006 - DNA, 1473 bp, Artificial Sequence
  derived and/or modified sequence
atgcccatgcccacagagggcaccccaccacccctgagcggcacccccatccctgtgcctgcctacttcagacatgctgagcccggcttcagcctgaagaggccccggggcctgagccgcagcctgcccccacctcctccagccaagggcagcatccccatcagccgcctcttcccccccaggaccccaggctggcaccagctgcagcccaggagagtgtccttccggggggaggccagcgagaccctgcagagccctggctatgaccccagcaggcctgagagcttcttccagcagagcttccagaggctgagccggctgggccacggcagctatggagaggtgttcaaggtgcgcagcaaggaggatggccgcctgtatgctgtgaagaggtccatgagccccttccggggccccaaggaccgggccaggaagctggccgaggtgggcagccatgagaaggtgggccagcacccctgctgcgtgcggctggagcaggcctgggaggagggcggcatcctgtacctgcagacagagctgtgtggccccagcctgcagcagcactgtgaggcctggggcgccagcctgcctgaggcccaggtgtggggctacctgcgggacaccctgctggccctggcccacctgcacagccagggcctggtgcacctggatgtgaagccagccaacatcttcctgggcccccggggccgctgcaagctgggggactttggcctgctggtggagctgggcacagctggggccggggaggtgcaggagggggacccccgctacatggcccctgagctgctgcagggcagctatggaacagctgctgatgtgttcagcctgggcctgaccatcctggaggtggcctgcaacatggagctgccccacggcggggagggctggcagcagctgcggcagggctacctgcccccagagttcaccgctggcctgagcagcgagctgcggtctgtgctggtgatgatgctggagccagaccccaagctgcgggccacagctgaggccctgctggccctgcctgtgctgcggcagccccgggcctggggcgtgctgtggtgcatggctgctgaggccctgagccggggctgggccctgtggcaggccctgctggccctgctgtgctggctgtggcacggcctggcccacccagcctcctggctgcagcccctgggccccccagccaccccacctggcagccccccctgcagcctgctgctggacagcagcctgagcagcaactgggatgatgacagcctgggccccagcctgagccctgaggccgtgctggccaggacagtgggcagcaccagcacccccaggagccgctgcaccccaagagatgccctggacctgagtgacatcaacagcgagcccccccggggcagcttccccagctttgagcccaggaacctgctgagcctgtttgaggacaccctggaccccacctag

SEQ ID NO: 316007 - DNA, 1500 bp, Artificial Sequence
  derived and/or modified sequence
atgctgccctggccccccgccctggccatgcccatgcccaccgaggggaccccgccacctctgtccgggacacccattcccgtcccggcttactttcgccacgctgaacctggcttcagtctcaagaggcccagaggcctgtctaggagtcttcctcccccacccccggctaagggcagcattcctatctccaggcttttccctccaaggacccctggctggcatcagctgcagcctaggcgagtctctttccggggggaggcctcagaaacattgcaatctccagggtatgacccctctcgaccggaatctttttttcagcagagcttccaaaggctctctagacttggccacggctcctacggggaggtgttcaaagtgagatccaaggaagatgggagattatatgccgtgaagcgcagcatgtccccgttccgaggaccgaaggatagagctcgcaaactggctgaggtcggcagtcatgagaaggtggggcagcacccttgctgcgtgagattggaacaggcctgggaggaaggaggcattttatacttgcagacggaactctgtggcccgagcctgcagcagcactgcgaggcatggggggcaagcctgccggaagcccaggtgtggggctatctccgagataccctactcgcccttgctcacctgcacagccaaggactcgttcatctggatgtaaaacctgccaacatttttctgggcccgcgaggccgctgcaagttaggagattttgggctgttagtggaactcggaaccgccggggcaggggaagtgcaggagggagaccccaggtatatggcaccagagctactccaagggtcttatggaactgccgccgacgtattctccctgggtctgaccattttagaggtagcttgtaatatggagctgccccacggcggtgagggctggcagcagctgaggcaggggtacctgcctcccgagttcaccgccgggctgagttcagagctgcgttccgtcctcgttatgatgctggaaccagacccaaagctgagggcaaccgcagaagcgctgctcgcactgcctgtactgaggcagcctagagcctggggggtactgtggtgcatggcagctgaggcccttagcagaggctgggccctctggcaggcactgttagctctcttatgctggctgtggcacggcttggcacatcctgctagctggctgcagccccttgggcctcccgccacgccgccaggcagcccaccatgttccctattgctggatagtagcctcagtagcaactgggacgatgactccctaggtcccagtctttccccggaggctgttttggcccgtactgtgggcagcacgagcactccgcgaagccgttgcacacctcgggacgccctggacctgtccgatatcaattccgagccacctcgtggatcattcccctcttttgagccccgtaatctgctgtcactgttcgaagacacccttgaccccacatag

SEQ ID NO: 316008 - DNA, 1634 bp, Artificial Sequence
  derived and/or modified sequence
atgctgccctggcctcctgcactggccatgcccatgcccacggagggcaccccgccacctctgagtggcacccccatcccagtcccagcctacttccgccacgcagaacctggattctccctcaagaggcccagggggctcagccggagcctcccacctccgccccctgccaagggcagcattcccatcagccgcctcttccctcctcggaccccaggctggcaccagctgcagccccggcgggtgtcattccggggcgaggcctcagagactctgcagagccctgggtatgacccaagccggccagagtccttcttccagcagagcttccagaggctcagccgcctgggccatggctcctacggagaggtcttcaaggtgcgctccaaggaggacggccggctctatgcggtaaagcgttccatgtcaccattccggggccccaaggaccgggcccgcaagttggccgaggtgggcagccacgagaaggtggggcagcacccatgctgcgtgcggctggagcaggcctgggaggagggcggcatcctgtacctgcagacggagctgtgcgggcccagcctgcagcaacactgtgaggcctggggtgccagcctgcctgaggcccaggtctggggctacctgcgggacacgctgcttgccctggcccatctgcacagccagggcctggtgcaccttgatgtcaagcctgccaacatcttcctggggccccggggccgctgcaagctgggtgacttcggactgctggtggagctgggtacagcaggagctggtgaggtccaggagggagacccccgctacatggcccccgagctgctgcagggctcctatgggacagcagcggatgtgttcagtctgggcctcaccatcctggaagtggcatgcaacatggagctgccccacggtggggagggctggcagcagctgcgccagggctacctgccccctgagttcactgccggtctgtcttccgagctgcgttctgtccttgtcatgatgctggagccagaccccaagctgcgggccacggccgaggccctgctggcactgcctgtgttgaggcagccgcgggcctggggtgtgctgtggtgcatggcagcggaggccctgagccgagggtgggccctgtggcaggccctgcttgccctgctctgctggctctggcatgggctggctcaccctgccagctggctacagcccctgggcccgccagccaccccgcctggctcaccaccctgcagtttgctcctggacagcagcctctccagcaactgggatgacgacagcctagggccttcactctcccctgaggctgtcctggcccggactgtggggagcacctccaccccccggagcaggtgcacacccagggatgccctggacctaagtgacatcaactcagagcctcctcggggctccttcccctcctttgagcctcggaacctcctcagcctgtttgaggacaccctagacccaacctgagccccagactctgcctctgcacttttaaccttttatcctgtgtctctcccgtcgcccttgaaagctggggcccctcgggaactcccatggtcttctctgcctggccgtgtctaataaaaagtatttgaaccttg

SEQ ID NO: 316009 - DNA, 1473 bp, Artificial Sequence
  derived and/or modified sequence
atgcccatgcccaccgagggcacccccccccccctgagcggcacccctatccccgttccggcatactttcgtcatgcggagccagggttctccctaaagagaccacggggtctgtccaggtccctcccccctccaccccctgccaagggtagtatacctatttcacgtctatttccgcccagaacgcccggctggcatcaacttcaacccagacgtgtatccttcaggggtgaggcttccgagacactccagtctcctgggtatgacccgtccagaccggaaagcttcttccagcaaagttttcagcgcctgtccagattgggacacggctcttatggtgaggtgttcaaggttaggtccaaagaagatggaagactgtacgccgtgaagcggagcatgtccccattccgtggcccaaaggatcgagcccggaaactcgcggaggtggggagccacgagaaggtggggcaacatccatgctgtgtgcgcctggagcaggcttgggaggagggcggcatcctctatctgcagactgaactgtgtggaccctcacttcagcagcattgtgaggcttggggagctagtcttcccgaggcccaagtctggggctatctcagagacactctgcttgcgctcgcccacctccactcccaggggctcgtgcatttggacgttaagcctgccaacatctttcttggccctcgaggcagatgtaagctgggggacttcggcctgctcgtagagctaggaacagctggcgcaggagaggttcaggagggagaccccaggtacatggcacctgaactgctccagggatcgtacggcactgcggcggacgtattttctctgggactcaccatcctggaggtggcctgtaacatggagttgccacacggaggcgaaggatggcaacagctgaggcaaggttatctaccccctgagtttaccgccggattgtcttcagaactgagatccgttctcgttatgatgctggaacccgatcccaagctccgtgccacagcagaagctctgttagccctgccagtactgcgtcagcccagggcatggggagttctctggtgtatggccgcagaagcgctttcccgaggctgggcactttggcaggctctgctggccctattatgttggttatggcacgggcttgctcatccagcaagctggctgcagccgctgggcccccctgcaacccctcccggcagtcccccttgctctcttctgctcgacagttccctgtccagcaactgggacgacgactctttgggccccagcctgagtccagaggctgtgctggctcggactgtcggaagcacaagtacaccacggtccagatgtactcctagggacgcccttgatctgagtgacattaatagcgagccccccagaggctccttcccctccttcgaaccacggaatctcctgtctctgtttgaggatacactggaccccacgtag

SEQ ID NO: 316010 - DNA, 1500 bp, Artificial Sequence
  derived and/or modified sequence
atgctgccctggcccccagcattagctatgccgatgcccaccgaaggaacacctccccctctgtccggcactcctatacccgtgcctgcatacttccgacatgctgaacccggattcagtctgaaaagacccagaggcctgagccgaagtctgcccccaccccctcccgctaaggggtccatccccatttctcgcctgttcccacccagaacgcctgggtggcaccagctacagccgagaagggtaagtttcagaggtgaagcctctgagaccctacagtcacctggatacgatcctagtcggccagaatccttcttccagcaatcctttcagcggctttcccgcctgggccatgggagctacggcgaggtcttcaaagtcaggtctaaggaggacggaagactgtacgctgtgaaacgcagcatgtcaccattccggggaccaaaggacagggcccgaaagttggcagaggtcggctctcacgaaaaggtcggacagcatccttgttgtgtgaggctggagcaggcatgggaggaaggaggcattctgtatttgcagacggagctgtgtgggccttccctgcagcagcactgcgaggcttggggtgcttctctccccgaggcgcaagtttgggggtatcttagggatacactcctggcgttagcgcaccttcactcccagggtcttgtgcatcttgacgtgaaaccagctaacatcttcctcggccctcggggaagatgcaagctgggtgattttggcttgcttgtggaattggggaccgcaggcgcaggagaagtgcaggagggcgacccgagatacatggctcctgagctcttacagggatcctacgggaccgccgctgacgtgttctctttaggtctgaccatcctggaggtcgcttgtaacatggagcttcctcacgggggagaaggctggcaacagctcagacagggatatctgcccccagaattcaccgcaggcctgagcagcgaactccgttctgtgttggtcatgatgctggaacctgatccgaagttaagagcaacagccgaagccttgctggctttgcccgttttaagacagccccgtgcgtggggcgtgctctggtgtatggccgcagaagcgctttctcgcggttgggctctgtggcaggcactcctggcgctgctatgctggctgtggcatggtctggcccatccagcatcatggctccagccgctggggcctcctgccaccccgcctggaagccctccctgttctctcttgctggattccagcctaagtagcaactgggacgatgatagcctcggtcctagcctctccccggaggccgtgttggcccgaaccgtggggtccacgtcgacaccgcgatccagatgtacgccacgggatgccctggatctttccgacatcaattctgaaccgccacggggatcattcccctcttttgagccacgcaacctcctctccttattcgaggacactctcgaccccacgtag

SEQ ID NO: 316011 - DNA, 1473 bp, Artificial Sequence
  derived and/or modified sequence
atgcccatgccaacggagggtacaccacctcctctgagcgggacacctattcccgttccggcttactttaggcatgccgagccaggcttttcattgaagagaccaagggggctgagcaggtcactcccaccacctccccctgccaaggggagtattcccatttctaggctcttcccacccaggacccccggatggcaccaactgcagccccgaagggtgtcctttagaggggaagcttcagaaactctccagtcaccgggatacgatccgtctcgtcccgagtcctttttccagcagtccttccagcgattgagcagacttgggcatggaagttacggggaagtatttaaagtcaggtcaaaggaggatggtcggctctatgccgtcaagaggagcatgagtccgttcagaggacctaaagacagggccagaaagctggcggaggtgggatcccacgaaaaggtgggccagcacccgtgttgtgttagactggagcaggcatgggaagagggtggtatactatacctccagaccgagttatgcggcccttctctgcaacagcactgcgaagcctggggcgctagtctccctgaggcccaagtctggggctatctgagggacactctgctcgctcttgcacatctacattcacagggattggtgcatctggatgtaaaacccgcaaatatcttcctggggcctcggggtagatgcaagctgggagacttcggcctgcttgtggaactcggcactgccggagccggtgaagtgcaggagggagatccaaggtatatggcacctgagctgctccaagggtcatacggcactgctgctgacgtcttcagcctgggcctcactattctggaagtcgcttgtaacatggaattacctcacggaggtgagggctggcagcagcttcgccagggatatttaccacctgaatttactgcaggactatcctcagaattgcgctctgttctggttatgatgctggaacccgatcctaaactcagggcaaccgcagaagccttgcttgcactccctgtcctgcgccagccccgagcctggggcgtcctgtggtgtatggctgcagaagccctctcacgaggctgggccctgtggcaggctctattagctctcctatgctggctctggcatggcttggcccaccctgcaagctggctacagcctctagggccacctgctaccccccctggatctcccccatgctctttattgctggactctagcctcagctccaattgggatgatgactccctgggaccaagtttgtcacctgaagctgtgctagcgcgtacagtggggagtacgtctactcctcgatcacggtgtacccctagggacgccttggaccttagcgatattaattcagaaccccctcgaggtagttttccctcatttgagccaagaaatctactttccttgtttgaagatacactggaccctacttag

SEQ ID NO: 316012 - protein, 132 aa, Artificial Sequence
  derived and/or modified sequence
MTAAASLLASLLPALPPLNLQDAKFVEERRKQLQNYLRSVMNKVIQMVPEFAASPKKETLIQLMPFFVMGLQVGMYGLFHFGVMMDQPQPSLTRADESPCDRVLSPCAAHRKQRDCCLSWKAEPERFLVKKK

SEQ ID NO: 316013 - protein, 249 aa, Artificial Sequence
  derived and/or modified sequence
MDEERSSMLPTMAAGPNSILFAINIDNKDLNGQSKFAPTVSDLLKESTQNVTLLKESTQGVSSVFREITASSAISILIKPEQETDPLPVVSRNVSADAKCKKERKKKKQVTNIISFDDEEDEQNSGDMFKKTPGAGESSEDNSDHSSVNIMSAFESPFGPNSNGSQSSNSWKIDSLSLNREFGYQKLDVKSIDDEDVDENEDDVYGNSSGRKHRGHSESPEKNGAHSVTQAGVQWHDLSSLQPLPPGFK

SEQ ID NO: 316014 - protein, 408 aa, Artificial Sequence
  derived and/or modified sequence
MHSWAPLKVLHNDSDILFPVSGVGSYSPADAPLGSLENGTGPEDHVLPDPGLRYSVEASSPGHGSPLSSLLPSASVPESMTISELRQATVAMMNRKDELEEENRSLRNLLDGEMEHSAALRQEVDTLKRKVAEQEERQGMKVQALARENEVLKVQLKKYVGAVQMLKREGQTAEVPNLWSVDGEVTVAEQKPGEIAEELASSYERKLIEVAEMHGELIEFNERLHRALVAKEALVSQMRQELIDLRGPVPGDLSQTSEDQSLSDFEISNRALINVWIPSVFLRGKAANAFHVYQVYIRIKDDEWNIYRRYTEFRSLHHKLQNKYPQVRAYNFPPKKAIGNKDAKFVEERRKQLQNYLRSVMNKVIQMVPEFAASPKKETLIQLMPFFVDWISLFGNGRDSSREEFSSS

SEQ ID NO: 316015 - DNA, 1227 bp, Artificial Sequence
  derived and/or modified sequence
atgcacagctgggcccccctgaaggtgctgcacaacgacagcgacatcctgttccccgtgagcggcgtgggcagctacagccccgccgacgcccccctgggcagcctggagaacggcaccggccccgaggaccacgtgctgcccgaccccggcctgagatacagcgtggaggccagcagccccggccacggcagccccctgagcagcctgctgcccagcgccagcgtgcccgagagcatgaccatcagcgagctgagacaggccaccgtggccatgatgaacagaaaggacgagctggaggaggagaacagaagcctgagaaacctgctggacggcgagatggagcacagcgccgccctgagacaggaggtggacaccctgaagagaaaggtggccgagcaggaggagagacagggcatgaaggtgcaggccctggccagagagaacgaggtgctgaaggtgcagctgaagaagtacgtgggcgccgtgcagatgctgaagagagagggccagaccgccgaggtgcccaacctgtggagcgtggacggcgaggtgaccgtggccgagcagaagcccggcgagatcgccgaggagctggccagcagctacgagagaaagctgatcgaggtggccgagatgcacggcgagctgatcgagttcaacgagagactgcacagagccctggtggccaaggaggccctggtgagccagatgagacaggagctgatcgacctgagaggccccgtgcccggcgacctgagccagaccagcgaggaccagagcctgagcgacttcgagatcagcaacagagccctgatcaacgtgtggatccccagcgtgttcctgagaggcaaggccgccaacgccttccacgtgtaccaggtgtacatcagaatcaaggacgacgagtggaacatctacagaagatacaccgagttcagaagcctgcaccacaagctgcagaacaagtacccccaggtgagagcctacaacttcccccccaagaaggccatcggcaacaaggacgccaagttcgtggaggagagaagaaagcagctgcagaactacctgagaagcgtgatgaacaaggtgatccagatggtgcccgagttcgccgccagccccaagaaggagaccctgatccagctgatgcccttcttcgtggactggatcagcctgttcggcaacggcagagacagcagcagagaggagttcagcagcagctag

SEQ ID NO: 316016 - DNA, 1227 bp, Artificial Sequence
  derived and/or modified sequence
atgcacagctgggcccccctgaaagtgctccacaacgatagtgatatcctgttccccgtctccggggtcggctcatattcaccagcagatgcaccactgggaagtctagagaatggtactggccctgaggatcacgtcctgcctgatcctggcctccgatacagtgtcgaagcttcaagccccggccatggaagccctttgagttcactcctccctagcgcttcagtacccgagtccatgactattagtgagcttagacaggcaactgttgcaatgatgaataggaaggatgaattagaggaagagaacaggtctctgcgaaacttgttggacggagaaatggaacactcagcagctctccggcaagaggttgataccctcaagcgcaaagtcgctgaacaggaagaacggcaaggtatgaaggttcaagctctcgctagggagaatgaggtcctcaaggttcagctcaaaaagtacgttggtgccgtgcagatgttgaaacgcgagggccagactgctgaagtgcccaacttatggtcagtcgacggggaggtaaccgttgctgaacagaaaccaggtgaaatcgccgaagaattagccagttcttacgaaaggaagcttatcgaggtggcagaaatgcacggcgagcttattgagtttaacgaacgactgcatcgagctctagttgccaaagaagctctggtgtcgcaaatgcgccaggagctaatagacctgagaggacctgtacctggagatctgagccagacatccgaagaccagagtctgtctgacttcgagatcagcaatcgcgcattaataaatgtttggatcccttccgtcttcctaagggggaaagccgctaatgctttccatgtttatcaggtgtatatcaggatcaaggacgacgagtggaatatttatcgcaggtacacagagtttcggagtttgcaccataagcttcagaacaaatacccgcaagttagagcttacaatttccctcccaagaaggccatcggaaacaaagacgccaagtttgtcgaggagagaagaaaacagctacagaactacctgaggagtgtgatgaataaagtaatacagatggtgcccgaattcgctgcaagtccgaagaaagagaccctgatccaactcatgcccttttttgtcgattggatctctctattcggtaatggcagggatagctcacgcgaggagtttagctcttcttag

SEQ ID NO: 316017 - DNA, 1227 bp, Artificial Sequence
  derived and/or modified sequence
atgcacagctgggcccccctgaaggtgctgcacaatgacagcgacatcctcttccctgtgtctggagtgggcagctacagccctgcagatgcccccctgggcagcctggagaatggcaccggcccagaagatcatgtgctgcctgaccccggcctgcgctacagcgtggaggccagcagccctggccacggcagccccctgagcagcctgctgcccagcgcctctgtgcctgagagcatgaccatcagcgagctgcggcaggccaccgtggccatgatgaacaggaaggatgagctggaggaggagaacagaagcctgaggaacctgctggatggagagatggagcacagcgctgccctgcggcaggaggtggacaccctgaagaggaaggtggccgagcaggaggagcggcagggcatgaaggtgcaggccctggcccgggagaatgaggtgctgaaggtgcagctgaagaagtatgtgggcgctgtgcagatgctgaagcgggagggccagacagctgaggtgcccaacctgtggagcgtggatggagaggtgacagtggccgagcagaagccaggagaaattgctgaggagctggccagcagctatgaaaggaagctgattgaggtggccgagatgcacggggagctgattgagttcaatgaaaggctgcaccgggccctggtggccaaggaggccctggtgtcccagatgaggcaggagctgattgacctgcggggccctgtgcctggggacctgagccagaccagcgaggaccagagcctgagtgactttgagatcagcaacagagccctgatcaacgtgtggatccccagcgtcttcctgcggggcaaggccgccaatgccttccacgtgtaccaggtgtacatccgcatcaaggatgatgagtggaacatctaccgccgctacacagagttccgcagcctgcaccacaagctgcagaacaagtacccccaggtgcgggcctacaacttcccccccaagaaggccatcggcaacaaggatgccaagtttgtggaggagaggaggaagcagctgcagaactacctgcggtctgtgatgaacaaggtgatccagatggtgcctgagtttgctgccagccccaagaaggagaccctcatccagctgatgcccttctttgtggactggatcagcctgtttggaaatggccgggacagcagccgggaggagttcagcagcagctag

SEQ ID NO: 316018 - DNA, 1227 bp, Artificial Sequence
  derived and/or modified sequence
atgcacagctgggcccccctgaaggtgctgcacaacgacagcgacatactgttccccgtgtcgggtgttggctcctatagtccagctgacgcgccccttgggtccctcgaaaacggaactgggccggaggatcatgtactccccgatccagggttgaggtactctgtcgaggcgagctcccccggtcacggaagcccgctctcatcactccttccgtcagcctccgtccctgagagtatgacaattagcgagcttagacaggcaaccgtcgctatgatgaaccgcaaggacgaacttgaagaggagaaccgtagtctaaggaacctgcttgatggggagatggagcacagtgcagctctcagacaggaggtggacaccctgaaacgcaaagtggccgagcaagaggagcggcagggtatgaaggtgcaagccctggcaagggaaaatgaggtgttgaaggtacagctgaagaagtacgtgggagccgtgcagatgctgaaaagggagggtcagaccgcagaggtgcctaatctctggtctgtcgacggcgaggtgactgtggccgagcaaaagcctggtgaaattgctgaggagcttgcttcctcttacgagcgtaaactgatcgaagttgcagagatgcatggagagttgatagaattcaatgagcgcctgcatagggccctggtcgcaaaagaggccctggtcagccaaatgagacaggaacttattgatttacggggacctgttcccggagacctgtctcagacttccgaggaccaatcgttgagcgattttgagatttctaatagggccttaattaacgtctggatcccaagcgtgttcctccgcgggaaagctgcaaacgctttccatgtgtatcaagtgtacatacgcatcaaggacgacgaatggaacatctatcggcgttacacagagttcagatccctgcatcacaagctccagaataagtatccacaggtaagggcctacaacttcccacctaagaaagcaatcgggaataaggatgcaaaattcgttgaggagcgccgcaaacagctccagaactatcttaggtcggtgatgaacaaagtgatacaaatggtgcctgagttcgccgcatcccctaagaaagaaaccctgattcaactgatgccctttttcgtcgactggataagtctctttggtaatgggagggattctagtagggaggagttctcgtcttcctag

SEQ ID NO: 316019 - DNA, 1227 bp, Artificial Sequence
  derived and/or modified sequence
atgcattcttgggctccgctcaaggtgctgcacaacgactctgacatcttatttccagtctcaggtgttggtagttatagccccgctgacgcaccactgggttctctggagaatggcaccgggcctgaggatcacgtgttgcccgatcctgggctgaggtatagcgtggaggcgtccagtccaggccatggtagtccactcagcagtctccttccttctgccagcgtgcccgagtcaatgaccatatctgagcttagacaagcaacagtagccatgatgaaccgaaaagacgaactcgaagaggagaaccggtccctcaggaacctgctagacggggaaatggaacactcagctgctctcagacaagaggtggacactctcaaaaggaaagtcgcagagcaagaggaacgacagggaatgaaagttcaggcacttgctagagaaaacgaagtgctgaaagtgcaactgaaaaagtatgttggagccgtccaaatgctgaagagggaaggccagacggccgaagtacccaatctgtggtctgtggatggcgaggtgaccgttgccgagcagaagccaggcgagattgccgaggagttggcaagttcatacgagcggaagctgattgaagttgccgagatgcatggcgagctaatcgaatttaatgagcgcctgcacagggccttagtagccaaagaggccctggtgtcacaaatgaggcaggagttgatcgacctaaggggacctgttcctggtgatttgagccagacctctgaggaccagagcttgtccgacttcgagatcagcaacagggccctgataaatgtgtggatcccttcagtgtttttgaggggcaaggctgccaatgcttttcacgtttaccaggtctacattaggataaaggacgatgagtggaacatttaccgcagatacaccgaattcagaagtctgcaccataagctccagaacaagtatccgcaggttcgcgcttataacttccctcctaagaaagccattggcaacaaggatgcaaagttcgtcgaggaaaggaggaaacaactccaaaattatctgaggtcagtgatgaacaaagtcatacagatggtccctgagttcgcagcaagccctaagaaggaaactttgattcagctcatgcccttctttgttgactggatatccctgtttggaaatggcagagactcatcgagagaggagttcagttcgagctag

SEQ ID NO: 316020 - DNA, 1283 bp, Artificial Sequence
  derived and/or modified sequence
ggggccactcggagtcgcccgagaagccactggaagggaacacctgcctctcccagatgcacagctgggctccgctgaaggtgctgcacaatgactccgacatcctcttccctgtcagtggcgtgggctcctacagcccagcagatgcccccctcggaagcctggagaacgggacaggaccagaggaccacgttctcccagatcctggacttcggtacagtgtggaagccagctctccaggccacggaagtcctctgagcagcctgttaccttctgcctcagtgccagagtccatgacaattagtgaactgcgccaggccactgtggccatgatgaacaggaaggatgagctggaggaggagaacagatcactgcgaaacctgctcgacggtgagatggagcactcagccgcgctccggcaagaggtggacaccttgaaaaggaaggtggctgaacaggaggagcggcagggcatgaaggtccaggcgctggccagagagaacgaggtgctcaaagtccaactgaagaaatatgtaggagctgtccagatgctgaaaagagaaggtcaaacagctgaagtgccaaatctttggagtgttgatggagaagttacagtagctgaacagaagccgggagaaattgctgaagaactcgcaagctcctacgaaagaaagctcatcgaggtggcagagatgcatggcgagctgattgagttcaacgagcgcctgcacagggccctggtagccaaggaagccctcgtgtcccagatgaggcaggagctcatcgatctccggggaccggtgcctggagatttgagtcaaacgtccgaagaccagagtttgtcggattttgaaatatcaaaccgggcgctgatcaacgtctggatcccctcagtgtttctccggggcaaagcagcaaatgcattccacgtgtatcaggtctacatccggataaaagacgatgaatggaatatttatcgccggtatacagagttcaggagtttgcaccacaagttacaaaacaagtaccctcaagtgagggcctacaacttcccacccaaaaaggccattggaaacaaggatgccaagtttgtggaggaacggagaaagcagctccagaattacctgcgcagcgtcatgaacaaagtcatccagatggtccccgagttcgctgccagccccaagaaggagaccctcatccagctgatgcccttcttcgtggactggatctcactgtttggaaatggccgcgatagttcacgtgaggagttctcatcctcttag

SEQ ID NO: 316021 - DNA, 428 bp, Artificial Sequence
  derived and/or modified sequence
atgactgcagcagcatccttgctggcctctctgcttcctgcattgcctcctctgaatcttcaggatgccaagtttgtggaggaacggagaaagcagctccagaattacctgcgcagcgtcatgaacaaagtcatccagatggtccccgagttcgctgccagccccaagaaggagaccctcatccagctgatgcccttcttcgtgatgggattacaggtcggaatgtacggattgtttcattttggggtaatgatggatcagccacagccaagccttacccgtgctgacgaatctccatgtgatcgtgtcctttctccatgtgctgcccacagaaagcagcgagactgctgtctcagctggaaagctgagcctgagagatttctggttaaaaaaaaataaaaaataaaaatctcctgcctaaggaaata

SEQ ID NO: 316022 - DNA, 399 bp, Artificial Sequence
  derived and/or modified sequence
atgaccgccgccgccagcctgctggccagcctgctgcccgccctgccccccctgaacctgcaggacgccaagttcgtggaggagagaagaaagcagctgcagaactacctgagaagcgtgatgaacaaggtgatccagatggtgcccgagttcgccgccagccccaagaaggagaccctgatccagctgatgcccttcttcgtgatgggcctgcaggtgggcatgtacggcctgttccacttcggcgtgatgatggaccagccccagcccagcctgaccagagccgacgagagcccctgcgacagagtgctgagcccctgcgccgcccacagaaagcagagagactgctgcctgagctggaaggccgagcccgagagattcctggtgaagaagaagtag

SEQ ID NO: 316023 - DNA, 399 bp, Artificial Sequence
  derived and/or modified sequence
atgaccgccgcggcatcactgttggccagcctgttgccggcgctccccccgctgaatcttcaggatgcgaagtttgtggaggagcgaagaaagcagctgcagaactatttaaggagtgttatgaacaaggtaatccagatggttccagagttcgctgcgagtcctaagaaggagacgctgattcagctcatgcccttttttgtaatgggactgcaggtggggatgtacgggctttttcacttcggtgtgatgatggatcaaccccagccttctctgaccagagccgatgagagcccctgtgaccgggtcctgtcaccatgtgcagcccataggaagcaaagagattgctgcctgtcctggaaggcagaacccgaaaggtttctggtgaagaagaaatag

SEQ ID NO: 316024 - DNA, 399 bp, Artificial Sequence
  derived and/or modified sequence
atgacagctgctgccagcctgctggccagcctgctgcctgccctgccccccctgaacctgcaggatgccaagtttgtggaggagaggaggaagcagctgcagaactacctgcggtctgtgatgaacaaggtgatccagatggtgcctgagtttgctgccagccccaagaaggagaccctcatccagctgatgcccttctttgtgatgggcctgcaggtgggcatgtatggcctcttccactttggagtgatgatggaccagccccagcccagcctgaccagggcagatgagagcccctgtgacagagtgctgagcccctgtgccgcccacaggaagcagagggactgctgcctgtcctggaaggccgagcctgagcgcttcctggtgaagaagaagtag

SEQ ID NO: 316025 - DNA, 399 bp, Artificial Sequence
  derived and/or modified sequence
atgaccgccgccgccagcctgctggccagcctgctgcccgccctgcccccactcaatctgcaggatgccaagtttgtcgaggagaggcggaagcagttacagaactatctcagaagcgtcatgaacaaggtgatccagatggtgccggaatttgcggcctctcctaagaaagagacattaatccaactgatgcctttctttgtgatggggctgcaggtgggaatgtatggacttttccacttcggggtaatgatggatcaaccccagccaagtctcacgcgcgccgatgagagcccgtgtgacagggtgctatctccttgtgccgcccatcgtaaacaacgggactgttgcctcagttggaaggcggagcctgaaagattcttggtgaagaagaagtag

SEQ ID NO: 316026 - DNA, 399 bp, Artificial Sequence
  derived and/or modified sequence
atgacagcggcagcctccctgttggcctcactcctgcccgctctgcccccactgaatctgcaagacgccaaatttgtcgaagagagaaggaagcagctgcagaactatttgcgcagcgtaatgaataaagtgatccagatggttcccgagtttgctgcttcccctaaaaaggagacactgattcagctcatgccttttttcgttatgggactccaagtcggtatgtacggcctatttcatttcggcgtcatgatggatcagccacaaccctcacttaccagagctgacgaatcaccctgcgaccgggtgctatctccctgcgcagcccatcgaaagcagcgcgactgctgcctgtcctggaaggccgaaccggaacgtttcctggttaagaaaaagtag

SEQ ID NO: 316027 - protein, 161 aa, Artificial Sequence
  derived and/or modified sequence
MSVPGPYQAATGPSSAPSAPPSYEETVAVNSYYPTPPAPMPGPTTGLVTGPDGKGMNPPSYYTQPAPIPNNNPITVQTVYVQHPITFLDRPIQMCCPSCNKMIVSQLSYNAGALTWLSCGSLCLLGCIAGCCFIPFCVDALQDVDHYCPNCRALLGTYKRL

SEQ ID NO: 316028 - DNA, 2642 bp, Artificial Sequence
  derived and/or modified sequence
gtttctctccctgcccccgcgacttcgcgcaagatccgggaaggacacccgaggcccctgggagaccctggggaggtgaaaatcagagagcgaagcgggccgtggcccctaggcctgacccctccccgcggggtaaggcgggcaccccgcgagcgcaggggtcctcttactgctgatggcacccagctctgggcccagacgccgctcaccgtccaccgccggtgctgggtaaaatgtcggttccaggaccttaccaggcggccactgggccttcctcagcaccatccgcacctccatcctatgaagagacagtggctgttaacagttattaccccacacctccagctcccatgcctgggccaactacggggcttgtgacggggcctgatgggaagggcatgaatcctccttcgtattatacccagccagcgcccatccccaataacaatccaattaccgtgcagacggtctacgtgcagcaccccatcacctttttggaccgccctatccaaatgtgttgtccttcctgcaacaagatgatcgtgagtcagctgtcctataacgccggtgctctgacctggctgtcctgcgggagcctgtgcctgctggggtgcatagcgggctgctgcttcatccccttctgcgtggatgccctgcaggacgtggaccattactgtcccaactgcagagctctcctgggcacctacaagcgtttgtaggactcagccagacgtggagggagccgggtgccgcaggaagtcctttccacctctcatccagcttcacgcctggtggaggttctgccctggtggtctcacctctccagggggcccaccttcatgtcttcttttggggggaatacgtcgcaaaactaacaaatctccaaaccccagaaattgctgcttggagtcgtgcataggacttgcaaagacattccccttgagtgtcagttccacggtttcctgcctccctgagaccctgagtcctgccatctaactgtgatcattgccctatccgaatatcttcctgtgatctgccatcagtggctcttttttcctgcttccatgggcctttctggtggcagtctcaaactgagaagccacagttgccttatttttgaggctgttctgcccagagctcggctgaaccagcctttagtgcctaccattatcttatccgtctcttcccgtccctgatgacaaagatcttgccttacagactttacaggcttggctttgagattctgtaactgcagacttcattagcacacagattcactttaatttcttaattttttttttaaatacaaggagggggctattaacacccagtacagacatatccacaaggtcgtaaatgcatgctagaaaaatagggctggatcttatcactgccctgtctccccttgtttctctgtgccagatcttcagtgcccctttccatacagggatttttttctcatagagtaattatatgaacagtttttatgacctccttttggtctgaaatacttttgaacagaatttcttttttttaaaaaaaaacagagatggggtcttactatgttgcccaggctggtgtcgaactcctgggctcaagcgatccttctgccttggcctcccgaagtgctgggattgcaggcataagctaccatgctgggcctgaacataatttcaagaggaggatttataaaaccattttctgtaatcaaatgattggtgtcattttcccatttgccaatgtagtctcacttaaaaaaaaaaaaaagaaaaagaaatggataatttcatctactgcctttacttggggttaatgtgattcttaaacaccttcatcatggaactctcagagtggggtccgttttggtttcctggtggtgggttttgaaagataagggaaagcacattttgagcatgtctgggtaccatggtgcggatgcttgggaaccagaactgtttcagaggaatctaaagtctgattttagttttcagagacacagcttgttgtaaaacatgagaagacatgatttctaggactcaagcagcaagccaggattctaggttggctgctgtgtcatctttgaagtcaagacaaagctgggctcgaccttcaagggtcctcgttttgataatacttcagaatagggaactcatgtgaatactactatgtagaaataaaacctagaccttgagcgaacatctgtatattggttgaaaacgatagtggtaaccattgatcccccttcatttgatgtttggaaaattccagtaattatcatttttgcaacgaatatggataccacatagtactttggtgttacctgcttttgaaaaataaagtctttggttcacccggtgaactatttatgagttcttttggtgtgaagaaagggctcatgttgcatttccagccattgctacaaagaacctttatttgttcagtaacggtagaaaatccttcccgattaaaaacttcagacttgctgaatatcctgcaatgtcaagatgaccgatgttgagttgggtggatttgctaacgagtcagatttgaacatgaggctattggaacccaataggcgtcattgatggcggcaagccatagctttcaagttttaataaaatgcacaaaagagaaaaaaaaaa

SEQ ID NO: 316029 - DNA, 2630 bp, Artificial Sequence
  derived and/or modified sequence
gtttctctccctgcccccgcgacttcgcgcaagatccgggaaggacacccgaggcccctgggagaccctggggaggtgaaaatcagagagcgaagcgggccgtggcccctaggcctgacccctccccgcggggtaaggcgggcaccccgcgagcgcaggggtcctcttactgctgatggcacccagctctgggcccagacgccgctcaccgtccaccgccggtgctgggtaaaatgtcggttccaggaccttaccaggcggccactgggccttcctcagcaccatccgcacctccatcctatgaagagacagtggctgttaacagttattaccccacacctccagctcccatgcctgggccaactacggggcttgtgacggggcctgatgggaagggcatgaatcctccttcgtattatacccagccagcgcccatccccaataacaatccaattaccgtgcagacggtctacgtgcagcaccccatcacctttttggaccgccctatccaaatgtgttgtccttcctgcaacaagatgatcgtgagtcagctgtcctataacgccggtgctctgacctggctgtcctgcgggagcctgtgcctgctggggtgcatagcgggctgctgcttcatccccttctgcgtggatgccctgcaggacgtggaccattactgtcccaactgcagagctctcctgggcacctacaagcgtttgtaggactcagccagacgtggagggagccgggtgccgcaggaagtcctttccacctctcatccagcttcacgcctggtggaggttctgccctggtggtctcacctctccagggggcccaccttcatgtcttcttttggggggaatacgtcgcaaaactaacaaatctccaaaccccagaaattgctgcttggagtcgtgcataggacttgcaaagacattccccttgagtgtcagttccacggtttcctgcctccctgagaccctgagtcctgccatctaactgtgatcattgccctatccgaatatcttcctgtgatctgccatcagtggctcttttttcctgcttccatgggcctttctggtggcagtctcaaactgagaagccacagttgccttatttttgaggctgttctgcccagagctcggctgaaccagcctttagtgcctaccattatcttatccgtctcttcccgtccctgatgacaaagatcttgccttacagactttacaggcttggctttgagattctgtaactgcagacttcattagcacacagattcactttaatttcttaattttttttttaaatacaaggagggggctattaacacccagtacagacatatccacaaggtcgtaaatgcatgctagaaaaatagggctggatcttatcactgccctgtctccccttgtttctctgtgccagatcttcagtgcccctttccatacagggatttttttctcatagagtaattatatgaacagtttttatgacctccttttggtctgaaatacttttgaacagaatttcttttttttaaaaaaaaacagagatggggtcttactatgttgcccaggctggtgtcgaactcctgggctcaagcgatccttctgccttggcctcccgaagtgctgggattgcaggcataagctaccatgctgggcctgaacataatttcaagaggaggatttataaaaccattttctgtaatcaaatgattggtgtcattttcccatttgccaatgtagtctcacttaaaaaaaaaaaaaagaaaaagaaatggataatttcatctactgcctttacttggggttaatgtgattcttaaacaccttcatcatggaactctcagagtggggtccgttttggtttcctggtggtgggttttgaaagataagggaaagcacattttgagcatgtctgggtaccatggtgcggatgcttgggaaccagaactgtttcagaggaatctaaagtctgattttagttttcagagacacagcttgttgtaaaacatgagaagacatgatttctaggactcaagcagcaagccaggattctaggttggctgctgtgtcatctttgaagtcaagacaaagctgggctcgaccttcaagggtcctcgttttgataatacttcagaatagggaactcatgtgaatactactatgtagaaataaaacctagaccttgagcgaacatctgtatattggttgaaaacgatagtggtaaccattgatcccccttcatttgatgtttggaaaattccagtaattatcatttttgcaacgaatatggataccacatagtactttggtgttacctgcttttgaaaaataaagtctttggttcacccggtgaactatttatgagttcttttggtgtgaagaaagggctcatgttgcatttccagccattgctacaaagaacctttatttgttcagtaacggtagaaaatccttcccgattaaaaacttcagacttgctgaatatcctgcaatgtcaagatgaccgatgttgagttgggtggatttgctaacgagtcagatttgaacatgaggctattggaacccaataggcgtcattgatggcggcaagccatagctttcaagttttaataaaatgcacaaaag

SEQ ID NO: 316030 - DNA, 1573 bp, Artificial Sequence
  derived and/or modified sequence
gagaggccagctcagacctcccggctcgacaggcggcgcgggcggcggtaaaatgtcggttccaggaccttaccaggcggccactgggccttcctcagcaccatccgcacctccatcctatgaagagacagtggctgttaacagttattaccccacacctccagctcccatgcctgggccaactacggggcttgtgacggggcctgatgggaagggcatgaatcctccttcgtattatacccagccagcgcccatccccaataacaatccaattaccgtgcagacggtctacgtgcagcaccccatcacctttttggaccgccctatccaaatgtgttgtccttcctgcaacaagatgatcgtgagtcagctgtcctataacgccggtgctctgacctggctgtcctgcgggagcctgtgcctgctgggtgtgcatagcgggctgctgcttcatccccttctgcgtggatgccctgcaggacgtggaccattactgtcccaactgcagagctctcctgggcacctacaagcgtttgtaggactcagccagacgtggagggagccgggtgccgcaggaagtcctttccacctctcatccagcttcacgcctggtggaggttctgccctggtggtctcacctctccagggggcccaccttcatgtcttcttttggggggaatacgtcgcaaaactaacaaatctccaaaccccagaaattgctgcttggagtcgtgcataggacttgcaaagacattccccttgagtgtcagttccacggtttcctgcctccctgagaccctgagtcctgccatctaactgtgatcattgccctatccgaatatcttcctgtgatctgccatcagtggctcttttttcctgcttccatgggcctttctggtggcagtctcaaactgagaagccacagttgccttatttttgaggctgttctgcccagagctcggctgaaccagcctttagtgcctaccattatcttatccgtctcttcccgtccctgatgacaaagatcttgccttacagactttacaggcttggctttgagattctgtaactgcagacttcattagcacacagattcactttaatttcttaattttttttttaaatacaaggagggggctattaacacccagtacagacatatccacaaggtcgtaaatgcatgctagaaaaatagggctggatcttatcactgccctgtctccccttgtttctctgtgccagatcttcagtgcccctttccatacagggatttttttctcatagagtaattatatgaacagtttttatgacctccttttggtctgaaatacttttgaacagaatttcttttttttaaaaaaaaacagagatggggtcttactatgttgcccaggctggtgtcgaactcctgggctcaagcgatccttctgccttggcctcccgaagtgctgggattgcaggcataagctaccatgctgggcctgaacataatttcaagaggaggatttataaaaccattttctgtaatcaaatgattggtgtcattttcccatttgccaatgtagtctcactt

SEQ ID NO: 316031 - DNA, 2357 bp, Artificial Sequence
  derived and/or modified sequence
gctaaaaactttaccatcttcccagttcactcccagtcggtcttaggagacaggaccgctattgtgcccattttgcagacaggaagccgagctcagagaggatgggtaacatgcccgaaggcacagagagtgtcttggtctgtccggacgcgtctgtagagttacaggaagagaagggccgccctccagagggccgggagcgccccagcgcgggtccggggtcgaggtaaaatgtcggttccaggaccttaccaggcggccactgggccttcctcagcaccatccgcacctccatcctatgaagagacagtggctgttaacagttattaccccacacctccagctcccatgcctgggccaactacggggcttgtgacggggcctgatgggaagggcatgaatcctccttcgtattatacccagccagcgcccatccccaataacaatccaattaccgtgcagacggtctacgtgcagcaccccatcacctttttggaccgccctatccaaatgtgttgtccttcctgcaacaagatgatcgtgagtcagctgtcctataacgccggtgctctgacctggctgtcctgcgggagcctgtgcctgctggggtgcatagcgggctgctgcttcatccccttctgcgtggatgccctgcaggacgtggaccattactgtcccaactgcagagctctcctgggcacctacaagcgtttgtaggactcagccagacgtggagggagccgggtgccgcaggaagtcctttccacctctcatccagcttcacgcctggtggaggttctgccctggtggtctcacctctccagggggcccaccttcatgtcttcttttggggggaatacgtcgcaaaactaacaaatctccaaaccccagaaattgctgcttggagtcgtgcataggacttgcaaagacattccccttgagtgtcagttccacggtttcctgcctccctgagaccctgagtcctgccatctaactgtgatcattgccctatccgaatatcttcctgtgatctgccatcagtggctcttttttcctgcttccatgggcctttctggtggcagtctcaaactgagaagccacagttgccttatttttgaggctgttctgcccagagctcggctgaaccagcctttagtgcctaccattatcttatccgtctcttcccgtccctgatgacaaagatcttgccttacagactttacaggcttggctttgagattctgtaactgcagacttcattagcacacagattcactttaatttcttaattttttttttaaatacaaggagggggctattaacacccagtacagacatatccacaaggtcgtaaatgcatgctagaaaaatagggctggatcttatcactgccctgtctccccttgtttctctgtgccagatcttcagtgcccctttccatacagggatttttttctcatagagtaattatatgaacagtttttatgacctccttttggtctgaaatacttttgaacagaatttcttttttttaaaaaaaaacagagatggggtcttactatgttgcccaggctggtgtcgaactcctgggctcaagcgatccttctgccttggcctcccgaagtgctgggattgcaggcataagctaccatgctgggcctgaacataatttcaagaggaggatttataaaaccattttctgtaatcaaatgattggtgtcattttcccatttgccaatgtagtctcacttaaaaaaaaaaaaaagaaaaagaaatggataatttcatctactgcctttacttggggttaatgtgattcttaaacaccttcatcatggaactctcagagtggggtccgttttggtttcctggtggtgggttttgaaagataagggaaagcacattttgagcatgtctgggtaccatggtgcggatgcttgggaaccagaactgtttcagaggaatctaaagtctgattttagttttcagagacacagcttgttgtaaaacatgagaagacatgatttctaggactcaagcagcaagccaggattctaggttggctgctgtgtcatctttgaagtcaagacaaagctgggctcgaccttcaagggtcctcgttttgataatacttcagaatagggaactcatgtgaatactactatgtagaaataaaacctagaccttgagcgaacatctgtatattggttgaaaacgatagtggtaaccattgatcccccttcatttgatgtttggaaaattccagtaattatcatttttgcaacgaatatggataccacatagtactttggtgttacctgcttttgaaaaataaagtctttggttcacccggtgaa

SEQ ID NO: 316032 - protein, 223 aa, Artificial Sequence
  derived and/or modified sequence
MPSRTGTSTLTVAVCKCNEQGEFTFCEDMAAQVGVSIQAVVAILLCILTITVITLLIFLRRRLRKQARAHGKSVPEIHEQLVTYDEEGGGEMDTTSYDVSVLNSVRRGGAKPPRPALDARPSLYAQVQKPPRHAPGAHGGPGEMAAMIEVKKDEADHDGDGPPYDTLHIYGYEGSESIAESLSSLGTDSSDSDVDYDFLNDWGPRFKMLAELYGSDPREELLY

SEQ ID NO: 316033 - protein, 525 aa, Artificial Sequence
  derived and/or modified sequence
MPSTCSKENMWARSSGSMQRQETCSPLRAQNRMTKYSILRGDYQDAFTIETNPAHNEGIIKPMKPLDYEYIQQYSFIVEATDPTIDLRYMSPPAGNRAQVIINITDVDEPPIFQQPFYHFQLKENQKKPLIGTVLAMDPDAARHSIGYSIRRTSDKGQFFRVTKKGDIYNEKELDREVYPWYNLTVEAKELDSTGTPTGKESIVQVHIEVLDENDNAPEFAKPYQPKVCENAVHGQLVLQISAIDKDITPRNVKFKFILNTENNFTLTDNHDNTANITVKYGQFDREHTKVHFLPVVISDNGMPSRTGTSTLTVAVCKCNEQGEFTFCEDMAAQVGVSIQAVVAILLCILTITVITLLIFLRRRLRKQARAHGKSVPEIHEQLVTYDEEGGGEMDTTSYDVSVLNSVRRGGAKPPRPALDARPSLYAQVQKPPRHAPGAHGGPGEMAAMIEVKKDEADHDGDGPPYDTLHIYGYEGSESIAESLSSLGTDSSDSDVDYDFLNDWGPRFKMLAELYGSDPREELLY

SEQ ID NO: 316034 - DNA, 369 bp, Artificial Sequence
  derived and/or modified sequence
atgaaggtggccctgctgcgcttcttcagcccccccaacatgtctgtgacccacaaggaggcccacgagaggaaatgtcctgagaagccagagctgtggaaggccggcagcacagtgcccctgacagcccctgagaagacagaccccttccccctgtgcccccccctgagcctgacctgcccccagcagcagagctgcatccccagcagcagccaggatgtgctgaacagcctgtgggtgagcagccactgcctgcagctgaagatcagcaagaccaagacccactgcctgcccacccagaatgtgctgcccttcctgctgcccacccctgtgtccatcgtgtgccgcctgcccggcctggacccctag

SEQ ID NO: 316035 - DNA, 507 bp, Artificial Sequence
  derived and/or modified sequence
atgaagggcaacaccaacagcgccgtgacccccgcccccaagtgccattggctagaggatctgccccccgtgcgcaggcagcaccgctgggtgctgtctcctttacggccagctgccttacgccggctgcagctgctttccgccgaccgacgacccctccgccgaacgggcgctccaccggcgcaggggccagcccagcatccctggagcagggggccccctcgtcgccctccaaggtctgtcaagctctgtagagcccaacagtggccagagacaagggcggatcccttgccagccggaacccgccagggcgagtctcccctgccgcgggggcgcagacccgacctgggccagggacggccctccgcgcgtcggcttccatctggtccctggacccacaggacgagaacacgggtgcggggcagtcttcgggctgccgcacggtcgcaaaatgctagaagaggaagtcctgctcgccaagccgccaagccaaagctggaggcttag

SEQ ID NO: 316036 - DNA, 881 bp, Artificial Sequence
  derived and/or modified sequence
atgtcctatccgcagggctacttgtaccagccgtccgcctcgctggcgctctactcgtgcccggcgtacagcaccagcgtcatttcggggccccgcacggatgagctcggccgctcttcttcgggctccgcgttctcgccctacgctggctcgactgccttcacggcgccctcgccgggctacaactcgcacctccagtacggcgccgaccccgcggccgccgccgccgccgccttctcctcgtacgtgctgttgaaaaaagaaaaaaagagccttgacttcccttgttttccccccttgcgcccaacgtgcgtccgctcccccgccgagcgcggagtcgcctcagttgcccaggcctctatctgcatggagggccgggccgccgtggccagatctgcgcacgggggctctccctacgcccaccgtgtcccgggcccatagccgggcaagccctaggaggcagccgggcgtcgccggccccggcgccgtcacgctcgccctcggcgcagtgtccttttccaggcgggacggtgctgtcccggcctctctactacaccgcgcccttctatcccggctacacgaactatggctccttcggacaccttcatggccacccggggcccgggccaggccccacaaccggtccggggtctcatttcaatggattaaaccagaccgtgttgaaccgagcggacgctttggctaaagacccgaaaatgttgcggagccagtctcagctagacctgtgcaaagactctccctatgaattgaagaaaggtatgtccgacatttaacgcgggctgcgtcggtcccggacttttctaatttattaaaaacatggccttggcagttatttttccatcaccgagagagagagacag

SEQ ID NO: 316037 - DNA, 180 bp, Artificial Sequence
  derived and/or modified sequence
atgacatccgttagcacgcagctttctctggtgctaatgtctctcctcctggtcctccccgttgtggaggccgtcgaggctggggacgccattgctctgctgctcggtgtcgtcttgtccatcaccggaatctgcgcttgtctcggagtttatgcaaggaaacggaatggacagatgtag

SEQ ID NO: 316038 - protein, 870 aa, Artificial Sequence
  derived and/or modified sequence
MASASSSRAGVALPFEKSQLTLKVVSAKPKVHNRQPRINSYVEVAVDGLPSETKKTGKRIGSSELLWNEIIILNVTAQSHLDLKVWSCHTLRNELLGTASVNLSNVLKNNGGKMENMQLTLNLQTENKGSVVSGGELTIFLDGPTVDLGNVPNGSALTDGSQLPSRDSSGTAVAPENRHQPPSTNCFGGRSRTHRHSGASARTTPATGEQSPGARSRHRQPVKNSGHSGLANGTVNDEPTTATDPEEPSVVGVTSPPAAPLSVTPNPNTTSLPAPATPAEGEEPSTSGTQQLPAAAQAPDALPAGWEQRELPNGRVYYVDHNTKTTTWERPLPPGWEKRTDPRGRFYYVDHNTRTTTWQRPTAEYVRNYEQWQSQRNQLQGAMQHFSQRFLYQSSSASTDHDPLGPLPPGWEKRQDNGRVYYVNHNTRTTQWEDPRTQGMIQEPALPPGWEMKYTSEGVRYFVDHNTRTTTFKDPRPGFESGTKQGSPGAYDRSFRWKYHQFRFLCHSNALPSHVKISVSRQTLFEDSFQQIMNMKPYDLRRRLYIIMRGEEGLDYGGIAREWFFLLSHEVLNPMYCLFEYAGKNNYCLQINPASSINPDHLTYFRFIGRFIAMALYHGKFIDTGFTLPFYKRMLNKRPTLKDLESIDPEFYNSIVWIKENNLEECGLELYFIQDMEILGKVTTHELKEGGESIRVTEENKEEYIMLLTDWRFTRGVEEQTKAFLDGFNEVAPLEWLRYFDEKELELMLCGMQEIDMSDWQKSTIYRHYTKNSKQIQWFWQVVKEMDNEKRIRLLQFVTGTCRLPVGGFAELIGSNGPQKFCIDKVGKETWLPRSHTCFNRLDLPPYKSYEQLREKLLYAIEETEGFGQE

SEQ ID NO: 316039 - protein, 754 aa, Artificial Sequence
  derived and/or modified sequence
MQLTLNLQTENKGSVVSGGELTIFLDGPTVDLGNVPNGSALTDGSQLPSRDSSGTAVAPENRHQPPSTNCFGGRSRTHRHSGASARTTPATGEQSPGARSRHRQPVKNSGHSGLANGTVNDEPTTATDPEEPSVVGVTSPPAAPLSVTPNPNTTSLPAPATPAEGEEPSTSGTQQLPAAAQAPDALPAGWEQRELPNGRVYYVDHNTKTTTWERPLPPGWEKRTDPRGRFYYVDHNTRTTTWQRPTAEYVRNYEQWQSQRNQLQGAMQHFSQRFLYQSSSASTDHDPLGPLPPGWEKRQDNGRVYYVNHNTRTTQWEDPRTQGMIQEPALPPGWEMKYTSEGVRYFVDHNTRTTTFKDPRPGFESGTKQGSPGAYDRSFRWKYHQFRFLCHSNALPSHVKISVSRQTLFEDSFQQIMNMKPYDLRRRLYIIMRGEEGLDYGGIAREWFFLLSHEVLNPMYCLFEYAGKNNYCLQINPASSINPDHLTYFRFIGRFIAMALYHGKFIDTGFTLPFYKRMLNKRPTLKDLESIDPEFYNSIVWIKENNLEECGLELYFIQDMEILGKVTTHELKEGGESIRVTEENKEEYIMLLTDWRFTRGVEEQTKAFLDGFNEVAPLEWLRYFDEKELELMLCGMQEIDMSDWQKSTIYRHYTKNSKQIQWFWQVVKEMDNEKRIRLLQFVTGTCRLPVGGFAELIGSNGPQKFCIDKVGKETWLPRSHTCFNRLDLPPYKSYEQLREKLLYAIEETEGFGQE

SEQ ID NO: 316040 - protein, 757 aa, Artificial Sequence
  derived and/or modified sequence
MENMQLTLNLQTENKGSVVSGGELTIFLDGPTVDLGNVPNGSALTDGSQLPSRDSSGTAVAPENRHQPPSTNCFGGRSRTHRHSGASARTTPATGEQSPGARSRHRQPVKNSGHSGLANGTVNDEPTTATDPEEPSVVGVTSPPAAPLSVTPNPNTTSLPAPATPAEGEEPSTSGTQQLPAAAQAPDALPAGWEQRELPNGRVYYVDHNTKTTTWERPLPPGWEKRTDPRGRFYYVDHNTRTTTWQRPTAEYVRNYEQWQSQRNQLQGAMQHFSQRFLYQSSSASTDHDPLGPLPPGWEKRQDNGRVYYVNHNTRTTQWEDPRTQGMIQEPALPPGWEMKYTSEGVRYFVDHNTRTTTFKDPRPGFESGTKQGSPGAYDRSFRWKYHQFRFLCHSNALPSHVKISVSRQTLFEDSFQQIMNMKPYDLRRRLYIIMRGEEGLDYGGIAREWFFLLSHEVLNPMYCLFEYAGKNNYCLQINPASSINPDHLTYFRFIGRFIAMALYHGKFIDTGFTLPFYKRMLNKRPTLKDLESIDPEFYNSIVWIKENNLEECGLELYFIQDMEILGKVTTHELKEGGESIRVTEENKEEYIMLLTDWRFTRGVEEQTKAFLDGFNEVAPLEWLRYFDEKELELMLCGMQEIDMSDWQKSTIYRHYTKNSKQIQWFWQVVKEMDNEKRIRLLQFVTGTCRLPVGGFAELIGSNGPQKFCIDKVGKETWLPRSHTCFNRLDLPPYKSYEQLREKLLYAIEETEGFGQE

SEQ ID NO: 316041 - protein, 342 aa, Artificial Sequence
  derived and/or modified sequence
MIQEPALPPGWEMKYTSEGVRYFVDHNTRTTTFKDPRPGFESGTKQGSPGAYDRSFRWKYHQFRFLCHSNALPSHVKISVSRQTLFEDSFQQIMNMKPYDLRRRLYIIMRGEEGLDYGGIAREWFFLLSHEVLNPMYCLFEYAGKNNYCLQINPASSINPDHLTYFRFIGRFIAMALYHGKFIDTGFTLPFYKRMLNKRPTLKDLESIDPEFYNSIVWIKENNLEECGLELYFIQDMEILGKVTTHELKEGGESIRVTEENKEEYIMLLTDWRFTRGVEEQTKAFLDGFNEVAPLEWLRYFDEKELELMLCGMQEIDATGRRAPSTGTTPRTASRSSGSGRW

SEQ ID NO: 316042 - protein, 431 aa, Artificial Sequence
  derived and/or modified sequence
MIQEPALPPGWEMKYTSEGVRYFVDHNTRTTTFKDPRPGFESGTKQGSPGAYDRSFRWKYHQFRFLCHSNALPSHVKISVSRQTLFEDSFQQIMNMKPYDLRRRLYIIMRGEEGLDYGGIAREWFFLLSHEVLNPMYCLFEYAGKNNYCLQINPASSINPDHLTYFRFIGRFIAMALYHGKFIDTGFTLPFYKRMLNKRPTLKDLESIDPEFYNSIVWIKENNLEECGLELYFIQDMEILGKVTTHELKEGGESIRVTEENKEEYIMLLTDWRFTRGVEEQTKAFLDGFNEVAPLEWLRYFDEKELELMLCGMQEIDMSDWQKSTIYRHYTKNSKQIQWFWQVVKEMDNEKRIRLLQFVTGTCRLPVGGFAELIGSNGPQKFCIDKVGKETWLPRSHTCFNRLDLPPYKSYEQLREKLLYAIEETEGFGQE

SEQ ID NO: 316043 - protein, 335 aa, Artificial Sequence
  derived and/or modified sequence
MASASSSRAGVALPFEKSQLTLKVVSAKPKVHNRQPRINSYVEVAVDGLPSETKKTGKRIGSSELLWNEIIILNVTAQSHLDLKVWSCHTLRNELLGTASVNLSNVLKNNGGKMENMQLTLNLQTENKGSVVSGGELTIFLDGPTVDLGNVPNGSALTDGSQLPSRDSSGTAVAPENRHQPPSTNCFGGRSRTHRHSGASARTTPATGEQSPGARSRHRQPVKNSGHSGLANGTVNDEPTTATDPEEPSVVGVTSPPAAPLSVTPNPNTTSLPAPATPAEGEEPSTSGTQQLPAAAQAPDALPAGWEQRELPNGRVYYVDHNTKTTTWERPLPPG

SEQ ID NO: 316044 - DNA, 2613 bp, Artificial Sequence
  derived and/or modified sequence
atggccagcgccagcagcagcagagccggcgtggccctgcccttcgagaagagccagctgaccctgaaggtggtgagcgccaagcccaaggtgcacaacagacagcccagaatcaacagctacgtggaggtggccgtggacggcctgcccagcgagaccaagaagaccggcaagagaatcggcagcagcgagctgctgtggaacgagatcatcatcctgaacgtgaccgcccagagccacctggacctgaaggtgtggagctgccacaccctgagaaacgagctgctgggcaccgccagcgtgaacctgagcaacgtgctgaagaacaacggcggcaagatggagaacatgcagctgaccctgaacctgcagaccgagaacaagggcagcgtggtgagcggcggcgagctgaccatcttcctggacggccccaccgtggacctgggcaacgtgcccaacggcagcgccctgaccgacggcagccagctgcccagcagagacagcagcggcaccgccgtggcccccgagaacagacaccagccccccagcaccaactgcttcggcggcagaagcagaacccacagacacagcggcgccagcgccagaaccacccccgccaccggcgagcagagccccggcgccagaagcagacacagacagcccgtgaagaacagcggccacagcggcctggccaacggcaccgtgaacgacgagcccaccaccgccaccgaccccgaggagcccagcgtggtgggcgtgaccagcccccccgccgcccccctgagcgtgacccccaaccccaacaccaccagcctgcccgcccccgccacccccgccgagggcgaggagcccagcaccagcggcacccagcagctgcccgccgccgcccaggcccccgacgccctgcccgccggctgggagcagagagagctgcccaacggcagagtgtactacgtggaccacaacaccaagaccaccacctgggagagacccctgccccccggctgggagaagagaaccgaccccagaggcagattctactacgtggaccacaacaccagaaccaccacctggcagagacccaccgccgagtacgtgagaaactacgagcagtggcagagccagagaaaccagctgcagggcgccatgcagcacttcagccagagattcctgtaccagagcagcagcgccagcaccgaccacgaccccctgggccccctgccccccggctgggagaagagacaggacaacggcagagtgtactacgtgaaccacaacaccagaaccacccagtgggaggaccccagaacccagggcatgatccaggagcccgccctgccccccggctgggagatgaagtacaccagcgagggcgtgagatacttcgtggaccacaacaccagaaccaccaccttcaaggaccccagacccggcttcgagagcggcaccaagcagggcagccccggcgcctacgacagaagcttcagatggaagtaccaccagttcagattcctgtgccacagcaacgccctgcccagccacgtgaagatcagcgtgagcagacagaccctgttcgaggacagcttccagcagatcatgaacatgaagccctacgacctgagaagaagactgtacatcatcatgagaggcgaggagggcctggactacggcggcatcgccagagagtggttcttcctgctgagccacgaggtgctgaaccccatgtactgcctgttcgagtacgccggcaagaacaactactgcctgcagatcaaccccgccagcagcatcaaccccgaccacctgacctacttcagattcatcggcagattcatcgccatggccctgtaccacggcaagttcatcgacaccggcttcaccctgcccttctacaagagaatgctgaacaagagacccaccctgaaggacctggagagcatcgaccccgagttctacaacagcatcgtgtggatcaaggagaacaacctggaggagtgcggcctggagctgtacttcatccaggacatggagatcctgggcaaggtgaccacccacgagctgaaggagggcggcgagagcatcagagtgaccgaggagaacaaggaggagtacatcatgctgctgaccgactggagattcaccagaggcgtggaggagcagaccaaggccttcctggacggcttcaacgaggtggcccccctggagtggctgagatacttcgacgagaaggagctggagctgatgctgtgcggcatgcaggagatcgacatgagcgactggcagaagagcaccatctacagacactacaccaagaacagcaagcagatccagtggttctggcaggtggtgaaggagatggacaacgagaagagaatcagactgctgcagttcgtgaccggcacctgcagactgcccgtgggcggcttcgccgagctgatcggcagcaacggcccccagaagttctgcatcgacaaggtgggcaaggagacctggctgcccagaagccacacctgcttcaacagactggacctgcccccctacaagagctacgagcagctgagagagaagctgctgtacgccatcgaggagaccgagggcttcggccaggagtag

SEQ ID NO: 316045 - DNA, 2274 bp, Artificial Sequence
  derived and/or modified sequence
atggagaacatgcagctgaccctgaacctgcagaccgagaacaagggcagcgtggtgagcggcggcgagctgaccatcttcctggacggccccaccgtggacctgggcaacgtgcccaacggcagcgccctgaccgacggcagccagctgcccagcagagacagcagcggcaccgccgtggcccccgagaacagacaccagccccccagcaccaactgcttcggcggcagaagcagaacccacagacacagcggcgccagcgccagaaccacccccgccaccggcgagcagagccccggcgccagaagcagacacagacagcccgtgaagaacagcggccacagcggcctggccaacggcaccgtgaacgacgagcccaccaccgccaccgaccccgaggagcccagcgtggtgggcgtgaccagcccccccgccgcccccctgagcgtgacccccaaccccaacaccaccagcctgcccgcccccgccacccccgccgagggcgaggagcccagcaccagcggcacccagcagctgcccgccgccgcccaggcccccgacgccctgcccgccggctgggagcagagagagctgcccaacggcagagtgtactacgtggaccacaacaccaagaccaccacctgggagagacccctgccccccggctgggagaagagaaccgaccccagaggcagattctactacgtggaccacaacaccagaaccaccacctggcagagacccaccgccgagtacgtgagaaactacgagcagtggcagagccagagaaaccagctgcagggcgccatgcagcacttcagccagagattcctgtaccagagcagcagcgccagcaccgaccacgaccccctgggccccctgccccccggctgggagaagagacaggacaacggcagagtgtactacgtgaaccacaacaccagaaccacccagtgggaggaccccagaacccagggcatgatccaggagcccgccctgccccccggctgggagatgaagtacaccagcgagggcgtgagatacttcgtggaccacaacaccagaaccaccaccttcaaggaccccagacccggcttcgagagcggcaccaagcagggcagccccggcgcctacgacagaagcttcagatggaagtaccaccagttcagattcctgtgccacagcaacgccctgcccagccacgtgaagatcagcgtgagcagacagaccctgttcgaggacagcttccagcagatcatgaacatgaagccctacgacctgagaagaagactgtacatcatcatgagaggcgaggagggcctggactacggcggcatcgccagagagtggttcttcctgctgagccacgaggtgctgaaccccatgtactgcctgttcgagtacgccggcaagaacaactactgcctgcagatcaaccccgccagcagcatcaaccccgaccacctgacctacttcagattcatcggcagattcatcgccatggccctgtaccacggcaagttcatcgacaccggcttcaccctgcccttctacaagagaatgctgaacaagagacccaccctgaaggacctggagagcatcgaccccgagttctacaacagcatcgtgtggatcaaggagaacaacctggaggagtgcggcctggagctgtacttcatccaggacatggagatcctgggcaaggtgaccacccacgagctgaaggagggcggcgagagcatcagagtgaccgaggagaacaaggaggagtacatcatgctgctgaccgactggagattcaccagaggcgtggaggagcagaccaaggccttcctggacggcttcaacgaggtggcccccctggagtggctgagatacttcgacgagaaggagctggagctgatgctgtgcggcatgcaggagatcgacatgagcgactggcagaagagcaccatctacagacactacaccaagaacagcaagcagatccagtggttctggcaggtggtgaaggagatggacaacgagaagagaatcagactgctgcagttcgtgaccggcacctgcagactgcccgtgggcggcttcgccgagctgatcggcagcaacggcccccagaagttctgcatcgacaaggtgggcaaggagacctggctgcccagaagccacacctgcttcaacagactggacctgcccccctacaagagctacgagcagctgagagagaagctgctgtacgccatcgaggagaccgagggcttcggccaggagtag

SEQ ID NO: 316046 - DNA, 2613 bp, Artificial Sequence
  derived and/or modified sequence
atggccagcgcttccagcagcagagccggcgtggccttgccattcgagaagtcgcaactgactctaaaagtagtgtccgctaagccgaaggtgcataatcggcagccacgcattaactcatatgttgaagttgcagttgatggattgccaagtgagacaaaaaaaacaggtaagcggataggaagcagcgagcttctgtggaacgaaatcattattctaaatgtcactgctcagtcacaccttgatcttaaggtttggagctgtcataccttgcggaacgaactgctaggaaccgcatcagtcaatttaagcaatgtgctgaagaacaacgggggcaagatggaaaatatgcagcttacattaaatctgcagaccgagaataaaggatccgtggtgtccgggggtgagctgacaatctttctggatggccccaccgtggacctggggaacgtccccaacggctcagccctcactgacggtagccagctgccgtcgcgcgatagctcagggacagctgtggcacctgaaaaccggcaccagccgccttcaaccaactgctttggcggccgcagcaggactcacaggcactcaggggcatccgctagaacaactcccgcaaccggcgaacagagccccggagccaggtctcggcatagacagcccgtgaagaacagcggccattcgggactcgccaatgggaccgttaacgatgagccaaccactgcaactgacccagaagagcctagcgtggtgggtgtcacctctcctccagctgctcccttgtccgtcaccccaaatccaaacacaacctctttgcctgcaccagcaacccctgctgagggagaggaaccctctacttctgggactcagcagctgcccgccgccgctcaagcccctgatgcactccctgccgggtgggagcaacgtgaactgccaaacggccgagtgtattatgttgatcacaacactaagaccacaacctgggagcggccgctcccgcccggctgggaaaagcgtaccgatccaagagggagattctattacgtggaccataacacccgcacaaccacctggcaacgccccaccgcagaatatgtgagaaattacgaacaatggcagtcccagcgaaaccaactgcagggcgctatgcagcatttttcccagcggttcctgtatcagtccagcagcgcaagtacagatcacgatcctctgggcccgctccctcccggctgggaaaagcgacaggacaatggcagagtctattatgttaaccacaatacaagaacaacacagtgggaggacccacggacccagggcatgattcaagaacctgcgttgccaccagggtgggaaatgaagtatacctccgagggagtgagatacttcgttgaccacaacacacggaccactacattcaaggacccccgtcctggtttcgaatccggcacaaaacaaggatctccgggcgcctatgatcgatctttcaggtggaagtatcatcagttcaggtttctttgtcattccaacgccctgccctcacacgtgaaaatctccgtctctcgccagacactttttgaagactctttccagcaaatcatgaatatgaagccttatgacctccggagacgcctgtatatcatcatgaggggtgaagaaggactggactatggcggcattgctcgggagtggttcttcctgctcagccatgaggtactaaatccaatgtattgcctgtttgaatatgcagggaagaataattattgccttcagatcaatcctgcttcttctattaatccagaccacctgacctatttccgtttcatcgggaggttcatcgctatggcactgtatcacgggaagttcattgatacaggctttacacttccattctacaagcggatgctgaacaaacggcccacattaaaggacctcgaatccattgatccagagttctataatagcatagtctggattaaagaaaataatctggaggagtgcggcctggagctgtacttcattcaggacatggaaatcttgggcaaggtcacgacccacgagttgaaggagggtggtgaatcgatcagagtaactgaggagaacaaagaggaatacattatgctattgaccgattggcgcttcacacgtggcgtggaggaacagactaaagcttttttagatggatttaacgaagtggcccccctagaatggctgagatactttgatgagaaagagttagagttgatgctctgcggaatgcaggagatcgatatgtccgactggcagaaaagtacaatctaccggcactacacaaagaactccaaacagatacagtggttttggcaagttgtgaaggaaatggacaatgagaagcgcattaggcttctccagtttgtcacaggcacttgccggctgccggtgggcgggttcgcagaactgatcgggtccaacggcccacaaaagttctgcatagacaaagtcggcaaggagacttggctccctagatctcatacctgtttcaatagattagacctccctccttataagtcctacgagcaactgcgggaaaagttactgtacgccatcgaggagactgagggctttggacaagaatag

SEQ ID NO: 316047 - DNA, 2613 bp, Artificial Sequence
  derived and/or modified sequence
atggcctcagcgtcctccagccgggcaggtgtggcgctgcccttcgaaaagagccaactgacactgaaggtcgtctctgccaagcccaaagttcacaaccggcagccacgaatcaattcatacgttgaagttgccgtggatggcttaccttctgaaaccaagaaaactggcaagcgcattggttctagtgaactcctttggaacgaaattatcatcttgaacgtcactgcccagtcccatcttgacctgaaggtgtggagctgtcacaccctacggaacgagttactgggcacagcctccgtcaatctgtctaatgtcttgaaaaacaatggagggaagatggagaacatgcagttgaccttgaacctgcaaacggaaaataaggggagtgtggtttctggtggcgaactgaccatctttctggatggtccaacagtggacctcggtaacgttcctaatggttccgcgctgacagacggctcacaactgccctcaagggactcatctggcactgcagtcgctcctgaaaatagacaccaacctcctagtacaaattgctttgggggcaggtcacgaactcaccgccattccggagcctccgcccgcactactccagctactggagagcaaagccccggcgccaggtctcgccaccggcagcccgtcaagaactctggtcattctggccttgctaacggtactgtgaacgacgagcctactactgctaccgatcctgaggagcccagcgtggtgggagtgaccagccctcccgccgcccccctgtccgtgaccccaaaccccaatacaaccagcttgccagccccagcaacccccgctgagggagaggagccttctacttccggcacccagcagctccctgccgccgcacaggctccagacgcgttgcccgcaggctgggaacagagggagctgcctaatggtagagtatattatgtggaccataacactaaaaccactacctgggagaggccccttccgcccggatgggaaaagaggacagacccccggggtaggttttactacgtggatcataatactcgcaccactacgtggcagaggcccaccgcagaatatgttagaaactacgagcagtggcagtctcaacggaaccagctgcagggcgccatgcagcacttcagccagcggtttctctatcagtcctctagtgcttccacagaccacgatcctctgggtcccttacctccagggtgggagaaacggcaggataatggtcgagtctactatgttaatcataatactaggacaactcaatgggaagaccctaggacccaaggtatgattcaagagccagctctcccgcctggttgggaaatgaagtatacatcagaaggtgttcgctattttgttgaccataacacacggacaaccaccttcaaagaccctcgacctggattcgaaagcggaaccaaacaggggtcccccggcgcctacgaccggtctttccgctggaagtatcaccaatttcgctttctgtgccactctaatgcactgccttcacacgtgaagatctcggtgagtaggcagacactgttcgaggatagcttccagcagatcatgaatatgaagccttacgatttgagacgcagactctacattattatgcgtggcgaggaaggtctggactatggaggcatcgcccgggagtggttcttcctcctgagccatgaggtgctgaacccgatgtactgcctgttcgaatatgccggaaaaaataattattgcctacagattaaccccgcctcttctattaatccagaccacttgacctatttccggttcatagggcgattcatcgccatggctctgtatcacggcaagttcattgacactggctttacactgccattctacaagaggatgcttaacaaacggcccacgctgaaagatctggaatcgatcgacccagaattctacaacagcatcgtttggatcaaagaaaacaatctggaagagtgtgggttggaattgtacttcattcaagacatggagattctgggcaaagtcactacccacgagttgaaagagggcggcgagtcaattagggtgaccgaggagaacaaggaggagtacattatgctgcttacagactggaggtttacccggggtgtggaagagcagaccaaggcgttcttggatggcttcaacgaggtcgctccactcgagtggctgagatacttcgacgaaaaagaattggagctgatgctctgtggcatgcaagagatcgacatgagcgattggcaaaagagcactatctaccgccactatactaagaattccaagcagatccagtggttctggcaagtggtgaaggaaatggataacgagaaacgaattagactactgcagttcgtgaccggaacgtgccgcctgcccgtgggcgggtttgcagagcttatcggctcaaacgggccacagaaattttgtatcgataaagttggtaaggaaacttggctcccacgatcccacacctgctttaatcgtttggacctgcctccttataagtcttatgagcagctgcgggaaaaactgctctatgcaatcgaggagaccgagggcttcggccaggagtag

SEQ ID NO: 316048 - DNA, 2613 bp, Artificial Sequence
  derived and/or modified sequence
atggcttctgccagctccagccgcgccggcgtcgccctgccttttgagaagtcacagttgactctgaaagtggttagcgctaagccaaaagtgcataataggcagccaaggatcaacagttatgtggaggtggcagtcgatgggctgcccagcgaaactaagaagacgggaaagcgcattggcagctcagaactactgtggaatgaaatcattatcttgaacgtcacagcccagagccatctggacctgaaggtgtggtcgtgccatacccttaggaatgagctgttgggcaccgcctccgtgaatctgtctaacgtgctgaaaaacaacggggggaagatggagaacatgcaactgacactgaatctgcaaacagaaaacaaaggcagtgtggtctcagggggtgagctgaccattttcctggatggacctacagtcgatctgggaaatgtcccaaatggctccgctctaacagacggctcacaattgcctagtagggacagtagcggaaccgctgtcgcacccgagaatcggcatcagccaccaagcactaattgcttcggcggacgatctaggacacacagacactctggtgccagcgcccgcacaacaccagccaccggtgagcagagcccaggggcgaggtctcgccacaggcagcctgtaaagaactcggggcactctggcctcgcaaatgggacagtgaatgacgagccaaccaccgctactgacccagaggagcccagcgtggtcggcgtgacctcaccccccgccgcccctttgagcgtaacgccaaaccccaatacgaccagtttgcccgccccagcgactcccgccgaaggtgaggaaccaagcaccagcggcacacagcaactgcccgcagccgctcaagccccagacgctctaccagccggctgggaacagcgggagcttccaaatgggcgggtttactacgttgatcataatactaagacgactacgtgggagaggccactacctcctggatgggagaagcggacggacccccgcggccgcttttattatgtagaccataacacccgcaccacaacttggcagcggccaacagctgagtacgtgaggaactacgagcaatggcaatcacaacgcaaccagctgcagggtgcaatgcagcacttttcccagagattcttataccaatctagttcagcatctacagaccatgatcccttggggcctttacccccagggtgggaaaagcgtcaggacaacgggcgggtgtactatgttaatcataatacacggacaacacagtgggaggacccaaggacacagggtatgatacaggagcctgcgcttccacctgggtgggagatgaaatacacctcggagggagtacgctacttcgtggatcacaacacacgtaccaccactttcaaggaccctagacccggcttcgagtctgggaccaaacagggcagccccggggcctatgatcggtcatttcggtggaagtatcatcagttccgtttcctgtgccactcaaacgctctgcccagtcatgtaaagatctctgtgtcccggcagaccttgttcgaagactcatttcagcaaatcatgaacatgaagccttacgacctgaggagacgcctgtatatcataatgcggggcgaggagggactggactatggcggcatcgcccgggagtggttcttccttctctcacacgaggtgttgaacccaatgtattgcctctttgagtacgctgggaagaacaattattgcctgcaaatcaacccggcctcatctattaatcctgatcacttgacctatttcagattcattggcagattcatcgcaatggccctgtaccatggaaaattcatcgatactgggttcacattaccattttacaagcgaatgcttaacaaaaggcctacgctcaaggacctggagtcgattgaccccgagttctacaacagtatagtttggatcaaggagaacaacttggaagaatgtggcctggagctgtattttattcaggatatggaaatactgggtaaggtgaccacccacgaactgaaggagggcggggagtccatcagagtgaccgaggagaataaagaggaatatatcatgctgcttactgactggcgctttacaaggggagtggaggagcagactaaggccttcctggatggttttaatgaggtggctcccctagaatggctgcggtactttgacgagaaggagctcgagttgatgctttgcggtatgcaagaaatcgatatgtcagattggcagaagagcaccatatatcggcactatacaaagaatagtaagcagatccagtggttctggcaggttgtgaaagagatggacaacgagaagcgcattcgactcctacaatttgttacaggcacctgtagactgccagtggggggatttgcggaacttatcgggtcgaacggaccacagaaattctgcattgacaaggttggtaaagagacatggctgccaaggagccacacctgctttaacagactggacctgcccccctataagtcttacgaacagctccgtgaaaaactgctttacgctatagaagaaacagaggggttcggtcaggagtag

SEQ ID NO: 316049 - DNA, 2274 bp, Artificial Sequence
  derived and/or modified sequence
atggagaatatgcagcttactctgaatttgcagaccgaaaacaagggctctgtagtgtcaggtggagagctgacgatctttctggatggaccaaccgtcgatctgggtaacgttccaaacggttccgccctgacggacggatctcagctgccgagtcgcgatagtagtggcacagccgttgctccagaaaatagacatcagccaccctcgactaattgctttggaggacggagtcgcactcacaggcattctggagctagtgcacggactacccccgctacgggtgaacagtctccgggcgcgcgtagccgccaccggcagcctgtgaaaaacagcggccacagtgggctggcaaatggcaccgttaatgatgagcctacaacagcaaccgacccagaagagccttcggtagttggggtcacatccccgcccgccgctcctctgagcgtcacacctaaccctaatacaaccagcctccctgcccccgccacaccggccgagggggaggagccgtccactagcggaacccagcagctaccagcagcagcacaggctccagacgccctgcctgcaggctgggaacagagggagctcccaaatggccgcgtgtactatgtcgatcataatacaaagaccactacttgggaacgcccactcccgcccggttgggaaaaacgcaccgaccctcggggccggttctattatgttgaccacaatactagaactactacctggcagaggccaacagccgagtatgtccggaactatgagcaatggcagtcccagagaaaccagctccagggagccatgcagcacttctcacaacgcttcctgtaccagtctagctcggcatctacggatcacgacccactgggccctctccctccgggctgggagaagagacaagataatggcagggtgtactacgttaaccacaacactcgcacaacccagtgggaagatcctcgtacacaaggaatgatccaggagcctgccctgcctcctggctgggagatgaaatacacttccgagggagtaagatatttcgtagaccacaataccagaaccacaacgtttaaggatccgcggcccggcttcgaatcaggtaccaaacaggggtcccccggcgcctatgaccgaagttttagatggaaataccaccaatttcggtttctttgccactctaatgccctgcctagtcacgttaaaatatcagtgtcccgccagacgcttttcgaagactcatttcagcagataatgaacatgaaaccctacgatctgagacgcagactgtacatcattatgagaggcgaagagggccttgactatggtggaatcgcccgcgaatggttttttctgcttagccatgaggtgctcaatccaatgtactgcctctttgaatacgccgggaagaataactactgcttgcagatcaatccagcaagtagcattaatcccgaccacctcacgtacttccgattcatcggcaggtttattgctatggccctctatcacggtaagtttattgacacaggctttacactgccattttataaacgcatgctgaataaaagacccactctgaaggaccttgaatccattgacccagagttttataacagcatcgtgtggattaaggagaataaccttgaggaatgcggcttggaactctactttattcaagacatggagattctggggaaggtgacaacccacgaacttaaagagggcggcgagtccatccgtgtcacagaagaaaacaaagaggaatatattatgctccttacagattggaggttcactcgcggcgtagaggaacagaccaaagccttccttgacggattcaatgaggtcgctcctctggaatggttaaggtattttgacgaaaaagaactggagcttatgctatgtggcatgcaggagattgatatgagcgactggcagaagagcactatctatcggcactacacaaaaaactctaagcagatccagtggttttggcaggtggtgaaagagatggataatgagaagaggatcaggctgctgcaattcgtgactggaacctgtcgcttgccggtggggggcttcgccgagctgattggttcaaatggccctcagaagttctgtatcgataaagtgggaaaagaaacttggttgccaagatcccatacctgcttcaacaggctcgatcttcctccctataaatcttatgaacagttgcgcgaaaaattgctgtacgcaatagaggagactgaaggctttggccaggaatag

SEQ ID NO: 316050 - DNA, 2613 bp, Artificial Sequence
  derived and/or modified sequence
atggccagcgccagcagcagcagagctggggtggccctgccctttgagaagagccagctgaccctgaaggtggtgtctgccaagcccaaggtgcacaaccggcagccccgcatcaacagctatgtggaggtggccgtggatggcctgcccagcgagaccaagaagacaggcaagagaattggcagcagcgagctgctgtggaatgagatcatcatcctgaatgtgacagcccagagccacctggacctgaaggtgtggagctgccacaccctgagaaatgagctgctgggcacagcctctgtgaacctgagcaatgtgctgaagaacaacggcggcaagatggagaacatgcagctgaccctgaacctgcagacagagaacaagggctctgtggtgtctggaggagagctgaccatcttcctggatggccccaccgtggacctgggcaatgtgcccaatggaagtgccctgacagatggcagccagctgcccagccgggacagcagcggcacagctgtggcccctgagaacagacaccagccccccagcaccaactgctttggaggccgcagcaggacccaccgccacagcggggccagcgcccggaccaccccagccactggagagcagagccctggggcccggagccgccaccggcagcctgtgaagaacagcggccacagcggcctggccaacggcaccgtgaatgatgagcccaccacagccacagatcctgaggagcccagcgtggtgggcgtgaccagccccccagctgcccccctgtctgtgacccccaaccccaacaccaccagcctgcctgccccagccaccccagctgagggggaggagcccagcaccagcggcacccagcagctgcctgctgctgcccaggccccagatgccctgcctgctggctgggagcagcgggagctgcccaacggccgggtgtactacgtggaccacaacaccaagaccaccacctgggagcggcccctgcccccaggctgggagaagaggacagacccccggggccgcttctactacgtggaccacaacaccaggaccaccacctggcagaggcccacagcagaatatgtgagaaattatgagcagtggcagagccagaggaaccagctgcagggcgccatgcagcacttcagccagcgcttcctgtaccagagcagcagcgccagcacagaccatgaccccctgggccccctgcccccaggctgggagaagaggcaggacaatggccgggtgtactacgtgaaccacaacaccaggaccacccagtgggaggaccccaggacccagggcatgatccaggagcccgccctgcccccaggctgggagatgaagtacaccagcgagggcgtgcgctactttgtggaccacaacaccaggaccaccaccttcaaggaccccaggcctggctttgaaagtggcaccaagcagggcagccctggggcctatgacaggagcttccgctggaagtaccaccagttccgcttcctgtgccacagcaatgccctgcccagccacgtgaagatctctgtgtcccggcagaccctgtttgaggacagcttccagcagatcatgaacatgaagccctatgacctgcggcggcggctgtacatcatcatgagaggagaggagggcctggactatggaggcatcgcccgggagtggttcttcctgctgagccatgaggtgctgaaccccatgtactgcctgtttgaatatgctgggaagaacaactactgcctgcagatcaacccagccagcagcatcaacccagaccacctgacctacttccgcttcatcggccgcttcatcgccatggccctgtaccacggcaagttcatcgacaccggcttcaccctgcccttctacaagaggatgctgaacaagaggcccaccctgaaggacctggagagcattgatcctgagttctacaacagcatcgtgtggatcaaggagaacaacctggaggagtgtggcctggagctgtacttcatccaggacatggagatcctgggcaaggtgaccacccatgagctgaaggagggcggggagagcatccgggtgacagaggagaacaaggaggagtacatcatgctgctgacagactggaggttcacccggggcgtggaggagcagaccaaggccttcctggatggcttcaatgaggtggcccccctggagtggctgcgctactttgatgagaaggagctggagctgatgctgtgtggcatgcaggagattgacatgtctgactggcagaagagcaccatctaccgccactacaccaagaacagcaagcagatccagtggttctggcaggtggtgaaggagatggacaatgagaagaggatccggctgctgcagtttgtgacaggcacctgccgcctgcctgtgggcggctttgctgagctgattggcagcaatggcccccagaagttctgcatcgacaaggtgggcaaggagacctggctgcccaggagccacacctgcttcaaccggctggacctgcccccctacaagagctatgagcagctgcgggagaagctgctgtatgccatcgaggagacagagggcttcggccaggagtag

SEQ ID NO: 316051 - DNA, 2274 bp, Artificial Sequence
  derived and/or modified sequence
atggagaacatgcagctgaccctgaacctgcagacagaaaataaaggatctgtggtgtctggaggagagctgaccatcttcctggatggccccaccgtggacctgggcaatgtgcccaacggcagcgccctgacagatggcagccagctgcccagccgggacagcagcggcacagctgtggccccagaaaatagacaccagccccccagcaccaactgcttcggcggccgcagcaggacccaccgccacagcggggccagcgcccggaccaccccagccaccggggagcagagccctggggcccggagccgccaccggcagcctgtgaagaacagcggccacagcggcctggccaatggaacagtgaatgatgagcccaccacagccacagatcctgaggagcccagcgtggtgggcgtgaccagccccccagctgcccccctgtctgtgacccccaaccccaacaccaccagcctgcctgccccagccaccccagctgagggggaggagcccagcaccagcggcacccagcagctgcctgctgctgcccaggccccagatgccctgcctgctggctgggagcagcgggagctgcccaacggccgggtgtactacgtggaccacaacaccaagaccaccacctgggagcggcccctgcccccaggctgggagaagaggacagacccccggggccgcttctactacgtggaccacaacaccaggaccaccacctggcagaggcccacagcagaatatgtgaggaactatgagcagtggcagagccagaggaaccagctgcagggcgccatgcagcacttcagccagcgcttcctgtaccagagcagcagcgccagcacagaccatgaccccctgggccccctgcccccaggctgggagaagaggcaggacaatggccgggtgtactacgtgaaccacaacaccaggaccacccagtgggaggaccccaggacccagggcatgatccaggagcccgccctgcccccaggctgggagatgaagtacaccagcgagggcgtgcgctactttgtggaccacaacaccaggaccaccaccttcaaggacccccggcccggctttgagagcggcaccaagcagggcagccctggggcctatgaccgctccttccgctggaagtaccaccagttccgcttcctgtgccacagcaatgccctgcccagccacgtgaagatctctgtgtcccggcagaccctgtttgaagattccttccagcagatcatgaacatgaagccctatgacctgcggcggcggctgtacatcatcatgagaggagaggagggcctggactatggaggcatcgcccgggagtggttcttcctgctgagccatgaggtgctgaaccccatgtactgcctgtttgaatatgccggcaagaacaactactgcctgcagatcaacccagccagcagcatcaacccagaccacctgacctacttccgcttcatcggccgcttcatcgccatggccctgtaccacggcaagttcatcgacaccggcttcaccctgcccttctacaagaggatgctgaacaagaggcccaccctgaaggacctggagagcattgatcctgagttctacaacagcatcgtgtggatcaaggagaacaacctggaggagtgtggcctggagctgtacttcatccaggacatggagatcctgggcaaggtgaccacccatgagctgaaggagggcggggagagcatccgggtgacagaggagaacaaggaggagtacatcatgctgctgacagactggaggttcacccggggcgtggaggagcagaccaaggccttcctggatggcttcaatgaggtggcccccctggagtggctgcgctactttgatgagaaggagctggagctgatgctgtgtggcatgcaggagattgacatgtctgactggcagaagagcaccatctaccgccactacaccaagaacagcaagcagatccagtggttctggcaggtggtgaaggagatggacaatgagaagaggatccggctgctgcagtttgtgacaggcacctgccgcctgcctgtgggcggctttgctgagctgattggcagcaatggcccccagaagttctgcatcgacaaggtgggcaaggagacctggctgcccaggagccacacctgcttcaaccggctggacctgcccccctacaagagctatgagcagctgcgggagaagctgctgtatgccatcgaggagacagagggcttcggccaggagtag

SEQ ID NO: 316052 - DNA, 2613 bp, Artificial Sequence
  derived and/or modified sequence
atggccagcgccagcagcagccgggccggcgtggccctgcccttcgaaaaatcccaactcaccctaaaagtggtgtcagctaagccgaaggttcacaataggcagcctcgcataaactcctacgtggaggtggctgtggatggccttccgtctgaaacgaagaaaaccggaaaaaggatcgggtcgtccgaacttctgtggaacgaaatcataattctgaatgtgacagctcagagccatttggacctcaaagtctggtcatgccacacactgaggaatgaactgctcgggactgcatctgtgaacttgagcaacgttctcaagaacaatggtggaaagatggaaaatatgcagctgacacttaacctgcagaccgagaataagggtagcgttgtaagtgggggcgagttgacaatctttctcgatgggcctacagtggacctcggtaacgtgcctaatggctcagccttaaccgatgggtcacagcttccttcgcgggattcatcaggtaccgctgtcgctcccgagaatcggcaccagccaccaagtactaattgtttcgggggtaggagcagaactcatagacactccggtgcttcagcccgtaccacccctgcgaccggcgagcagtcgccaggggccagaagcaggcacaggcagcccgtgaagaacagtggacatagcgggttggctaatgggaccgtgaacgacgagcctaccactgcaacagaccctgaggagccatcagtggtgggtgtgacaagtcccccagctgcgcccttgagtgttacaccaaatcccaatacgacttcattacccgcacctgcaactccagcggaaggagaagagccgtctacttctggcacccaacagctcccagctgcagctcaagccccagatgcgctgcccgctggatgggagcagcgtgagcttcctaatggtagagtgtactacgtggatcacaatacaaagaccacaacttgggaacgcccgctgccacccggctgggaaaaaagaacggatccgagaggaagattttactatgtggaccacaacaccagaacgaccacgtggcagcggccaacggctgaatacgtgagaaactacgagcagtggcagagtcagaggaaccagctccagggagccatgcaacatttctctcagcggtttctgtaccagagcagttctgcctccaccgaccatgatcctttgggcccccttccacctggctgggaaaaaagacaagacaacggccgggtctactatgtgaatcataacactcgtacaactcagtgggaggacccgaggacccagggaatgatacaggaacctgcacttccacctgggtgggaaatgaagtatacctccgagggcgtgaggtatttcgtggatcataacactaggacgacaacattcaaagatcctcgcccgggttttgagtccggaactaagcaagggtcccctggcgcctacgataggtctttcaggtggaaataccaccagtttagattcctgtgccactccaatgcgctgccctctcacgttaagatcagcgttagccgacagaccttgttcgaggattcttttcagcaaataatgaatatgaaaccttacgacctgaggagacggctctacatcatcatgcgcggtgaggagggcctggactacggtggaattgcacgtgagtggttcttcctgctgtcacatgaggtcctgaatccaatgtactgtctttttgagtatgccggtaaaaataactactgccttcagatcaaccctgcgagttcaataaaccccgaccacctcacttacttccgatttattggcagattcatcgctatggccctgtatcacggaaaatttatagataccgggttcacattgcccttctataagcgcatgctaaataagagaccaacccttaaagaccttgagtcaattgatccggaattctacaatagcatcgtgtggattaaagaaaacaacttagaagaatgcggcttggagctgtacttcattcaggatatggagatcctgggtaaggtaactacacacgagctgaaagagggtggagaatcaatacgagtgacagaggaaaataaggaagaatatatcatgttgttaacagattggcgttttactcgcggggtcgaagagcagactaaggccttcctcgacgggtttaatgaagtggctccactagaatggctacggtacttcgacgagaaagagttggaactcatgttgtgtggtatgcaggagatcgacatgtctgactggcaaaagtccactatttaccgtcactacacgaagaacagcaaacagatccagtggttttggcaggtcgtcaaagaaatggataatgagaagaggattcggctcctccagttcgtgacagggacatgccgattgcccgttgggggatttgctgagttaatcggttccaacggaccccaaaaattctgtatcgacaaggtgggcaaggaaacctggctgccaaggtctcacacgtgtttcaataggctagatctgcctccatacaaatcttacgaacagctccgggaaaagttgttgtacgccattgaggagaccgaaggctttgggcaagagtag

SEQ ID NO: 316053 - DNA, 2613 bp, Artificial Sequence
  derived and/or modified sequence
atggccagcgccagcagcagccgggccggcgtggccctgcccttcgagaaaagccagctcaccctgaaagtagtgagcgccaagcccaaggtacacaatcggcagccgagaattaacagttacgttgaagtcgccgtcgacggactccctagcgaaacaaaaaagaccggcaaacgcataggatcatcagagctcctgtggaatgagattataattcttaatgttactgcccagtcccatctcgacctgaaagtgtggtcgtgccacaccctgaggaacgaactgctcggtactgcatcggtgaacctgagtaatgtgctgaagaataacggaggtaagatggagaacatgcagctgaccctgaatctgcagactgagaataagggctccgtagtgtctggaggtgagctcaccatcttcctcgacggaccaactgttgatctagggaacgtgccgaatggatccgccctgaccgacggttctcagttaccgagccgggacagctccggcacagccgtagcccccgagaatcgccatcagcccccttctaccaactgcttcggcggtcgctccaggacccatcgccactcaggggcttccgctaggactaccccagccacgggagagcaatctccgggagccagaagcaggcatcgtcagccagtgaaaaattcgggacactctggcctcgctaacggaacagttaacgacgaacctaccacagcaacagaccccgaggagcccagtgtggtgggggtcacttcccccccagcagcccctctgagcgttactcccaacccgaacaccaccagtcttcccgcacctgccactcccgcagagggagaggagccgagcacctccgggacacaacagctgcctgcagctgctcaagcacccgacgccctccccgcagggtgggagcagcgtgaacttcccaacggacgcgtatattacgttgatcacaataccaagaccaccacctgggaacgccccttgcccccaggctgggagaagcgtactgatccccgtgggcgattttactacgtcgatcacaacaccagaacaacaacgtggcagaggcccaccgcagagtacgtgcgcaattatgagcaatggcagtcccaacgtaatcagctgcagggggccatgcagcacttctcccagcgtttcctctaccagagttcctcagccagtacagaccacgacccactggggcccctacccccaggctgggaaaagcgccaagataacggtcgcgtatactatgtgaaccacaacacgcggacaacccagtgggaggacccccggacccagggcatgattcaagagcctgcgcttccccccggatgggagatgaaatatacctctgagggcgttcgatacttcgtcgatcataatactaggaccaccacctttaaggaccctagaccagggtttgaaagtggtactaagcaggggtctcccggagcatatgatcggagcttcaggtggaagtaccaccagttccgattcctctgccactctaacgctctcccctcacacgtgaaaatctctgttagccgccagacgctgtttgaggactcctttcaacagattatgaacatgaaaccatacgaccttcggcgccgcttatacataatcatgaggggtgaggaaggtctggattacggagggatagcacgggaatggtttttcctccttagccacgaggtgcttaatcccatgtactgtctgttcgaatacgcggggaagaacaactactgcctgcagattaatcctgcctccagcattaacccggatcacctgacttactttaggttcatcggacgtttcattgccatggccctgtatcatggaaaattcatcgatactgggtttacccttcctttctacaagaggatgttgaataagaggcccactttgaaagatctggagagtatagaccctgaattctacaatagcattgtatggattaaggagaacaatctggaagagtgtggattagagctttactttattcaggacatggaaatcctggggaaggtgaccactcatgagctgaaggaggggggggaaagtattcgcgtgaccgaggagaataaggaagaatacataatgctgcttactgattggaggtttactcgcggagttgaggaacagaccaaggccttccttgacggctttaacgaggtcgcccctctggagtggcttagatattttgatgaaaaggagctggagctgatgctgtgcggaatgcaggagatcgacatgagcgattggcagaaatctaccatctatagacattatacgaagaatagcaagcagattcaatggttctggcaggtggtgaaagaaatggataacgaaaaacggatccgcttgctgcagttcgtaaccggaacgtgtcgtctgccagtggggggcttcgctgagctcatcgggagtaacggccctcaaaagttttgcatcgacaaggttgggaaggaaacatggttacctaggtcccacacatgcttcaatcgtctggatctccccccatataaaagctacgagcaactcagagagaaactattatatgccatcgaagagacagagggattcggacaagagtag

SEQ ID NO: 316054 - DNA, 2613 bp, Artificial Sequence
  derived and/or modified sequence
atggccagcgccagcagcagccgggccggcgtggccctgcccttcgagaaaagtcagctgaccctgaaagtggtctcagctaaaccgaaagtccataatcgacagcctcgcattaattcttacgtggaggtagcagtcgacggtctgccatccgagacaaagaagacaggcaagcgcatcggctccagcgagcttctgtggaacgagataatcatactgaacgtcaccgctcagtcgcacctagacttgaaagtgtggagttgccataccctcaggaatgagctcctggggactgcctcagtgaacctgtcgaacgttcttaaaaacaacggaggtaagatggagaatatgcaactgacccttaatttacagaccgagaataaaggctccgttgtgtcaggcggggaattaaccatcttcttggatggacccaccgtggatcttgggaacgtgcccaacggaagtgctctgacagatggcagtcagctgccctcaagggactccagcggtactgcagtcgcaccagagaatcggcaccaacctcccagtacgaattgcttcggcggccggagtagaactcatagacactcaggagctagcgcaaggactacacccgctacaggcgaacagagcccaggtgccagatccaggcaccgacaaccagtgaagaattctggccatagtggcttagcgaacggcacggtgaatgatgaacctacgaccgccacagaccccgaagagcccagtgtggtgggagtgaccagtcctccagccgccccactctctgtcacaccaaatcctaataccacctcactacccgcacctgccaccccagccgaaggcgaggaaccaagcacctctgggacgcagcagctccctgccgccgcccaggcgcctgatgccctacctgctgggtgggagcaaagagagcttcccaacgggagagtttattacgttgatcacaataccaaaaccacgacctgggaacgcccactaccccccggatgggagaagcgtaccgatccaagagggaggttttactatgtcgatcataacaccagaaccaccacctggcagcggcccactgccgagtacgtacgaaactatgagcagtggcagagtcagcggaaccagcttcagggcgctatgcagcatttttcacagcggttcctttatcagtctagctccgcctccacagatcacgatccactggggccactccctccaggttgggagaaaagacaggacaacggtagagtgtattatgtgaaccataataccagaacaacacaatgggaagacccccgcacacaggggatgattcaggagcccgctctaccccctggatgggaaatgaagtacacttcagagggcgtcagatacttcgtcgaccataacactagaactaccactttcaaagatccccgccccggctttgaatcaggcacgaaacagggtagccccggcgcctacgataggtccttccggtggaagtaccaccaattcaggtttctctgccattctaatgccctcccatcacacgtaaaaatctcagtgagtcggcagactctttttgaagacagtttccaacagatcatgaacatgaaaccttacgatctccggaggcgattatacattataatgaggggggaagagggcctggactatggagggatcgcgcgagagtggttctttctgctgagtcatgaggtccttaatcccatgtactgtctctttgaatacgcaggaaaaaataattattgcttgcagatcaatcctgccagctctattaacccagatcacttaacttatttccgtttcataggtcggttcattgccatggccctgtaccatgggaagtttatagacacaggctttacactcccgttctacaagcgcatgctgaacaaaagacccaccctgaaagacctggagtcgatcgatcctgagttttacaactctatcgtgtggataaaggaaaacaatttggaagagtgtgggctcgagttgtacttcatccaggacatggaaatcctgggaaaggttactacccacgaactaaaagaagggggggaatccattagggtgactgaggagaataaggaggagtatattatgctcttaaccgactggagatttacgaggggtgtggaggaacagaccaaagccttcttagatgggtttaatgaagtggcgcctctcgagtggctgcgatactttgacgagaaagaactggagctcatgctatgcgggatgcaggagatcgatatgagtgattggcagaaatcaaccatctaccgtcactacacaaagaacagcaaacagattcagtggttctggcaggtcgtgaaagagatggataacgaaaagcggatacggttgcttcagttcgtgacaggcacctgcagacttcctgtaggtggcttcgcggaactcatcggcagcaatgggccacagaagttctgcatagacaaagttggcaaggaaacctggctgccaagaagtcacacctgctttaaccgtttggatttacccccgtataagtcttacgaacaactaagggagaaactgctctatgctatcgaagagacggagggcttcgggcaggaatag

SEQ ID NO: 316055 - DNA, 2274 bp, Artificial Sequence
  derived and/or modified sequence
atggagaacatgcagctgaccctgaacctgcagaccgagaacaagggcagcgttgtatccggaggtgaactgacgatctttctggacggaccaacggtggatctgggaaatgttcctaacggctccgcgctcacagacggttcccagcttccctccagagactcatctggaaccgctgtggcacccgagaatcgccaccagccccccagcactaattgtttcggcggtcgctccagaacccatcggcacagtggcgcttccgccaggactactccagcgacaggcgagcagagccctggagcacggagtagacaccgccagccagtaaagaactcaggacactcaggcttggccaacggcactgtgaatgacgagcccaccacagcaaccgatcccgaagaaccatctgtcgtcggcgttacatcacctccagcagcaccactgagcgttacgcccaaccccaatactacttcccttcctgccccggctactccagccgagggtgaggagccaagcacctccggcacccagcagttgccggccgctgcgcaggcacccgatgcattaccagccgggtgggaacagcgtgagttacccaacggccgagtgtactatgttgaccataatactaagaccacgacatgggaacgacccctccccccaggatgggagaaaagaaccgatcctcgtgggcgattctactacgtcgaccacaacactcggaccaccacgtggcagaggcctaccgcagaatatgtccgaaactacgaacagtggcagtcccagagaaaccagcttcaaggtgctatgcagcatttctcacagaggtttctgtaccagagctccagcgcctccacagaccacgatccactcggcccactgccaccagggtgggagaaacgccaggataatggcagagtgtactatgtgaaccacaatacccgcaccacccagtgggaagatccaaggacacagggaatgatacaggaaccagcactcccccccggttgggaaatgaagtacacgagtgaaggggtgcgatactttgtcgaccacaatacgcgaactaccacctttaaggacccgcgtcccgggtttgagtccggaacgaaacaagggagccccggggcatatgatcgatccttccgatggaagtatcaccaattccggtttttgtgccatagcaatgccctcccctctcacgttaagatttctgtctctagacagacactgttcgaagactcatttcagcaaattatgaatatgaagccctatgatttaagaaggcgcctgtatatcataatgcggggtgaggagggcctggactatggaggaatcgcccgcgagtggttcttcctgttatctcatgaagtgttgaatcccatgtactgcttgttcgaatacgcgggcaagaataactattgcctgcagatcaaccctgcctcatcaattaaccctgatcaccttacatattttcggtttatagggagattcattgccatggccctgtaccacggtaaattcattgatactgggtttaccctccccttctacaagcgaatgctgaacaaacggcctacccttaaggacctggaatccatagaccccgaattttacaattcaatcgtctggattaaggagaacaacctggaagagtgtggccttgaattatacttcatacaggatatggaaatcctggggaaagtcaccacacatgagctgaaggagggcggcgagagtatcagagtgaccgaggaaaataaagaagagtacataatgctgctcaccgactggcggtttacgagaggcgtcgaggagcaaacaaaagctttcctagacggcttcaatgaagtggccccccttgagtggttaaggtattttgacgagaaggaattggagcttatgctgtgtggaatgcaggaaatagatatgagtgactggcagaagagtactatttaccgccactatacaaagaattccaagcagatccagtggttctggcaggtagtcaaagaaatggacaatgaaaaaaggatcaggcttctccagtttgtcactggcacttgccgcttgccagtgggtgggttcgccgaactgattggcagcaacggcccgcaaaaattctgtattgacaaggtcgggaaagagacttggctccctagaagtcacacctgcttcaacaggctggaccttcccccctacaagtcctatgagcagctgagagagaaactgctgtatgccatcgaggaaaccgagggcttcggccaggagtag

SEQ ID NO: 316056 - DNA, 2613 bp, Artificial Sequence
  derived and/or modified sequence
atggcctccgcatcttctagtcgagccggtgttgctctgcccttcgaaaagtctcagctgaccttgaaggtcgtgtcagctaagccaaaggttcacaacaggcagcctcgcatcaattcttacgtggaggtggccgtcgatggattgcctagtgaaacaaaaaaaactggaaagaggattggtagcagtgaactcttgtggaatgagattattatcctgaatgttactgctcagtctcacctggacctgaaagtatggagttgccacaccctgaggaatgaacttctgggcactgccagcgtgaatctgagtaatgtcctcaaaaataatggaggcaaaatggagaacatgcaactgacactgaatctgcagaccgagaacaagggctctgtggtctccggcggtgagctcactatttttctggacggccctacagttgacttagggaatgttcccaatggaagtgctctcacagacggttctcagctgccctcacgagattcatcgggtacagctgtggcacctgagaatcggcaccaaccaccctctaccaactgctttggagggagatccaggacgcacaggcactctggcgctagcgcacgtaccacacctgcaaccggtgagcaatccccgggagcccgatccagacaccggcaacccgtgaaaaacagtggtcactccggactcgctaatggcactgtgaatgatgagccgacgactgctaccgatccagaggaacccagtgtggtaggggtgacctcaccaccagcagcgcctttgtcggtcacgccaaaccccaatacaacgtcactgccagctcctgccaccccggcagaaggcgaggagccatctacctctgggacgcaacagctcccggcagccgctcaagcccctgatgccttgccagcaggctgggagcagcgagagctgcccaatggcagggtatactacgtggaccataacactaagaccacaacatgggaacgtccactgccaccagggtgggagaagaggactgaccctagaggcagattctactatgtggatcataataccaggacaaccacttggcaacgcccaacggctgagtatgtgagaaattacgaacagtggcaatcgcaaaggaatcaactacagggagctatgcagcatttcagccaacgatttctgtaccagtcttcatctgcctccaccgatcacgatccgctgggaccgctcccacctggttgggagaagcgacaggataacggacgcgtctattatgttaatcacaacacgagaaccactcagtgggaagatcctcggactcagggcatgatccaggagcccgcattgcctccgggatgggagatgaagtacacatcggaaggtgttagatacttcgttgatcacaatacaagaactaccacctttaaggatcctcgcccagggtttgaatcaggcacaaaacaaggctcgccaggcgcttacgatcgctcatttcggtggaaatatcaccaatttagattcctatgccacagcaacgccctgccatcccatgtgaagatatccgtgagtcgacagactctattcgaagattctttccagcaaattatgaacatgaagccttacgatctgaggcggaggctctatattatcatgaggggggaggaggggctggattacggaggaatcgccagggaatggttcttcctgctcagccacgaggtgttgaatccaatgtactgtctgttcgaatacgccggaaagaacaactattgcttacagattaaccctgcctccagcatcaaccccgaccacctcacatatttccggttcataggtagatttatcgctatggccctgtaccacgggaagttcattgacaccggtttcaccctgccgttttacaagcggatgctgaacaaacgcccaaccctgaaagatttagagtcgatcgatcccgagttttataactcgattgtgtggatcaaggaaaataacctcgaggagtgcggcttggagttatatttcatccaggatatggaaattctggggaaagtcacaacacatgaattgaaggaaggaggggagtcaatacgcgtgacagaagaaaacaaggaagagtacatcatgttgcttacagattggcggtttactaggggcgttgaggagcaaacgaaggccttcctggacggctttaacgaggtggcgcctctggagtggctccgatacttcgacgaaaaggagctcgagctgatgctttgtggtatgcaggaaatcgacatgtccgactggcagaaatccacaatctaccgtcactacactaaaaatagcaaacagattcagtggttttggcaagtggtaaaggagatggataacgaaaagcgcattagactgctgcagttcgtaactggcacctgtaggctgcccgtggggggattcgccgagctgattggaagtaacgggccacagaagttctgcattgacaaagtgggaaaggaaacatggctccccagatcacatacctgtttcaaccgcctcgaccttcccccatacaagtcatatgagcaactgcgcgagaaactcctctatgccattgaggaaacagagggattcggccaggagtag

SEQ ID NO: 316057 - DNA, 2613 bp, Artificial Sequence
  derived and/or modified sequence
atggctagcgcgtcttcgagtcgagccggtgtggccctcccattcgaaaagtctcagctgactttgaaagtggtgagtgcaaaacctaaggttcataaccgacaaccacgcatcaatagttatgtcgaggtggccgtggacggcttgccaagtgagactaagaagactggcaagcggatcggaagctcagaactgttatggaacgagatcatcattttgaacgtaacagctcagtctcacctggatctcaaggtgtggtcttgtcacaccttacgcaacgagctgctgggcaccgcatccgtgaacctgtccaatgtgcttaagaacaatgggggtaagatggaaaacatgcagctcactttgaatctgcagactgagaataaagggtctgttgtgagcgggggtgaattaactatctttcttgacggccctaccgtcgacttaggtaacgtgcccaacggctccgcccttacagatggctcccagttaccctctagagactcgtcgggaacagcagtcgcccctgagaatcgccatcagccccctagcacaaactgcttcggcggtcgttccaggactcatcgccactcgggagccagcgctcgaactactcctgccactggggagcagtctccaggcgcaagatccagacacaggcagccggttaaaaactctggacattctgggctcgcgaatggaacagtgaatgacgagcccaccactgctacagaccctgaagaaccctccgtggtaggtgtgacgagcccacccgctgcccctctcagcgtgactcccaaccccaacaccacaagcctaccagcaccagccacccccgcagaaggggaggaaccctctacctcggggactcagcagctgcctgccgcagcgcaagcaccggatgctctaccagctgggtgggagcagagggagctgccaaacggtagggtctactatgtggatcacaataccaaaacaacgacgtgggaaaggcctttgccacccggttgggagaagaggacagatcccagagggcgtttttattatgtcgaccacaacacaagaaccacaacctggcagcgtcctacagccgagtacgtgcgaaactatgagcagtggcagtctcagcgaaaccagctgcagggtgccatgcaacacttctcacaacgcttcctctatcagtctagcagtgccagcacagaccacgaccccctaggacccttgccacctggttgggaaaagcgacaggataatgggagggtttactatgtgaatcataatacacgcacaacccaatgggaggacccacgtacccagggcatgatccaggagcctgccctgccaccaggctgggagatgaagtatacttctgagggggtgcggtactttgtggaccataacacccgcaccacaactttcaaagaccctagaccaggatttgagagtggtacgaagcaggggtctcctggtgcatatgatcgctcgtttcgctggaaatatcaccagttcaggttcctgtgccactccaatgccctgccatcacacgtgaagattagcgtctctaggcagacactgttcgaggactctttccagcagatcatgaatatgaaaccttatgatctccggagaaggttatacattatcatgcggggagaagagggcctggattacggaggcattgccagggagtggttcttccttctctcacacgaggtgctgaacccaatgtactgtctctttgaatacgctggaaaaaacaactattgtctccagataaatcccgcatcttctattaatcccgaccacctgacctacttccggttcatcggacggtttattgcgatggccttgtaccacggaaagttcattgacaccgggttcacattgcctttttacaaaaggatgctgaacaagcgtcctacacttaaagaccttgagagtatagatcccgagttttacaatagcattgtgtggatcaaggagaataatttggaagaatgcggactggaactgtattttattcaggatatggagatccttgggaaggtgaccactcacgagctgaaagagggaggtgagagcattagagttacagaggaaaataaagaagagtacattatgctcctgaccgactggagatttacacggggagtcgaagaacagacaaaagcctttctagatggcttcaatgaggtagcaccactggaatggttgcgctatttcgatgaaaaggagttagaactcatgctttgcgggatgcaggaaattgatatgtccgactggcagaaatctacgatctacaggcattatactaagaactccaaacaaattcaatggttttggcaggtggtgaaagagatggacaatgaaaagcgcatcagactgctgcagtttgttacaggaacctgtcgactcccggtgggagggtttgccgagttgatcggatcaaatggtcctcagaagttttgtatcgataaagtgggcaaggaaacttggttaccccgttctcacacttgctttaataggctcgatctgccaccgtacaaaagctatgagcaattgcgcgaaaagttgctatatgcaatcgaagagactgaaggtttcggacaagagtag

SEQ ID NO: 316058 - DNA, 2613 bp, Artificial Sequence
  derived and/or modified sequence
atggcttctgctagctcctctcgcgctggagtggccctgcctttcgagaagtcccaattaaccctaaaggtagtgtcagctaaaccaaaagtgcataacagacagccacgcattaattcatacgtggaggtggctgtggatggacttcctagtgaaactaaaaagacgggaaagaggatcggcagctccgaactactctggaatgagataatcattctgaatgttacggcccagagccatctggatttgaaagtctggtcatgccatacccttcgcaacgagctgctaggcactgccagcgtgaacctaagcaacgtcctcaaaaataacggagggaaaatggagaatatgcaactgacactgaatctgcagactgagaacaaaggctcggtagtgagtggaggcgaattgaccatcttcctcgatggtccgacagtcgacctgggaaacgtgcctaacggatccgccctgactgacggtagtcagctgccatcacgagactcctccggcacagccgttgcaccagagaacagacatcagccgccttcaaccaactgcttcggcggacgctctaggacccacagacactcaggagcaagcgccagaacaacgcctgccactggcgagcagtcacctggggcaaggtcaaggcaccgtcagcctgtgaagaatagcgggcactccggcctggccaacggtactgtcaacgacgaaccaactactgccacagaccctgaagaaccatctgtcgtcggagtcactagccctcctgcagctcccctgtcagtgactcccaatcctaatacaactagcctgccggcaccagcgactccagccgaaggagaggagcctagcaccagcggaacgcaacagttacccgcagccgctcaggccccagatgccctccccgcagggtgggagcagcgggagttgcccaacggccgtgtgtattatgtggaccacaatacaaaaaccactacttgggagcgacccctgcccccaggatgggaaaaaagaactgaccccagaggacgattttattatgtggatcataacactcggactacaacatggcagcgacctaccgccgagtatgtgcgtaattatgagcagtggcagtcacagaggaaccagctccaaggggcaatgcaacatttttcacagcgatttttatatcaaagttcgtccgcgtcaactgatcatgatccattaggccctcttccgcctgggtgggagaaaagacaggacaatggcagggtttactatgtgaatcataacacaagaaccacacagtgggaggacccaagaacccagggtatgattcaggagccagctctgcccccaggatgggagatgaagtatacctccgagggggttcgctacttcgtggatcacaatacaagaactaccacatttaaggaccccagaccaggattcgagtctgggaccaaacaggggagccccggagcgtatgatagaagcttccgttggaagtatcatcagttccgctttctctgccattccaacgccttgccatctcatgtcaagatctcggtctcacgccagacgctgtttgaagatagtttccagcagatcatgaacatgaagccgtacgacttgcgtagaaggttatacatcataatgagaggcgaggagggcctcgattacggcggaattgctagggagtggttttttctgctaagtcacgaagtgctcaaccccatgtattgcctgtttgaatatgctgggaaaaataactattgtctacaaatcaaccctgccagcagtattaatcccgaccatctgacttactttagatttattgggaggttcatcgctatggctttgtaccacgggaaattcatcgatacaggatttaccctgcctttctacaagcggatgctcaataaaagacccacgctgaaggacctggagtccattgaccccgaattttacaactcgatcgtttggataaaggagaacaatctggaggagtgtggcctggaactgtatttcatccaagacatggagattttgggaaaggttaccacacacgaactcaaagaaggcggtgagagcattcgggttacagaagagaacaaagaagaatatataatgcttcttacggactggcgcttcacaaggggcgtggaagagcaaaccaaggcttttctggatggtttcaatgaagttgccccattggagtggctgcgttacttcgacgagaaggaactggagctgatgctctgtggaatgcaggagatagacatgtcagactggcagaagtctactatctacaggcactatactaagaacagtaaacaaatccagtggttctggcaggtcgtaaaggagatggacaacgaaaaacggatcaggcttcttcagttcgtcaccggaacctgccgcctgcctgtgggcggatttgccgagctaatagggtcaaatggaccccaaaagttctgcatcgataaagtggggaaagagacatggcttcctcggagccatacctgcttcaataggctcgaccttcccccatataagtcctacgaacagcttcgagagaaattgctgtatgcgattgaggaaaccgagggttttggtcaggaatag

SEQ ID NO: 316059 - DNA, 2274 bp, Artificial Sequence
  derived and/or modified sequence
atggagaacatgcaactgacactgaacctgcaaaccgagaataaggggtcagtggtttccggtggtgaacttaccatctttttggacgggcctacggtggacctcggcaacgtgcccaatgggagcgctttgacggatgggtctcagttgcccagcagagattcctctggaacagcggtggcaccagagaataggcaccagccaccatcaaccaattgcttcgggggacgtagcaggacccaccgccactccggagcttctgctcgtactactcccgctactggggagcagtcacccggagcacggtcaaggcatagacagcccgtgaaaaacagcggacattctggcctcgccaatggtacagtgaacgatgaacccaccacagccaccgatcctgaagagccctccgtcgtaggagtcacatctcctccagcggcaccattaagcgtgaccccaaaccccaataccacctctctacccgcaccagctactcccgcagaaggggaggaaccttctacatccggaacacaacaactccccgcagctgcccaggcaccagatgctctccctgcgggatgggagcagagagagctgcccaacggcagggtctactacgtggatcacaacactaaaactactacatgggaaaggccgctgcctccaggatgggaaaagagaacagacccgagggggcgattctactacgtcgatcacaacactaggaccaccacttggcagcgacctactgcggagtatgtacgcaattacgaacagtggcagtctcagcgcaatcagctgcagggcgctatgcagcatttctctcagaggtttctgtatcagtcaagttcagcctccacagaccatgatccacttggcccattaccccctggttgggagaagcgccaggataacgggcgtgtgtattacgtaaatcataatacccgcactacacagtgggaagaccccagaacccagggaatgatccaagagcctgcactgccgcctggctgggaaatgaaatacacctcagaaggggttcgttatttcgtcgatcacaacactagaactaccacatttaaggatcctagacctgggtttgagagcggaacgaagcagggctcgcctggggcatacgatcgctctttcagatggaagtaccaccaatttcggtttctctgccacagcaatgccctaccaagccatgtgaaaatatccgtttccagacaaacactctttgaagactccttccagcagatcatgaacatgaaaccttatgacctccggagaagattgtatatcattatgaggggagaggaaggcctggattatggcggtatcgccagggaatggtttttcctgcttagccacgaggtcctcaaccccatgtactgtctgtttgaatatgccggaaagaataactactgtttacagatcaaccctgcctcatcaatcaatcccgaccaccttacctattttcgtttcattggcagatttatcgccatggctctttatcacggcaagtttattgatacagggtttacattgcccttttataagcggatgctcaacaaacgcccaactctgaaggatctagagtccatcgaccctgagttctacaactccatagtatggatcaaggaaaacaatctcgaagagtgcggcctggaactgtattttatacaagatatggaaattctaggcaaagtgactacccatgagctcaaggaaggcggagagtcaatcagggtaaccgaagaaaataaggaagaatacataatgctgcttacagattggaggtttactcggggagtcgaggagcagacaaaagcttttcttgatggttttaatgaagtggcacctttggagtggctcaggtacttcgatgagaaggaactggagctgatgttatgcggcatgcaggaaattgacatgtccgactggcagaagtccactatctataggcactacactaaaaactccaaacagatccaatggttctggcaggtggtcaaagaaatggacaacgagaagagaattagactccttcagtttgtaactggcacttgtcgcttacctgtgggcggttttgcagagctcatcggatccaatggacctcagaagttttgtattgacaaggtgggcaaagagacctggttgccaaggagtcatacatgctttaacaggttagacctccctccatataaaagctacgagcagctgagggaaaagctcttatacgcgatcgaagaaactgaaggctttggacaagaatag

SEQ ID NO: 316060 - DNA, 4439 bp, Artificial Sequence
  derived and/or modified sequence
ttgtcttacagcttcacggtgatgatatggcatctgccagctctagccgggcaggagtggccctgccttttgagaagtctcagctcactttgaaagtggtgtccgcaaagcccaaggtgcataatcgtcaacctcgaattaactcctacgtggaggtggcggtggatggactccccagtgagaccaagaagactgggaagcgcattgggagctctgagcttctctggaatgagatcatcattttgaatgtcacggcacagagtcatttagatttaaaggtctggagctgccataccttgagaaatgaactgctaggcaccgcatctgtcaacctctccaacgtcttgaagaacaatgggggcaaaatggagaacatgcagctgaccctgaacctgcagacggagaacaaaggcagcgttgtctcaggcggagagctgacaattttcctggacgggccaactgttgatctgggaaatgtgcctaatggcagtgccctgacagatggatcacagctgccttcgagagactccagtggaacagcagtagctccagagaaccggcaccagccccccagcacaaactgctttggtggaagatcccggacgcacagacattcgggtgcttcagccagaacaaccccagcaaccggcgagcaaagccccggtgctcggagccggcaccgccagcccgtcaagaactcaggccacagtggcttggccaatggcacagtgaatgatgaacccacaacagccactgatcccgaagaaccttccgttgttggtgtgacgtccccacctgctgcacccttgagtgtgaccccgaatcccaacacgacttctctccctgccccagccacaccggctgaaggagaggaacccagcacttcgggtacacagcagctcccagcggctgcccaggcccccgacgctctgcctgctggatgggaacagcgagagctgcccaacggacgtgtctattatgttgaccacaataccaagaccaccacctgggagcggccccttcctccaggctgggaaaaacgcacagatccccgaggcaggttttactatgtggatcacaatactcggaccaccacctggcagcgtccgaccgcggagtacgtgcgcaactatgagcagtggcagtcgcagcggaatcagctccagggggccatgcagcacttcagccaaagattcctctaccagtcttcgagtgcttcgactgaccatgatcccctgggccccctccctcctggctgggagaagagacaggacaatggacgggtgtattacgtgaaccataacactcgcacgacccagtgggaggatccccggacccaggggatgatccaggaaccagctctgcccccaggatgggagatgaaatacaccagcgagggggtgcgatactttgtggaccacaatacccgcaccaccacctttaaggatcctcgcccggggtttgagtcggggacgaagcaaggttcccctggtgcttatgaccgcagttttcggtggaagtatcaccagttccgtttcctctgccattcaaatgccctacctagccacgtgaagatcagcgtttccaggcagacgcttttcgaagattccttccaacagatcatgaacatgaaaccctatgacctgcgccgccggctctacatcatcatgcgtggcgaggagggcctggactatgggggcatcgccagagagtggtttttcctcctgtctcatgaggtgctcaaccctatgtattgtttatttgaatatgccggaaagaacaattactgcctgcagatcaaccccgcctcctccatcaacccggaccacctcacctactttcgctttataggcagattcatcgccatggcgctgtaccatggaaagttcatcgacacgggcttcaccctccctttctacaagcggatgctcaataagagaccaaccctgaaagacctggagtccattgaccctgagttctacaactccattgtctggatcaaagagaacaacctggaagaatgtggcctggagctgtacttcatccaggacatggagatactgggcaaggtgacgacccacgagctgaaggagggcggcgagagcatccgggtcacagaggagaacaaggaagagtacatcatgctgctgactgactggcgtttcacccgaggcgtggaagagcagaccaaagccttcctggatggcttcaacgaggtggccccgctggagtggctgcgctactttgacgagaaagagctggagctgatgctgtgcggcatgcaggagatagacatgagcgactggcagaagagcaccatctaccggcactacaccaagaacagcaagcagatccagtggttctggcaggtggtgaaggagatggacaacgagaagaggatccggctgctgcagtttgtcaccggtacctgccgcctgcccgtcgggggatttgccgaactcatcggtagcaacggaccacagaagttttgcattgacaaagttggcaaggaaacctggctgcccagaagccacacctgcttcaaccgtctggatcttccaccctacaagagctacgaacagctgagagagaagctgctgtatgccattgaggagaccgagggctttggacaggagtaaccgaggccgcccctcccacgccccccagcgcacatgtagtcctgagtcctccctgcctgagaggccactggccccgcagcccttgggaggcccccgtggatgtggccctgtgtgggaccacactgtcatctcgctgctggcagaaaagcctgatcccaggaggccctgcagttcccccgacccgcggatggcagtctggaataaagccccctagttgcctttggccccacctttgcaaagttccagagggctgaccctctctgcaaaactctcccctgtcctctagaccccaccctgggtgtatgtgagtgtgcaagggaaggtgttgcatccccaggggctgccgcagaggccggagacctcctggactagttcggcgaggagactggccactgggggtggctgttcgggactgagagcgccaagggtctttgccagcaaaggaggttctgcctgtaattgagcctctctgatgatggagatgaagtgaaggtctgagggagcgggccctggggcgaggccatctctgcctgcctccctagcaggcgccagcggtggaggctgagtcgcaggacacatgccggccagttaattcattctcagccaatgaaggtttgtctaagctgcctgggtatccacgggacaaaaacagcaaactccctcagactttgtccatgtataaacttgaagtggttgtgttgtagggttgcaggttttttgttacgctgctgtcactttctgtccaggagctggcaccccaggtgttctgagaccttgagggacccagacctttgggtccaagagtttcccaaacagccacgcctctcaggaacccacctggcggttccgtgagctcaggcaggcctgacccggcggcacagcctggcagggacctcgtccccaagcctggcagaatgagaggggttgaggtcccgagcgccactcctagccttgccgccttcaatagagaagaaatccctttgctagatagggtcccccaggcagtccccagtggcgggacacaggggtccggctgtggagctcccctgccagcccctggagctccaggagggcctgttggtcccctgttcagaatggagtgcagcccgccagcggaaagtgttcattctgcataggtgtgaggctttatctgcacacaggacatgaaaaccagcagaaaggccctgagctgctgcatagccccatctgatttctgcagttcccgccagcctccaacacggggactctgccgtaactggaatcttcataggtcatattgaaatcttcaaggtgaccatgccccaccggggtgctggggcagtagtcatggcagactcccggcctgggcccccaggattctaggacccccaggcagccccttggactggtcccgggtgccttccaagcacagtctccatgctcccagattctcgaccttcccccggcccgggaggtgcagcctgcgtctgcctctgtcgtgtgtgctgatttgagtggcttagcttgccacagcgcagcctcttctgtccctttcagtcatttgctgtacttccctgtggcacgttaccatggaagccgctccagggtgggtcagggtgcaagctgctggtgaggtttggaagcatcaggctcacgggtgttcatgtgtgttcgtgcgtgtgtgtgcgtacgtgtatataactgaagtgtctgtacggaatgccctttgctagccatgggctggtcaccagattgttttgtaatgcccgccccttgcctcgatattgccagtttcttgtgcaataaacaatcagcagctgt

SEQ ID NO: 316061 - DNA, 4515 bp, Artificial Sequence
  derived and/or modified sequence
gcgcggtcacgtgacccggcccgagtgcgggcggtggaaggcggaagtaggagaggagttcggcgccgcttctgtggccacggcagcttcacggtgatgatatggcatctgccagctctagccgggcaggagtggccctgccttttgagaagtctcagctcactttgaaagtggtgtccgcaaagcccaaggtgcataatcgtcaacctcgaattaactcctacgtggaggtggcggtggatggactccccagtgagaccaagaagactgggaagcgcattgggagctctgagcttctctggaatgagatcatcattttgaatgtcacggcacagagtcatttagatttaaaggtctggagctgccataccttgagaaatgaactgctaggcaccgcatctgtcaacctctccaacgtcttgaagaacaatgggggcaaaatggagaacatgcagctgaccctgaacctgcagacggagaacaaaggcagcgttgtctcaggcggagagctgacaattttcctggacgggccaactgttgatctgggaaatgtgcctaatggcagtgccctgacagatggatcacagctgccttcgagagactccagtggaacagcagtagctccagagaaccggcaccagccccccagcacaaactgctttggtggaagatcccggacgcacagacattcgggtgcttcagccagaacaaccccagcaaccggcgagcaaagccccggtgctcggagccggcaccgccagcccgtcaagaactcaggccacagtggcttggccaatggcacagtgaatgatgaacccacaacagccactgatcccgaagaaccttccgttgttggtgtgacgtccccacctgctgcacccttgagtgtgaccccgaatcccaacacgacttctctccctgccccagccacaccggctgaaggagaggaacccagcacttcgggtacacagcagctcccagcggctgcccaggcccccgacgctctgcctgctggatgggaacagcgagagctgcccaacggacgtgtctattatgttgaccacaataccaagaccaccacctgggagcggccccttcctccaggctgggaaaaacgcacagatccccgaggcaggttttactatgtggatcacaatactcggaccaccacctggcagcgtccgaccgcggagtacgtgcgcaactatgagcagtggcagtcgcagcggaatcagctccagggggccatgcagcacttcagccaaagattcctctaccagtcttcgagtgcttcgactgaccatgatcccctgggccccctccctcctggctgggagaagagacaggacaatggacgggtgtattacgtgaaccataacactcgcacgacccagtgggaggatccccggacccaggggatgatccaggaaccagctctgcccccaggatgggagatgaaatacaccagcgagggggtgcgatactttgtggaccacaatacccgcaccaccacctttaaggatcctcgcccggggtttgagtcggggacgaagcaaggttcccctggtgcttatgaccgcagttttcggtggaagtatcaccagttccgtttcctctgccattcaaatgccctacctagccacgtgaagatcagcgtttccaggcagacgcttttcgaagattccttccaacagatcatgaacatgaaaccctatgacctgcgccgccggctctacatcatcatgcgtggcgaggagggcctggactatgggggcatcgccagagagtggtttttcctcctgtctcatgaggtgctcaaccctatgtattgtttatttgaatatgccggaaagaacaattactgcctgcagatcaaccccgcctcctccatcaacccggaccacctcacctactttcgctttataggcagattcatcgccatggcgctgtaccatggaaagttcatcgacacgggcttcaccctccctttctacaagcggatgctcaataagagaccaaccctgaaagacctggagtccattgaccctgagttctacaactccattgtctggatcaaagagaacaacctggaagaatgtggcctggagctgtacttcatccaggacatggagatactgggcaaggtgacgacccacgagctgaaggagggcggcgagagcatccgggtcacagaggagaacaaggaagagtacatcatgctgctgactgactggcgtttcacccgaggcgtggaagagcagaccaaagccttcctggatggcttcaacgaggtggccccgctggagtggctgcgctactttgacgagaaagagctggagctgatgctgtgcggcatgcaggagatagacatgagcgactggcagaagagcaccatctaccggcactacaccaagaacagcaagcagatccagtggttctggcaggtggtgaaggagatggacaacgagaagaggatccggctgctgcagtttgtcaccggtacctgccgcctgcccgtcgggggatttgccgaactcatcggtagcaacggaccacagaagttttgcattgacaaagttggcaaggaaacctggctgcccagaagccacacctgcttcaaccgtctggatcttccaccctacaagagctacgaacagctgagagagaagctgctgtatgccattgaggagaccgagggctttggacaggagtaaccgaggccgcccctcccacgccccccagcgcacatgtagtcctgagtcctccctgcctgagaggccactggccccgcagcccttgggaggcccccgtggatgtggccctgtgtgggaccacactgtcatctcgctgctggcagaaaagcctgatcccaggaggccctgcagttcccccgacccgcggatggcagtctggaataaagccccctagttgcctttggccccacctttgcaaagttccagagggctgaccctctctgcaaaactctcccctgtcctctagaccccaccctgggtgtatgtgagtgtgcaagggaaggtgttgcatccccaggggctgccgcagaggccggagacctcctggactagttcggcgaggagactggccactgggggtggctgttcgggactgagagcgccaagggtctttgccagcaaaggaggttctgcctgtaattgagcctctctgatgatggagatgaagtgaaggtctgagggagcgggccctggggcgaggccatctctgcctgcctccctagcaggcgccagcggtggaggctgagtcgcaggacacatgccggccagttaattcattctcagccaatgaaggtttgtctaagctgcctgggtatccacgggacaaaaacagcaaactccctcagactttgtccatgtataaacttgaagtggttgtgttgtagggttgcaggttttttgttacgctgctgtcactttctgtccaggagctggcaccccaggtgttctgagaccttgagggacccagacctttgggtccaagagtttcccaaacagccacgcctctcaggaacccacctggcggttccgtgagctcaggcaggcctgacccggcggcacagcctggcagggacctcgtccccaagcctggcagaatgagaggggttgaggtcccgagcgccactcctagccttgccgccttcaatagagaagaaatccctttgctagatagggtcccccaggcagtccccagtggcgggacacaggggtccggctgtggagctcccctgccagcccctggagctccaggagggcctgttggtcccctgttcagaatggagtgcagcccgccagcggaaagtgttcattctgcataggtgtgaggctttatctgcacacaggacatgaaaaccagcagaaaggccctgagctgctgcatagccccatctgatttctgcagttcccgccagcctccaacacggggactctgccgtaactggaatcttcataggtcatattgaaatcttcaaggtgaccatgccccaccggggtgctggggcagtagtcatggcagactcccggcctgggcccccaggattctaggacccccaggcagccccttggactggtcccgggtgccttccaagcacagtctccatgctcccagattctcgaccttcccccggcccgggaggtgcagcctgcgtctgcctctgtcgtgtgtgctgatttgagtggcttagcttgccacagcgcagcctcttctgtccctttcagtcatttgctgtacttccctgtggcacgttaccatggaagccgctccagggtgggtcagggtgcaagctgctggtgaggtttggaagcatcaggctcacgggtgttcatgtgtgttcgtgcgtgtgtgtgcgtacgtgtatataactgaagtgtctgtacggaatgccctttgctagccatgggctggtcaccagattgttttgtaatgcccgccccttgcctcgatattgccagtttcttgtgcaataaacaatcagcagctgtg

SEQ ID NO: 316062 - DNA, 4491 bp, Artificial Sequence
  derived and/or modified sequence
ttcggcgccgcttctgtggccacggcaggtagcgagcgctggcgcggggggcgcgtcttacagcttcacggtgatgatatggcatctgccagctctagccgggcaggagtggccctgccttttgagaagtctcagctcactttgaaagtggtgtccgcaaagcccaaggtgcataatcgtcaacctcgaattaactcctacgtggaggtggcggtggatggactccccagtgagaccaagaagactgggaagcgcattgggagctctgagcttctctggaatgagatcatcattttgaatgtcacggcacagagtcatttagatttaaaggtctggagctgccataccttgagaaatgaactgctaggcaccgcatctgtcaacctctccaacgtcttgaagaacaatgggggcaaaatggagaacatgcagctgaccctgaacctgcagacggagaacaaaggcagcgttgtctcaggcggagagctgacaattttcctggacgggccaactgttgatctgggaaatgtgcctaatggcagtgccctgacagatggatcacagctgccttcgagagactccagtggaacagcagtagctccagagaaccggcaccagccccccagcacaaactgctttggtggaagatcccggacgcacagacattcgggtgcttcagccagaacaaccccagcaaccggcgagcaaagccccggtgctcggagccggcaccgccagcccgtcaagaactcaggccacagtggcttggccaatggcacagtgaatgatgaacccacaacagccactgatcccgaagaaccttccgttgttggtgtgacgtccccacctgctgcacccttgagtgtgaccccgaatcccaacacgacttctctccctgccccagccacaccggctgaaggagaggaacccagcacttcgggtacacagcagctcccagcggctgcccaggcccccgacgctctgcctgctggatgggaacagcgagagctgcccaacggacgtgtctattatgttgaccacaataccaagaccaccacctgggagcggccccttcctccaggctgggaaaaacgcacagatccccgaggcaggttttactatgtggatcacaatactcggaccaccacctggcagcgtccgaccgcggagtacgtgcgcaactatgagcagtggcagtcgcagcggaatcagctccagggggccatgcagcacttcagccaaagattcctctaccagtcttcgagtgcttcgactgaccatgatcccctgggccccctccctcctggctgggagaagagacaggacaatggacgggtgtattacgtgaaccataacactcgcacgacccagtgggaggatccccggacccaggggatgatccaggaaccagctctgcccccaggatgggagatgaaatacaccagcgagggggtgcgatactttgtggaccacaatacccgcaccaccacctttaaggatcctcgcccggggtttgagtcggggacgaagcaaggttcccctggtgcttatgaccgcagttttcggtggaagtatcaccagttccgtttcctctgccattcaaatgccctacctagccacgtgaagatcagcgtttccaggcagacgcttttcgaagattccttccaacagatcatgaacatgaaaccctatgacctgcgccgccggctctacatcatcatgcgtggcgaggagggcctggactatgggggcatcgccagagagtggtttttcctcctgtctcatgaggtgctcaaccctatgtattgtttatttgaatatgccggaaagaacaattactgcctgcagatcaaccccgcctcctccatcaacccggaccacctcacctactttcgctttataggcagattcatcgccatggcgctgtaccatggaaagttcatcgacacgggcttcaccctccctttctacaagcggatgctcaataagagaccaaccctgaaagacctggagtccattgaccctgagttctacaactccattgtctggatcaaagagaacaacctggaagaatgtggcctggagctgtacttcatccaggacatggagatactgggcaaggtgacgacccacgagctgaaggagggcggcgagagcatccgggtcacagaggagaacaaggaagagtacatcatgctgctgactgactggcgtttcacccgaggcgtggaagagcagaccaaagccttcctggatggcttcaacgaggtggccccgctggagtggctgcgctactttgacgagaaagagctggagctgatgctgtgcggcatgcaggagatagacatgagcgactggcagaagagcaccatctaccggcactacaccaagaacagcaagcagatccagtggttctggcaggtggtgaaggagatggacaacgagaagaggatccggctgctgcagtttgtcaccggtacctgccgcctgcccgtcgggggatttgccgaactcatcggtagcaacggaccacagaagttttgcattgacaaagttggcaaggaaacctggctgcccagaagccacacctgcttcaaccgtctggatcttccaccctacaagagctacgaacagctgagagagaagctgctgtatgccattgaggagaccgagggctttggacaggagtaaccgaggccgcccctcccacgccccccagcgcacatgtagtcctgagtcctccctgcctgagaggccactggccccgcagcccttgggaggcccccgtggatgtggccctgtgtgggaccacactgtcatctcgctgctggcagaaaagcctgatcccaggaggccctgcagttcccccgacccgcggatggcagtctggaataaagccccctagttgcctttggccccacctttgcaaagttccagagggctgaccctctctgcaaaactctcccctgtcctctagaccccaccctgggtgtatgtgagtgtgcaagggaaggtgttgcatccccaggggctgccgcagaggccggagacctcctggactagttcggcgaggagactggccactgggggtggctgttcgggactgagagcgccaagggtctttgccagcaaaggaggttctgcctgtaattgagcctctctgatgatggagatgaagtgaaggtctgagggagcgggccctggggcgaggccatctctgcctgcctccctagcaggcgccagcggtggaggctgagtcgcaggacacatgccggccagttaattcattctcagccaatgaaggtttgtctaagctgcctgggtatccacgggacaaaaacagcaaactccctcagactttgtccatgtataaacttgaagtggttgtgttgtagggttgcaggttttttgttacgctgctgtcactttctgtccaggagctggcaccccaggtgttctgagaccttgagggacccagacctttgggtccaagagtttcccaaacagccacgcctctcaggaacccacctggcggttccgtgagctcaggcaggcctgacccggcggcacagcctggcagggacctcgtccccaagcctggcagaatgagaggggttgaggtcccgagcgccactcctagccttgccgccttcaatagagaagaaatccctttgctagatagggtcccccaggcagtccccagtggcgggacacaggggtccggctgtggagctcccctgccagcccctggagctccaggagggcctgttggtcccctgttcagaatggagtgcagcccgccagcggaaagtgttcattctgcataggtgtgaggctttatctgcacacaggacatgaaaaccagcagaaaggccctgagctgctgcatagccccatctgatttctgcagttcccgccagcctccaacacggggactctgccgtaactggaatcttcataggtcatattgaaatcttcaaggtgaccatgccccaccggggtgctggggcagtagtcatggcagactcccggcctgggcccccaggattctaggacccccaggcagccccttggactggtcccgggtgccttccaagcacagtctccatgctcccagattctcgaccttcccccggcccgggaggtgcagcctgcgtctgcctctgtcgtgtgtgctgatttgagtggcttagcttgccacagcgcagcctcttctgtccctttcagtcatttgctgtacttccctgtggcacgttaccatggaagccgctccagggtgggtcagggtgcaagctgctggtgaggtttggaagcatcaggctcacgggtgttcatgtgtgttcgtgcgtgtgtgtgcgtacgtgtatataactgaagtgtctgtacggaatgccctttgctagccatgggctggtcaccagattgttttgtaatgcccgccccttgcctcgatattgccagtttcttgtgcaataaacaatcagcagctgt

SEQ ID NO: 316063 - DNA, 2569 bp, Artificial Sequence
  derived and/or modified sequence
attttatagaaacgtttagtactcaccaaggccctcagtggaactggctgaaaatagcagcagactcactcagaaaagaattggagagatccatggcagggaagagagattaagggaaggtagagcgcttaggagagcttgaaaacccaaaggtggagaacatgcagctgaccctgaacctgcagacggagaacaaaggcagcgttgtctcaggcggagagctgacaattttcctggacgggccaactgttgatctgggaaatgtgcctaatggcagtgccctgacagatggatcacagctgccttcgagagactccagtggaacagcagtagctccagagaaccggcaccagccccccagcacaaactgctttggtggaagatcccggacgcacagacattcgggtgcttcagccagaacaaccccagcaaccggcgagcaaagccccggtgctcggagccggcaccgccagcccgtcaagaactcaggccacagtggcttggccaatggcacagtgaatgatgaacccacaacagccactgatcccgaagaaccttccgttgttggtgtgacgtccccacctgctgcacccttgagtgtgaccccgaatcccaacacgacttctctccctgccccagccacaccggctgaaggagaggaacccagcacttcgggtacacagcagctcccagcggctgcccaggcccccgacgctctgcctgctggatgggaacagcgagagctgcccaacggacgtgtctattatgttgaccacaataccaagaccaccacctgggagcggccccttcctccaggctgggaaaaacgcacagatccccgaggcaggttttactatgtggatcacaatactcggaccaccacctggcagcgtccgaccgcggagtacgtgcgcaactatgagcagtggcagtcgcagcggaatcagctccagggggccatgcagcacttcagccaaagattcctctaccagtcttcgagtgcttcgactgaccatgatcccctgggccccctccctcctggctgggagaagagacaggacaatggacgggtgtattacgtgaaccataacactcgcacgacccagtgggaggatccccggacccaggggatgatccaggaaccagctctgcccccaggatgggagatgaaatacaccagcgagggggtgcgatactttgtggaccacaatacccgcaccaccacctttaaggatcctcgcccggggtttgagtcggggacgaagcaaggttcccctggtgcttatgaccgcagttttcggtggaagtatcaccagttccgtttcctctgccattcaaatgccctacctagccacgtgaagatcagcgtttccaggcagacgcttttcgaagattccttccaacagatcatgaacatgaaaccctatgacctgcgccgccggctctacatcatcatgcgtggcgaggagggcctggactatgggggcatcgccagagagtggtttttcctcctgtctcatgaggtgctcaaccctatgtattgtttatttgaatatgccggaaagaacaattactgcctgcagatcaaccccgcctcctccatcaacccggaccacctcacctactttcgctttataggcagattcatcgccatggcgctgtaccatggaaagttcatcgacacgggcttcaccctccctttctacaagcggatgctcaataagagaccaaccctgaaagacctggagtccattgaccctgagttctacaactccattgtctggatcaaagagaacaacctggaagaatgtggcctggagctgtacttcatccaggacatggagatactgggcaaggtgacgacccacgagctgaaggagggcggcgagagcatccgggtcacagaggagaacaaggaagagtacatcatgctgctgactgactggcgtttcacccgaggcgtggaagagcagaccaaagccttcctggatggcttcaacgaggtggccccgctggagtggctgcgctactttgacgagaaagagctggagctgatgctgtgcggcatgcaggagatagacatgagcgactggcagaagagcaccatctaccggcactacaccaagaacagcaagcagatccagtggttctggcaggtggtgaaggagatggacaacgagaagaggatccggctgctgcagtttgtcaccggtacctgccgcctgcccgtcgggggatttgccgaactcatcggtagcaacggaccacagaagttttgcattgacaaagttggcaaggaaacctggctgcccagaagccacacctgcttcaaccgtctggatcttccaccctacaagagctacgaacagctgagagagaagctgctgtatgccattgaggagaccgagggctttggacaggagtaaccgaggccgcccctcccacgccccccagcgcacatgtagtcctgagtcctccctgcctgagaggccactggccccgcagcccttgggaggcccccgtggatgtggccctgtgtgggaccacactgtcatctcgctgctggcag

SEQ ID NO: 316064 - DNA, 2723 bp, Artificial Sequence
  derived and/or modified sequence
atggggaaagagagagggtgctccgagggggttgtgggaggtacagattccctgtggcacctccgactttttctacctatggtacccaaggaatgtcacggcacagagtcatttagatttaaaggtctggagctgccataccttgagaaatgaactgctaggcaccgcatctgtcaacctctccaacgtcttgaagaacaatgggggcaaaatggagaacatgcagctgaccctgaacctgcagacggagaacaaaggcagcgttgtctcaggcggagagctgacaattttcctggacgggccaactgttgatctgggaaatgtgcctaatggcagtgccctgacagatggatcacagctgccttcgagagactccagtggaacagcagtagctccagagaaccggcaccagccccccagcacaaactgctttggtggaagatcccggacgcacagacattcgggtgcttcagccagaacaaccccagcaaccggcgagcaaagccccggtgctcggagccggcaccgccagcccgtcaagaactcaggccacagtggcttggccaatggcacagtgaatgatgaacccacaacagccactgatcccgaagaaccttccgttgttggtgtgacgtccccacctgctgcacccttgagtgtgaccccgaatcccaacacgacttctctccctgccccagccacaccggctgaaggagaggaacccagcacttcgggtacacagcagctcccagcggctgcccaggcccccgacgctctgcctgctggatgggaacagcgagagctgcccaacggacgtgtctattatgttgaccacaataccaagaccaccacctgggagcggccccttcctccaggctgggaaaaacgcacagatccccgaggcaggttttactatgtggatcacaatactcggaccaccacctggcagcgtccgaccgcggagtacgtgcgcaactatgagcagtggcagtcgcagcggaatcagctccagggggccatgcagcacttcagccaaagattcctctaccagtcttcgagtgcttcgactgaccatgatcccctgggccccctccctcctggctgggagaagagacaggacaatggacgggtgtattacgtgaaccataacactcgcacgacccagtgggaggatccccggacccaggggatgatccaggaaccagctctgcccccaggatgggagatgaaatacaccagcgagggggtgcgatactttgtggaccacaatacccgcaccaccacctttaaggatcctcgcccggggtttgagtcggggacgaagcaaggttcccctggtgcttatgaccgcagttttcggtggaagtatcaccagttccgtttcctctgccattcaaatgccctacctagccacgtgaagatcagcgtttccaggcagacgcttttcgaagattccttccaacagatcatgaacatgaaaccctatgacctgcgccgccggctctacatcatcatgcgtggcgaggagggcctggactatgggggcatcgccagagagtggtttttcctcctgtctcatgaggtgctcaaccctatgtattgtttatttgaatatgccggaaagaacaattactgcctgcagatcaaccccgcctcctccatcaacccggaccacctcacctactttcgctttataggcagattcatcgccatggcgctgtaccatggaaagttcatcgacacgggcttcaccctccctttctacaagcggatgctcaataagagaccaaccctgaaagacctggagtccattgaccctgagttctacaactccattgtctggatcaaagagaacaacctggaagaatgtggcctggagctgtacttcatccaggacatggagatactgggcaaggtgacgacccacgagctgaaggagggcggcgagagcatccgggtcacagaggagaacaaggaagagtacatcatgctgctgactgactggcgtttcacccgaggcgtggaagagcagaccaaagccttcctggatggcttcaacgaggtggccccgctggagtggctgcgctactttgacgagaaagagctggagctgatgctgtgcggcatgcaggagatagacatgagcgactggcagaagagcaccatctaccggcactacaccaagaacagcaagcagatccagtggttctggcaggtggtgaaggagatggacaacgagaagaggatccggctgctgcagtttgtcaccggtacctgccgcctgcccgtcgggggatttgccgaactcatcggtagcaacggaccacagaagttttgcattgacaaagttggcaaggaaacctggctgcccagaagccacacctgcttcaaccgtctggatcttccaccctacaagagctacgaacagctgagagagaagctgctgtatgccattgaggagaccgagggctttggacaggagtaaccgaggccgcccctcccacgccccccagcgcacatgtagtcctgagtcctccctgcctgagaggccactggccccgcagcccttgggaggcccccgtggatgtggccctgtgtgggaccacactgtcatctcgctgctggcagaaaagcctgatcccaggaggccctgcagttcccccgacccgcggatggcagtctggaataaagccccctagttgcctttggccccacctttgcaa

SEQ ID NO: 316065 - DNA, 4471 bp, Artificial Sequence
  derived and/or modified sequence
ggcggaagtaggagaggagttcggcgccgcttctgtggccacggcagcttcacggtgatgatatggcatctgccagctctagccgggcaggagtggccctgccttttgagaagtctcagctcactttgaaagtggtgtccgcaaagcccaaggtgcataatcgtcaacctcgaattaactcctacgtggaggtggcggtggatggactccccagtgagaccaagaagactgggaagcgcattgggagctctgagcttctctggaatgagatcatcattttgaatgtcacggcacagagtcatttagatttaaaggtctggagctgccataccttgagaaatgaactgctaggcaccgcatctgtcaacctctccaacgtcttgaagaacaatgggggcaaaatggagaacatgcagctgaccctgaacctgcagacggagaacaaaggcagcgttgtctcaggcggagagctgacaattttcctggacgggccaactgttgatctgggaaatgtgcctaatggcagtgccctgacagatggatcacagctgccttcgagagactccagtggaacagcagtagctccagagaaccggcaccagccccccagcacaaactgctttggtggaagatcccggacgcacagacattcgggtgcttcagccagaacaaccccagcaaccggcgagcaaagccccggtgctcggagccggcaccgccagcccgtcaagaactcaggccacagtggcttggccaatggcacagtgaatgatgaacccacaacagccactgatcccgaagaaccttccgttgttggtgtgacgtccccacctgctgcacccttgagtgtgaccccgaatcccaacacgacttctctccctgccccagccacaccggctgaaggagaggaacccagcacttcgggtacacagcagctcccagcggctgcccaggcccccgacgctctgcctgctggatgggaacagcgagagctgcccaacggacgtgtctattatgttgaccacaataccaagaccaccacctgggagcggccccttcctccaggctgggaaaaacgcacagatccccgaggcaggttttactatgtggatcacaatactcggaccaccacctggcagcgtccgaccgcggagtacgtgcgcaactatgagcagtggcagtcgcagcggaatcagctccagggggccatgcagcacttcagccaaagattcctctaccagtcttcgagtgcttcgactgaccatgatcccctgggccccctccctcctggctgggagaagagacaggacaatggacgggtgtattacgtgaaccataacactcgcacgacccagtgggaggatccccggacccaggggatgatccaggaaccagctctgcccccaggatgggagatgaaatacaccagcgagggggtgcgatactttgtggaccacaatacccgcaccaccacctttaaggatcctcgcccggggtttgagtcggggacgaagcaaggttcccctggtgcttatgaccgcagttttcggtggaagtatcaccagttccgtttcctctgccattcaaatgccctacctagccacgtgaagatcagcgtttccaggcagacgcttttcgaagattccttccaacagatcatgaacatgaaaccctatgacctgcgccgccggctctacatcatcatgcgtggcgaggagggcctggactatgggggcatcgccagagagtggtttttcctcctgtctcatgaggtgctcaaccctatgtattgtttatttgaatatgccggaaagaacaattactgcctgcagatcaaccccgcctcctccatcaacccggaccacctcacctactttcgctttataggcagattcatcgccatggcgctgtaccatggaaagttcatcgacacgggcttcaccctccctttctacaagcggatgctcaataagagaccaaccctgaaagacctggagtccattgaccctgagttctacaactccattgtctggatcaaagagaacaacctggaagaatgtggcctggagctgtacttcatccaggacatggagatactgggcaaggtgacgacccacgagctgaaggagggcggcgagagcatccgggtcacagaggagaacaaggaagagtacatcatgctgctgactgactggcgtttcacccgaggcgtggaagagcagaccaaagccttcctggatggcttcaacgaggtggccccgctggagtggctgcgctactttgacgagaaagagctggagctgatgctgtgcggcatgcaggagatagacgcgactggcagaagagcaccatctaccggcactacaccaagaacagcaagcagatccagtggttctggcaggtggtgaaggagatggacaacgagaagaggatccggctgctgcagtttgtcaccggtacctgccgcctgcccgtcgggggatttgccgaactcatcggtagcaacggaccacagaagttttgcattgacaaagttggcaaggaaacctggctgcccagaagccacacctgcttcaaccgtctggatcttccaccctacaagagctacgaacagctgagagagaagctgctgtatgccattgaggagaccgagggctttggacaggagtaaccgaggccgcccctcccacgccccccagcgcacatgtagtcctgagtcctccctgcctgagaggccactggccccgcagcccttgggaggcccccgtggatgtggccctgtgtgggaccacactgtcatctcgctgctggcagaaaagcctgatcccaggaggccctgcagttcccccgacccgcggatggcagtctggaataaagccccctagttgcctttggccccacctttgcaaagttccagagggctgaccctctctgcaaaactctcccctgtcctctagaccccaccctgggtgtatgtgagtgtgcaagggaaggtgttgcatccccaggggctgccgcagaggccggagacctcctggactagttcggcgaggagactggccactgggggtggctgttcgggactgagagcgccaagggtctttgccagcaaaggaggttctgcctgtaattgagcctctctgatgatggagatgaagtgaaggtctgagggagcgggccctggggcgaggccatctctgcctgcctccctagcaggcgccagcggtggaggctgagtcgcaggacacatgccggccagttaattcattctcagccaatgaaggtttgtctaagctgcctgggtatccacgggacaaaaacagcaaactccctcagactttgtccatgtataaacttgaagtggttgtgttgtagggttgcaggttttttgttacgctgctgtcactttctgtccaggagctggcaccccaggtgttctgagaccttgagggacccagacctttgggtccaagagtttcccaaacagccacgcctctcaggaacccacctggcggttccgtgagctcaggcaggcctgacccggcggcacagcctggcagggacctcgtccccaagcctggcagaatgagaggggttgaggtcccgagcgccactcctagccttgccgccttcaatagagaagaaatccctttgctagatagggtcccccaggcagtccccagtggcgggacacaggggtccggctgtggagctcccctgccagcccctggagctccaggagggcctgttggtcccctgttcagaatggagtgcagcccgccagcggaaagtgttcattctgcataggtgtgaggctttatctgcacacaggacatgaaaaccagcagaaaggccctgagctgctgcatagccccatctgatttctgcagttcccgccagcctccaacacggggactctgccgtaactggaatcttcataggtcatattgaaatcttcaaggtgaccatgccccaccggggtgctggggcagtagtcatggcagactcccggcctgggcccccaggattctaggacccccaggcagccccttggactggtcccgggtgccttccaagcacagtctccatgctcccagattctcgaccttcccccggcccgggaggtgcagcctgcgtctgcctctgtcgtgtgtgctgatttgagtggcttagcttgccacagcgcagcctcttctgtccctttcagtcatttgctgtacttccctgtggcacgttaccatggaagccgctccagggtgggtcagggtgcaagctgctggtgaggtttggaagcatcaggctcacgggtgttcatgtgtgttcgtgcgtgtgtgtgcgtacgtgtatataactgaagtgtctgtacggaatgccctttgctagccatgggctggtcaccagattgttttgtaatgcccgccccttgcctcgatattgccagtttcttgtgcaataaacaatcagcagctgt

SEQ ID NO: 316066 - DNA, 2265 bp, Artificial Sequence
  derived and/or modified sequence
atgcagctgaccctgaacctgcagaccgagaacaagggcagcgtggtgagcggcggcgagctgaccatcttcctggacggccccaccgtggacctgggcaacgtgcccaacggcagcgccctgaccgacggcagccagctgcccagcagagacagcagcggcaccgccgtggcccccgagaacagacaccagccccccagcaccaactgcttcggcggcagaagcagaacccacagacacagcggcgccagcgccagaaccacccccgccaccggcgagcagagccccggcgccagaagcagacacagacagcccgtgaagaacagcggccacagcggcctggccaacggcaccgtgaacgacgagcccaccaccgccaccgaccccgaggagcccagcgtggtgggcgtgaccagcccccccgccgcccccctgagcgtgacccccaaccccaacaccaccagcctgcccgcccccgccacccccgccgagggcgaggagcccagcaccagcggcacccagcagctgcccgccgccgcccaggcccccgacgccctgcccgccggctgggagcagagagagctgcccaacggcagagtgtactacgtggaccacaacaccaagaccaccacctgggagagacccctgccccccggctgggagaagagaaccgaccccagaggcagattctactacgtggaccacaacaccagaaccaccacctggcagagacccaccgccgagtacgtgagaaactacgagcagtggcagagccagagaaaccagctgcagggcgccatgcagcacttcagccagagattcctgtaccagagcagcagcgccagcaccgaccacgaccccctgggccccctgccccccggctgggagaagagacaggacaacggcagagtgtactacgtgaaccacaacaccagaaccacccagtgggaggaccccagaacccagggcatgatccaggagcccgccctgccccccggctgggagatgaagtacaccagcgagggcgtgagatacttcgtggaccacaacaccagaaccaccaccttcaaggaccccagacccggcttcgagagcggcaccaagcagggcagccccggcgcctacgacagaagcttcagatggaagtaccaccagttcagattcctgtgccacagcaacgccctgcccagccacgtgaagatcagcgtgagcagacagaccctgttcgaggacagcttccagcagatcatgaacatgaagccctacgacctgagaagaagactgtacatcatcatgagaggcgaggagggcctggactacggcggcatcgccagagagtggttcttcctgctgagccacgaggtgctgaaccccatgtactgcctgttcgagtacgccggcaagaacaactactgcctgcagatcaaccccgccagcagcatcaaccccgaccacctgacctacttcagattcatcggcagattcatcgccatggccctgtaccacggcaagttcatcgacaccggcttcaccctgcccttctacaagagaatgctgaacaagagacccaccctgaaggacctggagagcatcgaccccgagttctacaacagcatcgtgtggatcaaggagaacaacctggaggagtgcggcctggagctgtacttcatccaggacatggagatcctgggcaaggtgaccacccacgagctgaaggagggcggcgagagcatcagagtgaccgaggagaacaaggaggagtacatcatgctgctgaccgactggagattcaccagaggcgtggaggagcagaccaaggccttcctggacggcttcaacgaggtggcccccctggagtggctgagatacttcgacgagaaggagctggagctgatgctgtgcggcatgcaggagatcgacatgagcgactggcagaagagcaccatctacagacactacaccaagaacagcaagcagatccagtggttctggcaggtggtgaaggagatggacaacgagaagagaatcagactgctgcagttcgtgaccggcacctgcagactgcccgtgggcggcttcgccgagctgatcggcagcaacggcccccagaagttctgcatcgacaaggtgggcaaggagacctggctgcccagaagccacacctgcttcaacagactggacctgcccccctacaagagctacgagcagctgagagagaagctgctgtacgccatcgaggagaccgagggcttcggccaggagtag

SEQ ID NO: 316067 - DNA, 1296 bp, Artificial Sequence
  derived and/or modified sequence
atgatccaggagcccgccctgccccccggctgggagatgaagtacaccagcgagggcgtgagatacttcgtggaccacaacaccagaaccaccaccttcaaggaccccagacccggcttcgagagcggcaccaagcagggcagccccggcgcctacgacagaagcttcagatggaagtaccaccagttcagattcctgtgccacagcaacgccctgcccagccacgtgaagatcagcgtgagcagacagaccctgttcgaggacagcttccagcagatcatgaacatgaagccctacgacctgagaagaagactgtacatcatcatgagaggcgaggagggcctggactacggcggcatcgccagagagtggttcttcctgctgagccacgaggtgctgaaccccatgtactgcctgttcgagtacgccggcaagaacaactactgcctgcagatcaaccccgccagcagcatcaaccccgaccacctgacctacttcagattcatcggcagattcatcgccatggccctgtaccacggcaagttcatcgacaccggcttcaccctgcccttctacaagagaatgctgaacaagagacccaccctgaaggacctggagagcatcgaccccgagttctacaacagcatcgtgtggatcaaggagaacaacctggaggagtgcggcctggagctgtacttcatccaggacatggagatcctgggcaaggtgaccacccacgagctgaaggagggcggcgagagcatcagagtgaccgaggagaacaaggaggagtacatcatgctgctgaccgactggagattcaccagaggcgtggaggagcagaccaaggccttcctggacggcttcaacgaggtggcccccctggagtggctgagatacttcgacgagaaggagctggagctgatgctgtgcggcatgcaggagatcgacatgagcgactggcagaagagcaccatctacagacactacaccaagaacagcaagcagatccagtggttctggcaggtggtgaaggagatggacaacgagaagagaatcagactgctgcagttcgtgaccggcacctgcagactgcccgtgggcggcttcgccgagctgatcggcagcaacggcccccagaagttctgcatcgacaaggtgggcaaggagacctggctgcccagaagccacacctgcttcaacagactggacctgcccccctacaagagctacgagcagctgagagagaagctgctgtacgccatcgaggagaccgagggcttcggccaggagtag

SEQ ID NO: 316068 - DNA, 2265 bp, Artificial Sequence
  derived and/or modified sequence
atgcagctcacgttgaacctgcaaactgagaataagggcagcgtggtctctggtggtgaactgacaatctttctcgatggacctactgttgacctgggcaacgtgcctaacggatcggctctgacggatggttcccagttgccttccagggatagctccgggacggctgtcgctcccgagaacaggcaccagcctccctctactaattgtttcggggggcgcagtagaactcatagacactccggagcttccgcgcggactactccggccacgggtgagcagagccccggcgcccggagtcgacacagacagccggttaaaaattctggtcatagcgggctggcaaacggcaccgttaacgacgagcccaccactgctacagatccggaggagccgagcgtggtgggcgtgacttctccacctgccgcacccctctctgtaacacccaatcctaataccacaagcctgccagcacctgctactcccgctgagggagaggagccttccacctctgggacccaacagttgcctgcagctgcccaggcaccagacgcattacccgcagggtgggagcagcgggaattacccaatggccgtgtgtattacgtggaccacaacaccaagactacaacgtgggaacgacctttgccccccggatgggagaagcgaactgacccccgggggcgcttctactacgttgatcataatacgagaaccacgacatggcagcgccctactgccgagtacgtcaggaactatgaacaatggcagagtcagcgcaatcaactccagggagccatgcagcatttctctcagcgtttcttgtatcagagctcttctgccagcacagaccacgaccctcttggacctttgcctcccgggtgggaaaaacgtcaggacaatgggagggtatactatgtcaaccacaatacccgcactactcagtgggaggatcctagaactcaaggaatgattcaggaacctgcactccccccaggctgggagatgaagtatacaagtgagggcgtgcggtatttcgttgaccacaacactcggactaccacatttaaagatcccagaccaggcttcgagtcgggaaccaaacagggctctcccggcgcttacgaccggagttttcggtggaagtatcatcagtttagattcctctgccattcaaatgccttgccgtcccacgtcaaaatcagtgtgtcgcgtcagacattgttcgaagattccttccagcagattatgaatatgaagccttacgacctccggagaaggctttatataatcatgcgcggcgaagagggtctcgactacggaggcattgccagagaatggttctttctcctttcccacgaggtcctaaatccaatgtactgcctcttcgaatatgcgggcaagaataactactgtctgcaaatcaaccctgcatcctcaatcaaccccgatcacctgacctatttcagatttattggccgattcatcgcaatggctctctaccacggaaagtttatagatacgggctttaccctcccattttacaagagaatgctgaataaacggcctacccttaaagatttggaatcaattgatcccgagttttataatagcattgtatggatcaaagaaaataacctcgaagagtgcggactggagctttactttattcaagatatggagatcctggggaaagtaacaacacatgagctcaaggagggaggggaaagcattcgggtcaccgaagagaacaaggaagagtacattatgctccttactgactggaggttcacgagaggggtcgaggagcagacaaaagcctttctggacggcttcaatgaagtggccccgctggaatggctgaggtacttcgatgagaaggaacttgagctgatgctttgcgggatgcaagaaatcgatatgagtgattggcagaagtctacgatatatcgccattacacaaagaactctaagcagatccagtggttctggcaagtggtgaaggagatggacaacgagaaaaggattcggctcctgcaatttgttaccgggacgtgtagactgccagtaggtggctttgcggagttgatagggtccaatggcccacagaagttttgcattgataaagttggtaaggagacgtggttaccacgctctcacacttgtttcaaccggttggacctgccaccttacaagtcctacgagcagctgcgagagaaactgctttacgccatcgaggagacagaaggtttcggacaggagtag

SEQ ID NO: 316069 - DNA, 1296 bp, Artificial Sequence
  derived and/or modified sequence
atgatccaggaacccgcgttgcctccaggctgggagatgaagtatacttctgaaggtgtacgttactttgtggaccataacacccgaaccacaacattcaaagaccccagacctggcttcgagagcggcaccaaacaagggtctccaggagcttacgataggtccttccggtggaaataccatcaattcagattcctctgccacagtaacgccttgccctcccatgtcaagatctccgtctcgcgccaaaccctctttgaggattcgttccagcagattatgaacatgaagccctacgatctacgccgcaggttatacattatcatgcgaggagaggagggcctagactatgggggcatcgccagggaatggttcttcttgttaagccacgaggtgcttaatcctatgtactgcttgttcgagtacgctggtaagaacaattactgtctgcagatcaatcctgcctcgtccataaaccctgaccaccttacctatttccggttcatcgggaggttcattgcgatggccctataccacggaaagtttatcgacaccggtttcaccctgccattctacaaacggatgttgaacaaaaggccaaccctaaaagacctggaatccatcgaccctgaattctataattctatcgtgtggatcaaagagaataacctggaagagtgtggcctggagctttacttcatccaggacatggaaattctgggcaaggtcaccacccacgaactgaaagagggcggggaatcaatacgtgttacagaagagaataaagaggaatacattatgcttctcaccgactggagattcacgagaggagtggaagaacagactaaagctttcctcgatgggttcaatgaagttgcgcccttggaatggctgcgctactttgatgagaaggagttagagctgatgctatgcggaatgcaggaaattgacatgtcggactggcaaaagagcacgatttacagacattacacgaaaaactcaaagcagatccagtggttctggcaagtagtgaaggagatggataacgaaaagcgcattcgactgctgcagttcgtgaccggcacatgtcggctccctgtgggcgggttcgccgagcttatcggctctaatggccctcagaagttctgcatcgataaagttggaaaggagacgtggctgccaagaagccacacttgctttaacaggctggacctacccccgtacaaatcttatgagcagctccgagaaaaactcttatatgccatcgaggagaccgaaggctttgggcaggagtag

SEQ ID NO: 316070 - DNA, 2265 bp, Artificial Sequence
  derived and/or modified sequence
atgcagctgaccctgaacctgcagacagagaacaagggctctgtggtgtctggaggagagctgaccatcttcctggatggccccaccgtggacctgggcaatgtgcccaatggaagtgccctgacagatggcagccagctgcccagccgggacagcagcggcacagctgtggcccctgagaacagacaccagccccccagcaccaactgctttggaggccgcagcaggacccaccgccacagcggggccagcgcccggaccaccccagccactggagagcagagccctggggcccggagccgccaccggcagcctgtgaagaacagcggccacagcggcctggccaacggcaccgtgaatgatgagcccaccacagccacagatcctgaggagcccagcgtggtgggcgtgaccagccccccagctgcccccctgtctgtgacccccaaccccaacaccaccagcctgcctgccccagccaccccagctgagggggaggagcccagcaccagcggcacccagcagctgcctgctgctgcccaggccccagatgccctgcctgctggctgggagcagcgggagctgcccaacggccgggtgtactacgtggaccacaacaccaagaccaccacctgggagcggcccctgcccccaggctgggagaagaggacagacccccggggccgcttctactacgtggaccacaacaccaggaccaccacctggcagaggcccacagcagaatatgtgagaaattatgagcagtggcagagccagaggaaccagctgcagggcgccatgcagcacttcagccagcgcttcctgtaccagagcagcagcgccagcacagaccatgaccccctgggccccctgcccccaggctgggagaagaggcaggacaatggccgggtgtactacgtgaaccacaacaccaggaccacccagtgggaggaccccaggacccagggcatgatccaggagcccgccctgcccccaggctgggagatgaagtacaccagcgagggcgtgcgctactttgtggaccacaacaccaggaccaccaccttcaaggaccccaggcctggctttgaaagtggcaccaagcagggcagccctggggcctatgacaggagcttccgctggaagtaccaccagttccgcttcctgtgccacagcaatgccctgcccagccacgtgaagatctctgtgtcccggcagaccctgtttgaggacagcttccagcagatcatgaacatgaagccctatgacctgcggcggcggctgtacatcatcatgagaggagaggagggcctggactatggaggcatcgcccgggagtggttcttcctgctgagccatgaggtgctgaaccccatgtactgcctgtttgaatatgctgggaagaacaactactgcctgcagatcaacccagccagcagcatcaacccagaccacctgacctacttccgcttcatcggccgcttcatcgccatggccctgtaccacggcaagttcatcgacaccggcttcaccctgcccttctacaagaggatgctgaacaagaggcccaccctgaaggacctggagagcattgatcctgagttctacaacagcatcgtgtggatcaaggagaacaacctggaggagtgtggcctggagctgtacttcatccaggacatggagatcctgggcaaggtgaccacccatgagctgaaggagggcggggagagcatccgggtgacagaggagaacaaggaggagtacatcatgctgctgacagactggaggttcacccggggcgtggaggagcagaccaaggccttcctggatggcttcaatgaggtggcccccctggagtggctgcgctactttgatgagaaggagctggagctgatgctgtgtggcatgcaggagattgacatgtctgactggcagaagagcaccatctaccgccactacaccaagaacagcaagcagatccagtggttctggcaggtggtgaaggagatggacaatgagaagaggatccggctgctgcagtttgtgacaggcacctgccgcctgcctgtgggcggctttgctgagctgattggcagcaatggcccccagaagttctgcatcgacaaggtgggcaaggagacctggctgcccaggagccacacctgcttcaaccggctggacctgcccccctacaagagctatgagcagctgcgggagaagctgctgtatgccatcgaggagacagagggcttcggccaggagtag

SEQ ID NO: 316071 - DNA, 1296 bp, Artificial Sequence
  derived and/or modified sequence
atgatccaggagcccgccctgcccccaggctgggagatgaagtacaccagcgagggcgtgcgctactttgtggaccacaacaccaggaccaccaccttcaaggacccccggcccggctttgagagcggcaccaagcagggcagccctggggcctatgaccgctccttccgctggaagtaccaccagttccgcttcctgtgccacagcaatgccctgcccagccacgtgaagatctctgtgtcccggcagaccctgtttgaagattccttccagcagatcatgaacatgaagccctatgacctgcggcggcggctgtacatcatcatgagaggagaggagggcctggactatggaggcatcgcccgggagtggttcttcctgctgagccatgaggtgctgaaccccatgtactgcctgtttgaatatgccggcaagaacaactactgcctgcagatcaacccagccagcagcatcaacccagaccacctgacctacttccgcttcatcggccgcttcatcgccatggccctgtaccacggcaagttcatcgacaccggcttcaccctgcccttctacaagaggatgctgaacaagaggcccaccctgaaggacctggagagcattgatcctgagttctacaacagcatcgtgtggatcaaggagaacaacctggaggagtgtggcctggagctgtacttcatccaggacatggagatcctgggcaaggtgaccacccatgagctgaaggagggcggggagagcatccgggtgacagaggagaacaaggaggagtacatcatgctgctgacagactggaggttcacccggggcgtggaggagcagaccaaggccttcctggatggcttcaatgaggtggcccccctggagtggctgcgctactttgatgagaaggagctggagctgatgctgtgtggcatgcaggagattgacatgtctgactggcagaagagcaccatctaccgccactacaccaagaacagcaagcagatccagtggttctggcaggtggtgaaggagatggacaatgagaagaggatccggctgctgcagtttgtgacaggcacctgccgcctgcctgtgggcggctttgctgagctgattggcagcaatggcccccagaagttctgcatcgacaaggtgggcaaggagacctggctgcccaggagccacacctgcttcaaccggctggacctgcccccctacaagagctatgagcagctgcgggagaagctgctgtatgccatcgaggagacagagggcttcggccaggagtag

SEQ ID NO: 316072 - DNA, 2265 bp, Artificial Sequence
  derived and/or modified sequence
atgcagctgaccctgaacctgcagaccgagaacaagggcagcgtggtctcaggtggggagctgactatatttctggacggtcctactgtcgacctgggcaatgtcccgaacgggagcgcattgacagatggatcccagcttccctccagggactcttcaggaacggccgttgcgccagagaatcggcaccaaccccccagtaccaactgttttggcggtcggagccgcacacatcggcatagtggtgcttccgcccgaaccaccccagccacaggtgaacagagccccggagcaagatccaggcaccgacagccggtgaaaaacagtggacactcaggcttagccaacgggactgttaacgatgaacccaccacagccaccgacccggaggaaccgtctgtcgttggagtgacaagccctccagctgcacccctgtcggtgacccccaatccgaatacgacgagcctccccgctcccgccactccagccgaaggtgaagagccgtctacctcaggtacccagcagctacccgcagccgcccaggcgcctgacgccttgcccgcagggtgggaacagagggaattgcccaacggcagggtttattatgtggaccacaacactaagacgacaacttgggaacggccactgccccccggttgggagaagaggactgatccacgaggaagattctattatgttgaccataacacaaggacgactacttggcagagaccaactgcagagtacgtccggaactatgagcagtggcaaagtcagagaaatcagctgcagggggcgatgcaacattttagccagcgcttcctgtaccagagctcaagcgcatctactgaccacgaccccttgggacctctgcctcccggctgggaaaagcgacaagacaacgggagggtgtattacgttaatcacaacactaggacaacccagtgggaagatccaagaacccagggtatgatccaagaaccggctcttcctcccgggtgggaaatgaaatacacatcagagggggtacgatattttgtggatcataataccagaactactactttcaaggaccctcgacctggattcgagagcggtacgaagcagggttcgcctggggcgtacgatcggagctttagatggaagtaccaccaattcaggttcttatgccactcaaacgccctaccatcacatgtgaaaatcagcgtgtctaggcaaactctattcgaggattcctttcagcagattatgaatatgaagccttatgatctgaggcggagactgtacatcatcatgagaggagaggaggggctggactacggaggaatagcgagagagtggttttttcttctgagtcacgaggtactcaacccaatgtactgcctgttcgagtatgctggaaagaataattactgtctacagattaatccggcttccagcattaatcctgatcacctgacatactttagattcatcggacggtttatcgccatggcgctctatcacggcaaatttattgacacgggattcaccctgccattctacaagcgcatgctcaataaacggcctacactgaaagatctcgaatccattgacccggagttctacaattctatcgtgtggattaaggaaaacaatttggaagagtgtggcctggagttatatttcattcaagatatggagattctggggaaggtcactactcacgaattgaaagagggcggcgagagtattcgcgtcactgaagaaaataaagaagaatacataatgctgctgacggactggcgatttacccgcggcgtcgaggagcaaaccaaggcctttcttgatggtttcaacgaagtagcccctctcgaatggctgcgctattttgacgaaaaggagctagagctgatgttatgtggaatgcaagaaatcgacatgtccgactggcaaaaatcaacaatatatcggcattacaccaagaattccaagcagattcagtggttctggcaggtggtgaaggagatggacaatgagaagcgcatcagacttctccagttcgtaaccggcacatgtcgactgccagtgggggggtttgccgagctgatcggttcaaatggccctcaaaaattctgtatagacaaggtcgggaaagagacctggctgcctcgcagccatacatgcttcaacagattggatctccccccatacaagtcatatgaacagcttagggagaagctactctatgccattgaagagaccgaggggttcgggcaagagtag

SEQ ID NO: 316073 - DNA, 1296 bp, Artificial Sequence
  derived and/or modified sequence
atgatccaggagcccgccctgccccccggctgggagatgaagtacacatcagagggtgtgagatattttgtggatcataacacaaggaccaccaccttcaaagatccacgccctgggttcgaatccggtacaaaacagggctctccaggtgcttacgatcgctccttcagatggaaatatcaccagttcagattcctgtgccactcaaatgcgctcccatcacatgttaaaatttccgttagccggcagaccctcttcgaagattccttccagcagatcatgaatatgaagccatacgatctgcgccgcaggctctacatcatcatgcgtggcgaggagggcctggactatggcggcattgctagggagtggtttttcctgctctctcacgaagtgctgaaccccatgtactgcctgtttgaatacgccggtaagaataactactgcttacagatcaaccctgcctctagcataaatcccgatcacctcacgtactttcgcttcataggccggttcatcgcaatggccctttaccacggaaagttcatagacacaggcttcactctgccattctataagaggatgctcaataaaaggcctactctcaaggatctagagtccattgatccagaattctataattccatcgtttggattaaggaaaataatctcgaggagtgtggacttgaattgtactttatccaggatatggagatcctgggaaaggtgacaacccacgaactgaaggagggtggcgagtcaataagggtaaccgaagaaaacaaagaagagtatatcatgctgctcacagattggcgattcacacggggagttgaagaacagacaaaggctttcttggacggcttcaatgaggtagcccccctcgaatggttacgttatttcgatgagaaggagttggaacttatgctgtgcgggatgcaggagatagatatgagtgattggcagaaaagtaccatctatcgccactacaccaagaactccaaacagattcaatggttctggcaggtcgttaaggagatggataacgaaaaacgcatccgcctgctccaatttgtaacaggcacctgccgactccccgtaggcgggttcgctgagctgattggctcaaacggtcctcagaagttttgtatcgataaagtcggaaaggaaacctggttgccaaggagccacacctgcttcaacagattagatctcccaccctataagagctacgagcaactgcgtgagaagctgttgtacgctatcgaggagactgaaggctttggccaagagtag

SEQ ID NO: 316074 - DNA, 2265 bp, Artificial Sequence
  derived and/or modified sequence
atgcagttgactctgaatctgcagacagaaaacaaaggcagcgttgtcagcggaggagaactgaccatcttcctcgacggtccaactgtggacctcggcaacgtgcctaatgggagcgccctcactgatggctcccagctgccttcaagggactccagtggaactgccgtcgcccctgaaaatagacatcagcctcccagcacaaactgttttggcggaagaagtagaacccatcggcatagcggtgcctccgcccgtaccactcctgcgaccggcgaacaaagccccggagccaggtcgagacacaggcagccggtgaaaaattctgggcattccggcctggctaacggtacggtgaatgatgaacctactactgcgacagatcccgaagagccatccgtcgtgggagtaacctccccgccagccgcaccgctgtctgtcaccccaaaccctaataccacgtcccttccggctcccgcaactccagctgagggcgaggagccttctacatctggaacacagcaactgccagcagcggctcaggcccctgacgccctgccagctggctgggaacagagggagctgccgaacggcagagtatattatgtcgaccataacactaagacaaccacctgggaacggccacttcccccaggatgggagaaaaggactgatccacgaggacgattttactacgtggaccacaataccagaacaacaacttggcaacgtccgacagccgagtacgtgcggaattacgagcagtggcagtcacaaagaaatcagctgcagggggctatgcagcacttttctcagagatttctgtatcagagctcgtcagcctcaacagaccatgatcctctgggccctctgcctccagggtgggagaagagacaggacaatggtcgggtctattacgtaaatcataataccagaaccacacagtgggaggatcccaggacccaaggcatgatacaggagccggctctacctcccggatgggaaatgaagtatacaagtgagggcgtgaggtactttgtcgaccataatacacggaccacaacctttaaagacccgaggcctggttttgagtcaggcactaagcagggtagcccaggagcatacgaccgttcatttagatggaagtaccaccagttcagattcctgtgccatagtaatgcactacccagccatgtcaaaatcagcgttagccgtcagacactgttcgaggactcctttcaacagataatgaatatgaaaccttatgatctgcgcaggagattatatataattatgcggggtgaagagggcctagattatggcggtatagcacgcgaatggttcttcttgctcagtcatgaggttttgaaccctatgtattgcctgttcgagtatgctgggaagaacaattactgcctccagatcaatcctgctagctcgatcaatcccgatcatctgacctattttagattcatcggtcggttcattgcaatggctctgtatcacggtaaattcattgataccggttttactcttccattttacaagagaatgctgaataagcgcccaaccctgaaagatctggaatctattgatccagagttctacaactctatagtgtggatcaaggaaaacaacctggaggaatgtggattagagctgtattttattcaggacatggaaatcctcgggaaagtgacaacacacgagctgaaagaggggggagaaagtattcgtgtgacggaagagaataaggaggagtacattatgctgctaaccgactggcgtttcacaagaggtgttgaggagcagactaaggcatttctggatgggtttaacgaagtagcacccctcgagtggctccgatattttgacgagaaggagctagagctcatgctatgcggaatgcaggagatagatatgtctgactggcagaaaagcaccatctaccgtcactataccaaaaattctaagcagatccagtggttttggcaggtggtgaaggaaatggataatgaaaagagaataagacttcttcagtttgtcaccggcacgtgtaggttgcccgttggcggattcgccgaattaatcgggagtaatgggccacaaaaattttgcattgataaggttggtaaagagacatggcttcctcgcagccatacctgtttcaacagactcgacctccccccatacaaatcttatgaacaactgcgggaaaagctactctatgccatcgaggaaacggaagggttcgggcaggaatag

SEQ ID NO: 316075 - DNA, 1296 bp, Artificial Sequence
  derived and/or modified sequence
atgatccaggagccagccttaccacctggctgggaaatgaagtacacatctgaaggagtgagatatttcgttgaccacaacactaggactaccacctttaaagatccacgcccaggctttgagtctggcaccaaacaagggagtcctggggcatatgatcggagcttccgatggaagtatcaccaatttcggtttctttgccattctaacgctttgcccagccacgtcaagatatctgtcagtaggcagacccttttcgaggattccttccaacagatcatgaatatgaaaccctatgacttacgcaggcggctgtacattataatgcgcggagaagaggggctagactatggcggaatcgcgagggagtggttttttctactgagtcacgaggttctgaatcccatgtattgtctgttcgagtacgctggaaagaataactactgcctacaaatcaatcctgcgtcatccattaatccagatcaccttacctactttcgcttcatagggagattcatcgctatggctctctaccacggaaagtttatcgatacaggattcaccctgcccttctataaaagaatgctcaataagagaccgacactgaaagatctcgagtcaatcgacccagaattttataactctatcgtttggataaaggaaaacaacctggaagagtgcggactggaattgtatttcatccaggacatggaaattctcggtaaggttaccacccacgaactcaaggaaggcggtgagagtattcgcgtcacagaggaaaataaagaagaatacatcatgctgctgacagactggagattcactcgcggagttgaggaacagacgaaggccttcctggacggatttaatgaggttgccccacttgaatggttgagatatttcgatgagaaagaattggaactgatgctgtgcgggatgcaggagattgatatgtccgactggcaaaagtctacgatctatcggcactatactaaaaacagtaagcagatccagtggttctggcaggtggttaaggagatggacaacgagaagagaatacgcttgctccagtttgtgacgggtacatgtcgattgccagtcgggggattcgccgagttgattggctctaacggtccccagaaattttgtatcgataaagtcggcaaggaaacgtggctccctcggagtcatacttgctttaacagacttgatttgccaccatataaatcctacgaacagctgcgggagaagctactgtacgccatcgaagagaccgaagggtttggccaggagtag

SEQ ID NO: 316076 - DNA, 3672 bp, Artificial Sequence
  derived and/or modified sequence
cccctcctgcgtgtggttcttggagaaagttggaggtggtggtgatttcagtcgccttggccgccttgagccggagctgagcggaggcactgggccgagcctgcttcccgggccttcctaccatgccagggctgctccctgcctccgccaccctggcacaccttcacccgcgtaccgcctcctccccgtcgctctgccttttccaaaactcacttgggccctccgtgcgcagggttcttttttggtttttctgtaaaaatcaaaacaaaaaacagagacttttgagaggagcagatgccacctaaagtcccactgcattccctgcaaagcgctcaaatgtggaagccagtcattggcatttttattttttattgattgattgattttttcaccagtggctttttgtaacctctgtgttctgctgtgtttcttgtgtttagtcttcgagtgcttcgactgaccatgatcccctgggccccctccctcctggctgggagaagagacaggacaatggacgggtgtattacgtgaaccataacactcgcacgacccagtgggaggatccccggacccaggggatgatccaggaaccagctctgcccccaggatgggagatgaaatacaccagcgagggggtgcgatactttgtggaccacaatacccgcaccaccacctttaaggatcctcgcccggggtttgagtcggggacgaagcaaggttcccctggtgcttatgaccgcagttttcggtggaagtatcaccagttccgtttcctctgccattcaaatgccctacctagccacgtgaagatcagcgtttccaggcagacgcttttcgaagattccttccaacagatcatgaacatgaaaccctatgacctgcgccgccggctctacatcatcatgcgtggcgaggagggcctggactatgggggcatcgccagagagtggtttttcctcctgtctcatgaggtgctcaaccctatgtattgtttatttgaatatgccggaaagaacaattactgcctgcagatcaaccccgcctcctccatcaacccggaccacctcacctactttcgctttataggcagattcatcgccatggcgctgtaccatggaaagttcatcgacacgggcttcaccctccctttctacaagcggatgctcaataagagaccaaccctgaaagacctggagtccattgaccctgagttctacaactccattgtctggatcaaagagaacaacctggaagaatgtggcctggagctgtacttcatccaggacatggagatactgggcaaggtgacgacccacgagctgaaggagggcggcgagagcatccgggtcacagaggagaacaaggaagagtacatcatgctgctgactgactggcgtttcacccgaggcgtggaagagcagaccaaagccttcctggatggcttcaacgaggtggccccgctggagtggctgcgctactttgacgagaaagagctggagctgatgctgtgcggcatgcaggagatagacatgagcgactggcagaagagcaccatctaccggcactacaccaagaacagcaagcagatccagtggttctggcaggtggtgaaggagatggacaacgagaagaggatccggctgctgcagtttgtcaccggtacctgccgcctgcccgtcgggggatttgccgaactcatcggtagcaacggaccacagaagttttgcattgacaaagttggcaaggaaacctggctgcccagaagccacacctgcttcaaccgtctggatcttccaccctacaagagctacgaacagctgagagagaagctgctgtatgccattgaggagaccgagggctttggacaggagtaaccgaggccgcccctcccacgccccccagcgcacatgtagtcctgagtcctccctgcctgagaggccactggccccgcagcccttgggaggcccccgtggatgtggccctgtgtgggaccacactgtcatctcgctgctggcagaaaagcctgatcccaggaggccctgcagttcccccgacccgcggatggcagtctggaataaagccccctagttgcctttggccccacctttgcaaagttccagagggctgaccctctctgcaaaactctcccctgtcctctagaccccaccctgggtgtatgtgagtgtgcaagggaaggtgttgcatccccaggggctgccgcagaggccggagacctcctggactagttcggcgaggagactggccactgggggtggctgttcgggactgagagcgccaagggtctttgccagcaaaggaggttctgcctgtaattgagcctctctgatgatggagatgaagtgaaggtctgagggagcgggccctggggcgaggccatctctgcctgcctccctagcaggcgccagcggtggaggctgagtcgcaggacacatgccggccagttaattcattctcagccaatgaaggtttgtctaagctgcctgggtatccacgggacaaaaacagcaaactccctcagactttgtccatgtataaacttgaagtggttgtgttgtagggttgcaggttttttgttacgctgctgtcactttctgtccaggagctggcaccccaggtgttctgagaccttgagggacccagacctttgggtccaagagtttcccaaacagccacgcctctcaggaacccacctggcggttccgtgagctcaggcaggcctgacccggcggcacagcctggcagggacctcgtccccaagcctggcagaatgagaggggttgaggtcccgagcgccactcctagccttgccgccttcaatagagaagaaatccctttgctagatagggtcccccaggcagtccccagtggcgggacacaggggtccggctgtggagctcccctgccagcccctggagctccaggagggcctgttggtcccctgttcagaatggagtgcagcccgccagcggaaagtgttcattctgcataggtgtgaggctttatctgcacacaggacatgaaaaccagcagaaaggccctgagctgctgcatagccccatctgatttctgcagttcccgccagcctccaacacggggactctgccgtaactggaatcttcataggtcatattgaaatcttcaaggtgaccatgccccaccggggtgctggggcagtagtcatggcagactcccggcctgggcccccaggattctaggacccccaggcagccccttggactggtcccgggtgccttccaagcacagtctccatgctcccagattctcgaccttcccccggcccgggaggtgcagcctgcgtctgcctctgtcgtgtgtgctgatttgagtggcttagcttgccacagcgcagcctcttctgtccctttcagtcatttgctgtacttccctgtggcacgttaccatggaagccgctccagggtgggtcagggtgcaagctgctggtgaggtttggaagcatcaggctcacgggtgttcatgtgtgttcgtgcgtgtgtgtgcgtacgtgtatataactgaagtgtctgtacggaatgccctttgctagccatgggctggtcaccagattgttttgtaatgcccgccccttgcctcgatattgccagtttcttgtgcaataaacaatcagcagct

SEQ ID NO: 316077 - DNA, 2504 bp, Artificial Sequence
  derived and/or modified sequence
atcattcccttactcgaatgaattaaagtacaggattggggctaaataatgtgagtgccacgctctttctgaagctcttatatcaaggaacatgcattacaactttcctaatccctgcttccctcacttccagattgtgagatgtgtcagaacttcttcattgacagctgtgctgctcatgggccccctacatttgtaaaggacagtgcagtggacaaggggcatcccaaccgttcagccctcagtctgcccccggggctgagaattgggccatcaggcatccctcaggctgggcttggagtatggaacgaggcatctgatctgccactgggtctgcactttggcccctatgagggccgaattacagaagacgaagaggcagccaacagtggatattcctggctaatcaccaaggggagaaactgctatgagtatgtggatggaaaagataaatcctcggccaactggatgagaaccaaagccagagatccatccatgtccctcatgctgtctggccttttcaagtcaaaaatttctcagtcaacatgtggaacgcaatcactcctctcagaacttcccaggaccatctgcaagaaaacttctccaaccagagaatccctgcccaggggatcagaatcaggagcggcaatattctgatccacgctgctgtaatgacaaaaccaaaggtcaagagatcaaagaaaggtccaaactcttgaataaaaggacatggcagagggagatttcaagggccttttctagcccacccaaaggacaaatggggagctctagagtgggagaaagaatgatggaagaagagtccagaacaggccagaaagtgaatccagggaacacaggcaaattatttgtgggggtaggaatctcaagaattgcgaaagtcaaatatggagagtgtgggcaaggtttcagtgataagtcagatgttattacacaccaaaggacacacacaggggggaagccctacgtctgcagagagtgtgggagggctttagccggaagtcagacctcctcagtcaccagaggacacacacaggggagaagccttatgtctgcagagagtgtgagcggggctttagccggaagtcagtcctcctcattcaccagaggacacacaggggagaagccccagtctgcaggaaggatgagtaagtcattagtaataaaaccttatctcaatagccacaagaagacaaacgtgatcaccacacacttgcacaccccagctctgaggtggcttcagcgaaagtctgctaaccccttacattccccgagagtgtaaagagatcggaaataactaattaaacaaatccgccactttcatgactagagttgaggaagaacaggggatagttctgtaagtgttcgggggacgtcaacatgtgtggttgtttcccgcactgatcccctccattttttgtgttttgcctcctgttctaattaattttgtctccatacatatctgaaccccaagtgtgtacctcattcttcccttatcactgaaggaaggaagagtccagaagggccacagagaactcaaacgttcagttcaagtctccacaggaattcaaccccagaaagacataaacttggagtccatctggtttaattattggagaatcgattcccaagtccaggaagagaaatgtagggttttacagagtcgcagcaggaaagagagctccctggtctcctgggaagtgtgacctcttctaatggacccctctcctctgctgccatactcccccttggctccccctgtctcctctcctgatttcctccaatctctgtagccccagaagtgaacgccagacaggaacacgcatgtgtgtatatatgtgttcacgtgtgctatgtgtgttaagcctgcatgcatgggtgtgggggtatgtgccctctgtgtacgtatctgtgtgagtgtgggggtttcaagggtgtattaggaataacgctcaaaatcctaaggaaattgaatactctgagagaagagagacagaccctctcatactgttttatattgttttatactcagaaaaggaaaaagaagcaaaactaaaggcaggtagcctggcgcctaggaaccagacctgaaaccaaggaaccagacccgaaaccaggcctgggccggcctgacctaagcctggtagttaaaattcgacccctgacctagcaactgatgttatctatagattatagaaagacattgtgaaacttcccggtctgttctgttccactctgaccatcggtgcatgcagcccctgtcacctaccccctgcttgctcaatcgatcacgaccctctcacgtggacccccttagagttgtgagcccttaaaagggacaggaattgctcactcggggagctcggctcttgagacagcagtcttgctgatgctcctggccgaataaaccgcttccttctttaaaaaaaaaaaaaaaaaaaaaaaaaaaaaaaaaaaaaaaaaaaaaaaaaaaaaaaaaaaaaaaa

SEQ ID NO: 316078 - DNA, 2442 bp, Artificial Sequence
  derived and/or modified sequence
atcattcccttactcgaatgaattaaagtacaggattggggctaaataatgtgagtgccacgctctttctgaagctcttatatcaaggaacatgcattacaactttcctaatccctgcttccctcacttccagattgtgagatgtgtcagaacttcttcattgacagctgtgctgctcatgggccccctacatttgtaaaggacagtgcagtggacaaggggcatcccaaccgttcagccctcagtctgcccccggggctgagaattgggccatcaggcatccctcaggctgggcttggagtatggaacgaggcatctgatctgccactgggtctgcactttggcccctatgagggccgaattacagaagacgaagaggcagccaacagtggatattcctggctaatcaccaaggggagaaactgctatgagtatgtggatggaaaagataaatcctcggccaactggatgagaaccaaagccagagatccatccatgtccctcatgctgtctggccttttcaagtcaaaaatttctcagtcaacatgtggaacgcaatcactcctctcagaacttcccaggaccatctgcaagaaaacttctccaaccagagaatccctgcccaggggatcagaatcaggagcggcaatattctgatccacgctgctgtaatgacaaaaccaaaggtcaagagatcaaagaaaggtccaaactcttgaataaaaggacatggcagagggagatttcaagggccttttctagcccacccaaaggacaaatggggagctctagagtgggagaaagaatgatggaagaagagtccagaacaggccagaaagtgaatccagggaacacaggcaaattatttgtgggggtaggaatctcaagaattgcgaaagtcaaatatggagagtgtgggcaaggtttcagtgataagtcagatgttattacacaccaaaggacacacacaggggggaagccctacgtctgcagagagtgtgggagggctttagccggaagtcagacctcctcagtcaccagaggacacacacaggggagaagccttatgtctgcagagagtgtgagcggggctttagccggaagtcagtcctcctcattcaccagaggacacacaggggagacgccccagtctgcaggaaggatgagtaagtcattagtaataaaaccttatctcaatagccacaagaagacaaacgtgatcaccacacacttgcacaccccagctctgaggtggcttcagcgaaagtctgctaaccccttacattccccgagagtgtaaagagatcggaaataactaattaaacaaatccgccactttcatgactagagttgaggaagaacaggggatagttctgtaagtgttcgggggacgtcaacatgtgtggttgtttcccgcactgatcccctccattttttgtgttttgcctcctgttctaattaattttgtctccatacatatctgaaccccaagtgtgtacctcattcttcccttatcactgaaggaaggaagagtccagaagggccacagagaactcaaacgttcagttcaagtctccacaggaattcaaccccagaaagacataaacttggagtccatctggtttaattattggagaatcgattcccaagtccaggaagagaaatgtagggttttacagagtcgcagcaggaaagagagctccctggtctcctgggaagtgtgacctcttctaatggacccctctcctctgctgccatactcccccttggctccccctgtctcctctcctgatttcctccaatctctgtagccccagaagtgaacgccagacaggaacacgcatgtgtgtatatatgtgttcacgtgtgctatgtgtgttaagcctgcatgcatgggtgtgggggtatgtgccctctgtgtacgtatctgtgtgagtgtgggggtttcaagggtgtattaggaataacgctcaaaatcctaaggaaattgaatactctgagagaagagagacagaccctctcatactgttttatattgttttatactcagaaaaggaaaaagaagcaaaactaaaggcaggtagcctggcgcctaggaaccagacctgaaaccaaggaaccagacccgaaaccaggcctgggccggcctgacctaagcctggtagttaaaattcgacccctgacctagcaactgatgttatctatagattatagaaagacattgtgaaacttcccggtctgttctgttccactctgaccatcggtgcatgcagcccctgtcacctaccccctgcttgctcaatcgatcacgaccctctcacgtggacccccttagagttgtgagcccttaaaagggacaggaattgctcactcggggagctcggctcttgagacagcagtcttgctgatgctcctggccgaataaaccgcttccttctttaa

SEQ ID NO: 316079 - DNA, 2961 bp, Artificial Sequence
  derived and/or modified sequence
ttctagacagtcccagcaccatgagccctgaaaggtcccaagaggagagcccagaaggagacacagagagaacagagcggaagcccatggtcaaagatgccttcaaagacatttccatatacttcaccaaggaagaatgggcagaaatgggagactgggagaaaactcgctataggaatgtgaaaatgaactataatgcactgattactgtaggtctcagagccactcgaccagctttcatgtgtcaccgaaggcaggccatcaaactccaggtggatgacacagaagattccgatgaagaatggacacctaggcagcaagtcaaacctccttggatggccttcagaggagaacagagtaaacaccagaagattgtgagatgtgtcagaacttcttcattgacagctgtgctgctcatgggccccctacatttgtaaaggacagtgcagtggacaaggggcatcccaaccgttcagccctcagtctgcccccggggctgagaattgggccatcaggcatccctcaggctgggcttggagtatggaacgaggcatctgatctgccactgggtctgcactttggcccctatgagggccgaattacagaagacgaagaggcagccaacagtggatattcctggctaatcaccaaggggagaaactgctatgagtatgtggatggaaaagataaatcctcggccaactggatgaggtatgtgaactgtgcccgggatgatgaagagcagaacctggtggccttccagtaccacaggcagatcttctatagaacctgccgagtcattaggccaggctgtgaactgctggtctggtctggggatgagtatggccaggaactgggcatcagatcttctatagaacctgccgagtcattaggccaggctgtgaactgctggtctggtatggggatgagtatggccaggaactgggcatcaagtggggcagcaagtggaagaaagagctcatggcagggagagaaccaaagccagagatccatccatgtccctcatgctgtctggccttttcaagtcaaaaatttctcagtcaacatgtggaacgcaatcactcctctcagaacttcccaggaccatctgcaagaaaacttctccaaccagagaatccctgcccaggggatcagaatcaggagcggcaatattctgatccacgctgctgtaatgacaaaaccaaaggtcaagagatcaaagaaaggtccaaactcttgaataaaaggacatggcagagggagatttcaagggccttttctagcccacccaaaggacaaatggggagctctagagtgggagaaagaatgatggaagaagagtccagaacaggccagaaagtgaatccagggaacacaggcaaattatttgtgggggtaggaatctcaagaattgcgaaagtcaaatatggagagtgtgggcaaggtttcagtgataagtcagatgttattacacaccaaaggacacacacaggggggaagccctacgtctgcagagagtgtgggagggctttagccggaagtcagacctcctcagtcaccagaggacacacacaggggagaagccttatgtctgcagagagtgtgagcggggctttagccggaagtcagtcctcctcattcaccagaggacacacaggggagacgccccagtctgcaggaaggatgagtaagtcattagtaataaaaccttatctcaatagccacaagaagacaaacgtgatcaccacacacttgcacaccccagctctgaggtggcttcagcgaaagtctgctaaccccttacattccccgagagtgtaaagagatcggaaataactaattaaacaaatccgccactttcatgactagagttgaggaagaacaggggatagttctgtaagtgttcgggggacgtcaacatgtgtggttgtttcccgcactgatcccctccattttttgtgttttgcctcctgttctaattaattttgtctccatacatatctgaaccccaagtgtgtacctcattcttcccttatcactgaaggaaggaagagtccagaagggccacagagaactcaaacgttcagttcaagtctccacaggaattcaaccccagaaagacataaacttggagtccatctggtttaattattggagaatcgattcccaagtccaggaagagaaatgtagggttttacagagtcgcagcaggaaagagagctccctggtctcctgggaagtgtgacctcttctaatggacccctctcctctgctgccatactcccccttggctccccctgtctcctctcctgatttcctccaatctctgtagccccagaagtgaacgccagacaggaacacgcatgtgtgtatatatgtgttcacgtgtgctatgtgtgttaagcctgcatgcatgggtgtgggggtatgtgccctctgtgtacgtatctgtgtgagtgtgggggtttcaagggtgtattaggaataacgctcaaaatcctaaggaaattgaatactctgagagaagagagacagaccctctcatactgttttatattgttttatactcagaaaaggaaaaagaagcaaaactaaaggcaggtagcctggcgcctaggaaccagacctgaaaccaaggaaccagacccgaaaccaggcctgggccggcctgacctaagcctggtagttaaaattcgacccctgacctagcaactgatgttatctatagattatagaaagacattgtgaaacttcccggtctgttctgttccactctgaccatcggtgcatgcagcccctgtcacctaccccctgcttgctcaatcgatcacgaccctctcacgtggacccccttagagttgtgagcccttaaaagggacaggaattgctcactcggggagctcggctcttgagacagcagtcttgctgatgctcctggccgaataaaccgcttccttcttt

SEQ ID NO: 316080 - protein, 171 aa, Artificial Sequence
  derived and/or modified sequence
MCQNFFIDSCAAHGPPTFVKDSAVDKGHPNRSALSLPPGLRIGPSGIPQAGLGVWNEASDLPLGLHFGPYEGRITEDEEAANSGYSWLITKGRNCYEYVDGKDKSSANWMRTKARDPSMSLMLSGLFKSKISQSTCGTQSLLSELPRTICKKTSPTRESLPRGSESGAAIF

SEQ ID NO: 316081 - DNA, 516 bp, Artificial Sequence
  derived and/or modified sequence
atgtgccaaaatttcttcatcgactcctgcgccgcacacgggcctccaaccttcgtgaaagactcagcagtggataaagggcacccaaatagatccgctctctcgttaccaccaggactccgtatcggccctagcgggataccacaggcaggcctgggcgtgtggaatgaggcttccgatctgccactcgggttgcattttggcccatatgaagggaggataacagaggatgaggaggctgctaactctggttacagttggctaatcaccaaaggcaggaattgttacgagtacgtggacgggaaagataagtcctctgctaattggatgcgcactaaggccagggatcccagcatgtccctgatgctgtcagggctcttcaaatcaaagatatcacaaagtacctgtggcactcagagcctgctgtctgagcttccacgtaccatctgcaagaaaacctcgccaacccgcgaatctctgcctcgtggatcagaatcaggcgccgcgattttttag

SEQ ID NO: 316082 - DNA, 516 bp, Artificial Sequence
  derived and/or modified sequence
atgtgccaaaatttctttattgactcttgtgcggcccacggtcctcctacatttgtaaaagactctgccgtagacaagggccaccctaatcggtccgctctttccctcccacccgggctgcggataggtccctcagggattccgcaggctggcttaggagtatggaacgaagcatctgacctgcctctggggctgcattttgggccatacgagggtcgcataaccgaagatgaggaggccgctaacagcggctattcttggctcatcactaaggggagaaactgctacgagtatgtcgatgggaaagataaatcctccgctaattggatgcgcactaaggcacgcgatcctagcatgtcattgatgcttagtgggctctttaagtcaaagattagccagagtacctgcggcacccaatccttactgtctgagctgcctcggacgatctgtaagaagacgtctccaacacgagagagcctaccccgtgggagcgagtctggtgccgctattttttag

SEQ ID NO: 316083 - DNA, 516 bp, Artificial Sequence
  derived and/or modified sequence
atgtgccagaacttcttcatcgacagctgtgccgcccacggcccccccacctttgtgaaggacagcgctgtggacaagggccaccccaacagaagtgccctgagcctgcccccaggcctgcgcatcggccccagcggcatcccccaggccggcctgggcgtgtggaatgaggccagtgacctgcccctgggcctgcacttcggcccctatgagggccgcatcacagaagatgaggaggccgccaacagcggctacagctggctgatcaccaagggcaggaactgctatgaatatgtggatggcaaggacaagagcagcgccaactggatgaggaccaaggcccgggaccccagcatgagcctgatgctgagcggcctcttcaagagcaagatcagccagagcacctgtggcacccagagcctgctgtctgagctgcccaggaccatctgcaagaagaccagccccacccgggagagcctgccccggggcagcgagagcggggccgccatcttctag

SEQ ID NO: 316084 - DNA, 2937 bp, Artificial Sequence
  derived and/or modified sequence
ttctagacagtcccagcaccatgagccctgaaaggtcccaagaggagagcccagaaggagacacagagagaacagagcggaagcccatggtcaaagatgccttcaaagacatttccatatacttcaccaaggaagaatgggcagaaatgggagactgggagaaaactcgctataggaatgtgaaaatgaactataatgcactgattactgtaggtctcagagccactcgaccagctttcatgtgtcaccgaaggcaggccatcaaactccaggtggatgacacagaagattccgatgaagaatggacacctaggcagcaagtcaaacctccttggatggccttcagaggagaacagagtaaacaccagaagggaatgcccaaggcgtcattcaataatgaatctagtttgagagaattgtcaggaacgccaaatttactgaatacaagtgactcagagcaggctcagaaaccagtgtcccctcctggagaagcaagtacctctggacagcactctagactaaaactggaactcaggaggaaggagactgaaggaaagatgtatagcctgcgagaaagaaagggtcatgcatacaaagagatcagcgagccacaggatgatgactacctctattgtgagatgtgtcagaacttcttcattgacagctgtgctgctcatgggccccctacatttgtaaaggacagtgcagtggacaaggggcatcccaaccgttcagccctcagtctgcccccggggctgagaattgggccatcaggcatccctcaggctgggcttggagtatggaacgaggcatctgatctgccactgggtctgcactttggcccctatgagggccgaattacagaagacgaagaggcagccaacagtggatattcctggctaatcaccaaggggagaaactgctatgagtatgtggatggaaaagataaatcctcggccaactggatgagaaccaaagccagagatccatccatgtccctcatgctgtctggccttttcaagtcaaaaatttctcagtcaacatgtggaacgcaatcactcctctcagaacttcccaggaccatctgcaagaaaacttctccaaccagagaatccctgcccaggggatcagaatcaggagcggcaatattctgatccacgctgctgtaatgacaaaaccaaaggtcaagagatcaaagaaaggtccaaactcttgaataaaaggacatggcagagggagatttcaagggccttttctagcccacccaaaggacaaatggggagctctagagtgggagaaagaatgatggaagaagagtccagaacaggccagaaagtgaatccagggaacacaggcaaattatttgtgggggtaggaatctcaagaattgcgaaagtcaaatatggagagtgtgggcaaggtttcagtgataagtcagatgttattacacaccaaaggacacacacaggggggaagccctacgtctgcagagagtgtgggagggctttagccggaagtcagacctcctcagtcaccagaggacacacacaggggagaagccttatgtctgcagagagtgtgagcggggctttagccggaagtcagtcctcctcattcaccagaggacacacaggggagacgccccagtctgcaggaaggatgagtaagtcattagtaataaaaccttatctcaatagccacaagaagacaaacgtgatcaccacacacttgcacaccccagctctgaggtggcttcagcgaaagtctgctaaccccttacattccccgagagtgtaaagagatcggaaataactaattaaacaaatccgccactttcatgactagagttgaggaagaacaggggatagttctgtaagtgttcgggggacgtcaacatgtgtggttgtttcccgcactgatcccctccattttttgtgttttgcctcctgttctaattaattttgtctccatacatatctgaaccccaagtgtgtacctcattcttcccttatcactgaaggaaggaagagtccagaagggccacagagaactcaaacgttcagttcaagtctccacaggaattcaaccccagaaagacataaacttggagtccatctggtttaattattggagaatcgattcccaagtccaggaagagaaatgtagggttttacagagtcgcagcaggaaagagagctccctggtctcctgggaagtgtgacctcttctaatggacccctctcctctgctgccatactcccccttggctccccctgtctcctctcctgatttcctccaatctctgtagccccagaagtgaacgccagacaggaacacgcatgtgtgtatatatgtgttcacgtgtgctatgtgtgttaagcctgcatgcatgggtgtgggggtatgtgccctctgtgtacgtatctgtgtgagtgtgggggtttcaagggtgtattaggaataacgctcaaaatcctaaggaaattgaatactctgagagaagagagacagaccctctcatactgttttatattgttttatactcagaaaaggaaaaagaagcaaaactaaaggcaggtagcctggcgcctaggaaccagacctgaaaccaaggaaccagacccgaaaccaggcctgggccggcctgacctaagcctggtagttaaaattcgacccctgacctagcaactgatgttatctatagattatagaaagacattgtgaaacttcccggtctgttctgttccactctgaccatcggtgcatgcagcccctgtcacctaccccctgcttgctcaatcgatcacgaccctctcacgtggacccccttagagttgtgagcccttaaaagggacaggaattgctcactcggggagctcggctcttgagacagcagtcttgctgatgctcctggccgaataaaccgcttccttcttt

SEQ ID NO: 316085 - DNA, 516 bp, Artificial Sequence
  derived and/or modified sequence
atgtgccagaacttcttcatcgacagctgcgccgcccacggcccccctacctttgtgaaagactcagccgtcgataaggggcacccaaaccggtccgcactgagcctcccccccggcttgagaatcggaccctcaggcattccccaggccgggcttggtgtgtggaatgaggcttctgacctcccattaggtctccacttcgggccatacgaaggccggatcacagaagatgaagaggctgccaactccggctattcttggctcatcaccaaggggcgcaactgctacgagtacgtggatggcaaggacaagtctagcgccaactggatgcgaacgaaagctcgggaccctagtatgtcgctcatgctgtctggtttgtttaagagcaagatcagtcagagcacttgtggaacacagtctctgctgtctgagttaccccgcaccatctgcaagaaaacgagccctactagggagtctctaccgagaggctcagagtctggcgcagctattttttag

SEQ ID NO: 316086 - DNA, 516 bp, Artificial Sequence
  derived and/or modified sequence
atgtgccagaacttcttcatcgacagctgcgccgcccacggcccccctacttttgtaaaagactcagcagttgacaaaggccaccctaacagaagtgcactaagtcttccccctgggttgcggatcgggccttctggtataccacaagctggcttgggcgtttggaatgaggcaagcgatctgcctctcggattacacttcggaccgtacgaagggcgcattaccgaggacgaagaggcagcgaacagcggatactcctggttgattacgaaaggcaggaactgctacgaatacgtggacggaaaggacaaaagcagcgccaattggatgcgaaccaaggcgagagatccctctatgtctctcatgttgagcggactgtttaaaagtaaaatctctcaaagtacttgtggtacacagtccctgctgtcagagctgcctcggaccatctgcaaaaagaccagcccaactcgggagtctttgccaaggggcagtgaatctggagcagctatcttctag

SEQ ID NO: 316087 - DNA, 516 bp, Artificial Sequence
  derived and/or modified sequence
atgtgccaaaattttttcatcgacagttgtgcagcccacggcccacccacttttgtgaaggatagcgctgtggacaaagggcatccaaaccgaagtgccctgagtcttccaccaggccttcggatcgggccttctggtatcccacaagcaggtcttggcgtgtggaacgaagcatccgaccttcccctaggactacactttggaccatacgagggccgtatcaccgaagacgaggaggcggcaaactccgggtactcttggctcatcacgaaaggacggaactgctacgaatatgtcgatggtaaagataaaagctctgctaactggatgaggactaaggcaagggatccatccatgtccctgatgctgtccggactgtttaagtctaaaatttcgcagagtacttgtggtacccagtccctcctttccgagctacctaggacgatctgtaagaaaacaagtccaaccagggaaagcctacctagagggtctgagagcggcgctgcaattttttag

SEQ ID NO: 316088 - DNA, 516 bp, Artificial Sequence
  derived and/or modified sequence
atgtgccagaattttttcatcgattcatgcgccgcacacggaccgcctaccttcgtgaaagattcagcagtggacaagggccaccctaacaggtcagctctgagcctgcctcctgggctgcggattggaccgagcggaatacctcaggctggtcttggcgtatggaacgaagcttctgacttaccactgggactgcattttggtccctacgagggtcgaattacagaggacgaggaggctgccaattcgggttactcctggttaataactaaagggaggaactgttacgaatacgtcgatgggaaggataagagctccgctaactggatgagaactaaagcaagggatccttccatgtccttgatgttgtcgggactgtttaagagcaagatcagtcagtccacatgcggaacccagtccctgctttccgagctccctagaaccatctgtaagaagactagccccactcgtgagtcactgccaagaggctcggagtcaggtgcagccattttttag

SEQ ID NO: 316089 - DNA, 516 bp, Artificial Sequence
  derived and/or modified sequence
atgtgccagaacttcttcatcgacagctgcgccgcccacggcccccccaccttcgtgaaggacagcgccgtggacaagggccaccccaacagaagcgccctgagcctgccccccggcctgagaatcggccccagcggcatcccccaggccggcctgggcgtgtggaacgaggccagcgacctgcccctgggcctgcacttcggcccctacgagggcagaatcaccgaggacgaggaggccgccaacagcggctacagctggctgatcaccaagggcagaaactgctacgagtacgtggacggcaaggacaagagcagcgccaactggatgagaaccaaggccagagaccccagcatgagcctgatgctgagcggcctgttcaagagcaagatcagccagagcacctgcggcacccagagcctgctgagcgagctgcccagaaccatctgcaagaagaccagccccaccagagagagcctgcccagaggcagcgagagcggcgccgccatcttctag

SEQ ID NO: 316090 - protein, 138 aa, Artificial Sequence
  derived and/or modified sequence
MSPERSQEESPEGDTERTERKPMVKDAFKDISIYFTKEEWAEMGDWEKTRYRNVKMNYNALITVGLRATRPAFMCHRRQAIKLQVDDTEDSDEEWTPRQQVKPPWMAFRGEQSKHQKIVRCVRTSSLTAVLLMGPLHL

SEQ ID NO: 316091 - DNA, 417 bp, Artificial Sequence
  derived and/or modified sequence
atgagtcctgaaaggtcgcaggaggaaagtcccgaaggagacaccgaaagaactgagaggaaacccatggtgaaggacgcctttaaagacatctccatatacttcactaaggaggagtgggctgaaatgggtgattgggaaaaaacgcgttacagaaatgtgaaaatgaactacaacgctttaatcacagtggggctgagggccaccagacccgcctttatgtgccatcgaagacaggctattaagctccaagtggatgacactgaggactcagatgaggagtggaccccacggcagcaggtcaagcctccgtggatggcctttcgaggtgaacagtctaagcaccagaaaatcgtgcggtgcgttcgcacaagctctcttaccgccgtgcttctgatgggaccactacacctatag

SEQ ID NO: 316092 - DNA, 417 bp, Artificial Sequence
  derived and/or modified sequence
atgagccctgagaggagccaggaggagagccctgagggggacacagagaggacagagaggaagcccatggtgaaggatgccttcaaggacatcagcatctacttcaccaaggaggagtgggccgagatgggagactgggagaagacccgctacagaaatgtgaagatgaactacaatgccctgatcaccgtgggcctgcgggccaccaggcctgccttcatgtgccaccggcggcaggccatcaagctgcaggtggatgacacagaagattctgatgaggagtggaccccccggcagcaggtgaagccaccctggatggccttccggggggagcagagcaagcaccagaagatcgtgcgctgtgtgaggaccagcagcctgacagctgtgctgctgatgggccccctgcacctgtag

SEQ ID NO: 316093 - DNA, 417 bp, Artificial Sequence
  derived and/or modified sequence
atgagccccgagcggagccaggaggagagccccgagggcgacaccgaacgtaccgagcgcaagccaatggtgaaggacgcattcaaagacatatccatctacttcacaaaggaggagtgggctgaaatgggagactgggagaagacacgatatagaaatgttaagatgaattataatgccctcattaccgtaggcctgagggctacccgcccagcgttcatgtgccacagaagacaagcaattaaactgcaagtcgacgacacggaggacagcgacgaggagtggacgccccgccagcaggtgaagccaccttggatggcattccgaggggagcagtcgaagcatcagaaaatcgtgcgctgtgtgcgaacatcaagcctgaccgccgtactcctcatgggaccgctacacctttag

SEQ ID NO: 316094 - DNA, 417 bp, Artificial Sequence
  derived and/or modified sequence
atgtcgcctgaacgaagtcaggaggagagcccagagggtgatactgagcgcacagaacgcaaacctatggtgaaggacgccttcaaagatatctccatctactttaccaaagaagaatgggccgagatgggcgattgggaaaagacccgctaccggaatgtcaagatgaattataatgccttgatcactgtaggtctgcgggctaccagacccgcatttatgtgccataggcggcaagccattaaactgcaggtggacgacaccgaagatagcgatgaggaatggacaccaaggcaacaggtgaagccaccctggatggcgttccggggagaacaatccaaacatcaaaagatcgtgcggtgcgtaagaacgtcctcccttacagccgtcctcctgatggggccacttcacctttag

SEQ ID NO: 316095 - DNA, 417 bp, Artificial Sequence
  derived and/or modified sequence
atgagccccgagagaagccaggaggagagccccgagggcgacaccgagagaaccgagagaaagcccatggtgaaggacgccttcaaggacatcagcatctacttcaccaaggaggagtgggccgagatgggcgactgggagaagaccagatacagaaacgtgaagatgaactacaacgccctgatcaccgtgggcctgagagccaccagacccgccttcatgtgccacagaagacaggccatcaagctgcaggtggacgacaccgaggacagcgacgaggagtggacccccagacagcaggtgaagcccccctggatggccttcagaggcgagcagagcaagcaccagaagatcgtgagatgcgtgagaaccagcagcctgaccgccgtgctgctgatgggccccctgcacctgtag

SEQ ID NO: 316096 - DNA, 303 bp, Artificial Sequence
  derived and/or modified sequence
atgtcccccgaaaagtctcaggaagaaagccctgaggaggatactgaacggaccgaaagaaagcctatggtgaaagatgcattcaaggatataagcatctatttcacaaaagaggagtgggccgagatgggggattgggagaaaactcggtatcggaatgtgaagaggaactacaatgcgttaatcacaattggcctgagagcgacgaggccggcctttatgtgccatcgccgccaagccattaaactgcaggttgacgataccgaggactcagacgaagagtggaccccccgtcagcagtag

SEQ ID NO: 316097 - DNA, 303 bp, Artificial Sequence
  derived and/or modified sequence
atgagccctgagaagagccaggaggagagccctgaggaggacacagagaggacagagaggaagcccatggtgaaggatgccttcaaggacatcagcatctacttcaccaaggaggagtgggccgagatgggagactgggagaagacccgctacagaaatgtgaagaggaactacaatgccctgatcaccatcggcctgcgggccaccaggcctgccttcatgtgccaccggcggcaggccatcaagctgcaggtggatgacacagaagattctgatgaggagtggaccccccggcagcagtag

SEQ ID NO: 316098 - DNA, 303 bp, Artificial Sequence
  derived and/or modified sequence
atgagccccgagaagagccaggaggagagccccgaggaggacaccgagcgcactgagcggaagccaatggttaaggacgctttcaaggatatctcgatttattttacaaaggaggagtgggccgaaatgggagactgggagaaaacccgctatcgcaacgtgaaaaggaactacaacgccctgattactatcggtctgagagctacacgcccggctttcatgtgccacagaaggcaggcgattaagctccaggttgatgatactgaagactccgacgaagaatggacaccccgccagcagtag

SEQ ID NO: 316099 - DNA, 558 bp, Artificial Sequence
  derived and/or modified sequence
aacttacaccacagttaaaggaacaccaaccctcccagatgagaatcagtgcaagaactctggcaattcaaaaagacacagtgtccccttggaagacccaggcctgcggagggacgtgaggagcagccccgacgcccgactcagtcgcaaacaccggagttggggaaaaccaagagcctttggcctaggagctgggagactcagggcccttctcacactcagaattggagcagggccttctagacagtcccagcaccatgagccctgaaaagtcccaagaggagagcccagaagaagacacagagagaacagagcggaagcccatggtcaaagatgccttcaaagacatttccatatacttcaccaaggaagaatgggcagagatgggagactgggagaaaactcgctataggaatgtgaaaaggaactataatgcactgattactataggtctcagagccactcgaccagctttcatgtgtcaccgaaggcaggccatcaaactccaggtggatgacacagaagattctgatgaagaatggacccctaggcagcaag

SEQ ID NO: 316100 - DNA, 303 bp, Artificial Sequence
  derived and/or modified sequence
atgtccccggagaagtctcaggaggagagtcctgaagaggacacagaaagaaccgaacgcaaaccgatggtaaaagacgcgtttaaagatattagcatttactttactaaagaggaatgggcagagatgggcgactgggaaaagacaaggtatcgcaatgtgaagcgaaactacaacgctctgattactatcggacttcgtgccaccaggcctgctttcatgtgccaccgtagacaagccataaagctccaagtcgatgataccgaggactcagacgaagagtggacccctcgacagcaatag

SEQ ID NO: 316101 - DNA, 303 bp, Artificial Sequence
  derived and/or modified sequence
atgagccccgagaagagccaggaggagagccccgaggaggacaccgagagaaccgagagaaagcccatggtgaaggacgccttcaaggacatcagcatctacttcaccaaggaggagtgggccgagatgggcgactgggagaagaccagatacagaaacgtgaagagaaactacaacgccctgatcaccatcggcctgagagccaccagacccgccttcatgtgccacagaagacaggccatcaagctgcaggtggacgacaccgaggacagcgacgaggagtggacccccagacagcagtag

SEQ ID NO: 316102 - DNA, 1302 bp, Artificial Sequence
  derived and/or modified sequence
atgccagctaagggacgttatttccttaacgagggcgaggagggacctgatcaggatgcactatacgagaagtatcagcttacgtctcagcacgggcccctcttgctgactcttcttctggtggcagccaccgcgtgtgtggcactgataattatcgccttcagtcaaggtgacccgtcacggcaccaggctatcctcgggatggctttcttagttctggccgtgttcgcggccctctctgtgctcatgtatgtcgaatgcctgctcagacggtggctccgagcattagctctcttaacctgggcctgtttggttgctctggggtacgttttggtgtttgacgcctggactaaagcagcctgcgcctgggagcaggtgccattcttcttgttcatagtgttcgtcgtctacactctcttgccttttagcatgaggggagcggtagcagtcggggctgtcagcaccgcatctcacctgttggtgcttggctctctcatggggggctttacaaccccaagcgttcgcgtgggcctgcaacttttagccaatgcagttatcttcctgtgcggaaatttgacgggagcatttcataagcaccagatgcaggatgcatctagggacctatttacatacaccgttaagtgcattcaaattcggaggaagctgcgtatcgagaagcgacaacaggaaaacctgcttctcagcgtcctgccagcccacatatctatgggaatgaagcttgctataattgaacgactgaaggaacacggggaccgccggtgcatgcccgataataacttccactcactttatgtcaaacggcaccaaaacgttagcatcctctatgctgacattgttgggttcacccaacttgcctctgactgctcccctaaagagttggttgtggtgcttaacgagctcttcgggaagtttgaccagattgcaaaggccaacgagtgtatgcgaatcaagatactgggagactgctattattgcgtgagtgggctgcctgtttctttgccaacccacgctcgaaactgtgtaaagatgggcctggatatgtgccaggctataaaacaggtgagagaagccaccggggttgatattaacatgcgcgtgggtatacattctggcaatgtcctttgcggcgtgatcggactccggaaatggcagtatgacgtctggtcccatgacgtgtcacttgccaaccgcatggaagccgccggagtgcccggaagggttcatatcactgaggctactctaaaacatctagacaaggcactgctcctccaggtaaggtag

SEQ ID NO: 316103 - DNA, 2090 bp, Artificial Sequence
  derived and/or modified sequence
gagctgaggaactgcgtgtggagtcagcccagtctggatgcacaggaggatgctggcggcacagtgagtgaggcctggtgccagagctgtgcggaccccttgttggccatggagcagcaggcccagaggccctctccccagccctgcttgcctgcctcggagaggacagaggcctaggcccacgggggagggtgttggcagacagatgccctccaggccctggggcctccttaacggccccttaacgacacgcgtgccaagggtggaggatgccagccaaggggcgctacttcctcaacgagggcgaggagggccctgaccaagatgcgctctacgagaagtaccagctcaccagccagcatgggccgctgctgctcacgctcctgctggtggccgccactgcctgcgtggccctcatcatcattgccttcagccagggggacccctccagacaccaggccattctgggcatggcgttcctggtgctggcggtgtttgcggccctctctgtgctgatgtacgtcgagtgtctcctgcggcgctggctcagggccttggcgctgctcacctgggcctgcttggtggcgctgggctatgtgctggtgttcgacgcatggacaaaggcggcctgtgcgtgggagcaggtgcccttcttcctgttcattgtcttcgtggtgtacacactactgcccttcagcatgcggggcgctgtcgccgttggggccgtctccactgcctcccacctcctggtgctcggttctttgatgggaggcttcacgacacccagtgtccgggtggggctgcagctgctggccaacgcagtcatcttcctgtgtgggaacctgacaggcgccttccacaagcaccaaatgcaggatgcatcccgggacctcttcacctacactgtgaagtgcatccagatccgccggaagctgcgcatcgagaagcgccagcaggagaacctgctgctgtcagtgcttccggcccacatctccatgggcatgaagctggccatcatcgaacggctcaaggagcatggtgaccgtcgctgcatgcctgacaacaacttccacagcctctacgtcaagaggcaccagaatgtcagcatcctctatgcggacatcgtgggcttcacgcagctggccagcgactgttctcccaaggagctggtggtggtgctgaatgagctctttggcaagttcgaccagatcgccaaggccaacgagtgcatgcgaatcaagatcctcggcgactgctactactgtgtatcgggcctgcccgtgtcgctgcctacccacgcccggaactgcgtgaagatggggctggacatgtgccaggccatcaagcaggtgcgggaggccacgggcgtggacatcaacatgcgtgtgggcatacactcggggaatgtgctgtgcggggtcatcgggctgcgcaagtggcagtatgacgtgtggtcccacgacgtgtccctggccaaccggatggaggcagccggagtacccggccgggtgcacatcacggaggccacgctaaagcacctggacaaggccctgctgctccaagtccgatgacttctacacctttgggtccatcttcctggagaagggctttgagcgcgagtaccgcctggcacccatcccccgggcccgccacgactttgcctgcgccagcctgatcttcgtctgcatcctgctcgtccatgtcctgctcatgcccaggacggcggcactgggtgtgtccttcgggctggtggcctgtgtactggggctggtgctgggcctgtgctttgccaccaagttctcgaggtgctgcccagctcgggggacgctctgcactatctctgagagggtggagacacagcccctgctgaggctgaccctggccgtcctgaccatcggcagcctgctcactgtggccatcatcaacctgcccctgatgcctttccaagttccagagctgcctgttggcaatgagacaggcctactggccgcgagcagcaagacaagagccctgtgtgagcccctcccgcacctgcatactgttttttcccgtttaaatgagctcacttcataagaaataaaactacagtg

SEQ ID NO: 316104 - DNA, 1302 bp, Artificial Sequence
  derived and/or modified sequence
atgcctgccaagggccgctacttcctgaatgaaggagaggagggccctgaccaggatgccctgtatgagaagtaccagctgaccagccagcacggccccctgctgctgaccctgctgctggtggccgccacagcctgtgtggccctgatcatcatcgccttcagccagggcgaccccagccgccaccaggccatcctgggcatggccttcctggtgctggccgtgtttgctgccctgtctgtgctgatgtatgtggagtgcctgctgcggcgctggctgcgggccctggccctgctgacctgggcctgcctggtggccctgggctacgtgctggtgtttgatgcctggaccaaggccgcctgtgcctgggagcaggtgcccttcttcctgttcatcgtgtttgtggtgtacaccctgctgcccttctccatgagaggagctgtggccgtgggcgctgtgtccacagccagccacctgctggtgctgggcagcctgatgggcggcttcaccaccccatctgtgcgggtgggcctgcagctgctggccaatgctgtgatcttcctgtgtggcaacctgactggagccttccacaagcaccagatgcaggatgccagccgggacctcttcacctacacagtgaagtgcatccagatccggaggaagctgcgcatcgagaagaggcagcaggagaacctgctgctgtctgtgctgcctgcccacatctccatgggcatgaagctggccatcatcgagcggctgaaggagcacggggaccggcgctgcatgccagacaacaacttccacagcctgtatgtgaagaggcaccagaatgtgtccatcctgtatgctgacatcgtgggcttcacccagctggccagtgactgcagccccaaggagctggtggtggtgctgaatgagctgtttgggaagtttgaccagatcgccaaggccaatgaatgcatgaggatcaagatcctgggggactgctactactgtgtgtctggcctgcctgtgtccctgcccacccacgccaggaactgtgtgaagatgggcctggacatgtgccaggccatcaagcaggtgcgggaggccactggagtggacatcaacatgagggtgggcatccacagcggaaatgtgctgtgtggggtgattggcctgaggaagtggcagtatgatgtgtggagccatgatgtgtccctggccaacaggatggaggccgccggcgtgcccggccgggtgcacatcacagaggccaccctgaagcacctggacaaggccctgctgctgcaggtgaggtag

SEQ ID NO: 316105 - DNA, 1302 bp, Artificial Sequence
  derived and/or modified sequence
atgcccgccaagggccggtacttcctgaacgagggcgaggagggcccagatcaggacgctctgtacgagaagtaccagttgacctcccaacacggacccctgctgctgacgctgctgttggtcgcggctaccgcctgcgtcgctctcatcatcattgcctttagccagggcgatccctcaagacatcaggctatcctggggatggcgttcctggttttggccgttttcgccgcccttagcgttttaatgtatgtggaatgtctgctgagaagatggctgcgggccctggccctgctgacatgggcctgtctcgtcgccctcggctatgtcctcgtcttcgacgcttggacaaaggctgcctgtgcctgggagcaggtgccgttttttctgttcatagttttcgtggtgtatacactgttacccttttccatgcgcggagcggtggcagtgggagcggtcagtactgccagccacttgttggtgctcgggtctctgatgggtggcttcactacgccctccgtcagggtcggactgcagctcctggcgaacgccgttatcttcttgtgtggaaatctcaccggagctttccacaagcatcaaatgcaggatgcgagtcgtgatctcttcacatacaccgtaaagtgcattcagattcggcgcaagttgcggattgagaaacgacagcaagagaatctgctcctatcagttctgcccgcacatatcagcatggggatgaagttggccattattgaacgcctgaaagaacacggtgatcgtcgctgtatgcccgataataattttcactcgttgtacgtcaaacggcaccagaatgtatctatcctgtacgcagatattgtgggcttcacacagcttgcatctgactgcagtccaaaggagttggttgtcgttctgaacgagcttttcgggaagtttgaccagattgcgaaggccaacgagtgcatgagaataaagatactgggcgattgctattactgtgtgtcaggacttcccgtgtctctccccacacatgcccgaaattgtgtcaaaatggggttagacatgtgccaggcgattaagcaagtaagagaggcaacaggagtggatatcaatatgagggtgggaatacactctggcaatgtgctgtgtggagtcatagggctcaggaagtggcagtatgacgtttggagtcacgacgtcagtctggctaaccggatggaggctgccggcgttccaggccgtgtccacattacagaagcaaccctgaagcacttggataaagcgctattgttacaggtgaggtag

SEQ ID NO: 316106 - DNA, 1302 bp, Artificial Sequence
  derived and/or modified sequence
atgccagcaaagggtcgttatttcttgaatgagggagaggagggacccgaccaggacgcactgtacgaaaaatatcagctaacaagccagcacggaccattgctgctgaccctgctgctggtcgccgcaactgcatgcgtggcgctgatcattatcgccttttcccagggcgacccttctcggcaccaagcgatccttggtatggcctttttagtcctcgctgtattcgccgcactctccgtcctgatgtatgttgaatgcctgctccgtagatggcttcgcgctctggccctgctcacgtgggcctgtctggtggcgctggggtacgtcctcgtttttgatgcctggacaaaggcagcctgtgcgtgggagcaagtcccgttttttttgttcatcgtgtttgtggtttacacgctgctgcccttctctatgaggggggctgttgctgtcggagcggtaagtaccgcttctcacctcctggtactggggtcactaatgggaggattcactacaccctctgtgcgcgtaggcttacagcttttagcaaacgccgtgatcttcctgtgtgggaatctgaccggagcattccacaagcaccagatgcaggacgcttccagggacttgttcacatacacagttaagtgtattcagataagacggaaactgaggatagaaaagaggcagcaagagaatttactgctgagcgtgctgccagcccatatctccatggggatgaagctggcaatcatcgaacgactcaaagagcatggagaccggcgatgcatgcccgacaataatttccacagtttgtacgtaaagaggcatcaaaacgtcagtatcctgtacgccgacatcgttggattcactcagctggcctctgattgtagccccaaggagctggtggtcgttcttaacgagctctttgggaaatttgaccagatcgccaaagctaatgaatgcatgcgcatcaagattttaggggactgctactactgtgtgtctggccttcccgtcagtcttcctactcatgctagaaactgcgtcaagatgggactggacatgtgtcaggcaatcaaacaagttagagaagccacaggggtcgatatcaatatgcgggtgggcattcacagtggcaatgtgctgtgcggcgtgattggactgagaaagtggcagtacgacgtttggtctcacgatgtgagcctggccaatagaatggaggcggctggggttcccggtagagttcacatcaccgaagccacattgaagcatttggataaggccctgctgctgcaggtcaggtag

SEQ ID NO: 316107 - DNA, 1302 bp, Artificial Sequence
  derived and/or modified sequence
atgcccgccaagggcagatacttcctgaacgagggcgaggagggccccgaccaggacgccctgtacgagaagtaccagctgaccagccagcacggccccctgctgctgaccctgctgctggtggccgccaccgcctgcgtggccctgatcatcatcgccttcagccagggcgaccccagcagacaccaggccatcctgggcatggccttcctggtgctggccgtgttcgccgccctgagcgtgctgatgtacgtggagtgcctgctgagaagatggctgagagccctggccctgctgacctgggcctgcctggtggccctgggctacgtgctggtgttcgacgcctggaccaaggccgcctgcgcctgggagcaggtgcccttcttcctgttcatcgtgttcgtggtgtacaccctgctgcccttcagcatgagaggcgccgtggccgtgggcgccgtgagcaccgccagccacctgctggtgctgggcagcctgatgggcggcttcaccacccccagcgtgagagtgggcctgcagctgctggccaacgccgtgatcttcctgtgcggcaacctgaccggcgccttccacaagcaccagatgcaggacgccagcagagacctgttcacctacaccgtgaagtgcatccagatcagaagaaagctgagaatcgagaagagacagcaggagaacctgctgctgagcgtgctgcccgcccacatcagcatgggcatgaagctggccatcatcgagagactgaaggagcacggcgacagaagatgcatgcccgacaacaacttccacagcctgtacgtgaagagacaccagaacgtgagcatcctgtacgccgacatcgtgggcttcacccagctggccagcgactgcagccccaaggagctggtggtggtgctgaacgagctgttcggcaagttcgaccagatcgccaaggccaacgagtgcatgagaatcaagatcctgggcgactgctactactgcgtgagcggcctgcccgtgagcctgcccacccacgccagaaactgcgtgaagatgggcctggacatgtgccaggccatcaagcaggtgagagaggccaccggcgtggacatcaacatgagagtgggcatccacagcggcaacgtgctgtgcggcgtgatcggcctgagaaagtggcagtacgacgtgtggagccacgacgtgagcctggccaacagaatggaggccgccggcgtgcccggcagagtgcacatcaccgaggccaccctgaagcacctggacaaggccctgctgctgcaggtgagatag

SEQ ID NO: 316108 - DNA, 252 bp, Artificial Sequence
  derived and/or modified sequence
atggccagcacccccatgggcaacgagggcgagaagaagagcagctggccttcccaagctgctccaagcctgaggggcggacctgcgagccttagccggagcgaagagtacctgtcacagattagcgccgagctgatggaggaggcactatgcaccgcctgttgccatctgaatccggtccccatcaaaaaaaagcagagtcaggaccaggctacccagatctcaaagcgcgccttcttcaccaaaacttag

SEQ ID NO: 316109 - DNA, 180 bp, Artificial Sequence
  derived and/or modified sequence
atgtggccacctgaccccgatccagatcctgatcctgagccagcggggggtagccggcccggccccgctgttcccgggctaagggccctcctgcctgctcgcgcctttttgtgcagtctcaaggggccgggcggtttcgtctgcacatggtgctcctgcccacaccagcccctttggtag

SEQ ID NO: 316110 - DNA, 180 bp, Artificial Sequence
  derived and/or modified sequence
atgtggcccccagaccctgaccctgaccctgaccctgagcctgctgggggcagccggcccggccctgctgtgcccggcctgcgggccctgctgcctgcccgggccttcctgtgcagcctgaagggccctgggggctttgtgtgcacctggtgcagctgcccccaccagcccctgtggtag

SEQ ID NO: 316111 - DNA, 180 bp, Artificial Sequence
  derived and/or modified sequence
atgtggccccccgaccccgaccccgaccccgaccccgagcccgccggtggctctcgccctgggcccgccgtgccagggctgcgcgcacttcttcccgctcgagcttttttgtgttcgcttaaaggaccagggggatttgtgtgcacatggtgcagctgcccccaccaacccctgtggtag

SEQ ID NO: 316112 - DNA, 180 bp, Artificial Sequence
  derived and/or modified sequence
atgtggcccccagacccagaccccgatcctgatcctgagccagccggaggatcgcgacccggtcctgccgtgcctggcctcagggccctcctgccagccagggcatttctgtgctcactcaagggacccggaggctttgtgtgcacctggtgcagttgcccacatcagcctctctggtag

SEQ ID NO: 316113 - DNA, 605 bp, Artificial Sequence
  derived and/or modified sequence
tgcagatgtgcgtgcctgtgtgtgtttgcgcgcgcgcgcgcgtgtgtgtgtgtctgtgtgtgtgcctggagctgcgcttgcaggtctgagagtcctctgagaatgggttgggggaggcgggtgcaggaccgaggcctggaacagccaacaaagaggccctggaggagggtggggctggccggggacaggaggggtggccaagaaagtcgcaagaaaactccggcccccaagaaaaagagagggcatgggttgcggagccgacatcacggccggggtctttgctgtttagacgcctgggttcccggatcccagacacgcgcacgggcaggaagttagaccggagacagcgacccgggtttccgcttccctccgggcgcgagaagaggggagccaggccgagccccggccctaccgccgccgccgccatgtggcccccagaccccgaccccgacccggaccccgagcctgccggcggctcccgtcccggccccgcggtccccgggctccgcgccctgctgccggcgcgggctttcctctgctctctcaaaggccccggtgggtttgtctgcacttggtgctcctgcccacaccagccactttggtga

SEQ ID NO: 316114 - DNA, 180 bp, Artificial Sequence
  derived and/or modified sequence
atgtggccccccgaccccgaccccgaccccgaccccgagcccgccggcggcagcagacccggccccgccgtgcccggcctgagagccctgctgcccgccagagccttcctgtgcagcctgaagggccccggcggcttcgtgtgcacctggtgcagctgcccccaccagcccctgtggtag

SEQ ID NO: 316115 - protein, 169 aa, Artificial Sequence
  derived and/or modified sequence
MLATRVFSLVGKRAISTSVCVRAHESVVKSEDFSLPAYMDRRDHPLPEVAHVKHLSASQKALKEKEKASWSSLSMDEKVELYRIKFKESFAEMNRGSNEWKTVVGGAMFFIGFTALVIMWQKHYVYGPLPQSFDKEWVAKQTKRMLDMKVNPIQGLASKWDYEKNEWKK

SEQ ID NO: 316116 - protein, 250 aa, Artificial Sequence
  derived and/or modified sequence
ARYNRTSYFYPTFSESSEHSHLLVSPVLVASAVIGVVIILSCITIIVGSIRRDRQARLQRHRHRHHRHHHHHHHHRRRRHREYEHGYVSDEHTYSRSSRRMRYACSSSEDWPPPLDISSDGDVDATVLRELYPDSPPGYEECVGPGATQLYVPTDAPPPYSLTDSCPTLDGTSDSGSGHSPGRHQQEQRTPAQGGLHTVSMDTLPPYEAVCGAGPPSGLLPLPGPDPGPRGSQGSPTPTRAPASGPERIV

SEQ ID NO: 316117 - protein, 259 aa, Artificial Sequence
  derived and/or modified sequence
MSFKRPCPLARYNRTSYFYPTFSESSEHSHLLVSPVLVASAVIGVVIILSCITIIVGSIRRDRQARLQRHRHRHHRHHHHHHHHRRRRHREYEHGYVSDEHTYSRSSRRMRYACSSSEDWPPPLDISSDGDVDATVLRELYPDSPPGYEECVGPGATQLYVPTDAPPPYSLTDSCPTLDGTSDSGSGHSPGRHQQEQRTPAQGGLHTVSMDTLPPYEAVCGAGPPSGLLPLPGPDPGPRGSQGSPTPTRAPASGPERIV

SEQ ID NO: 316118 - DNA, 753 bp, Artificial Sequence
  derived and/or modified sequence
gccagatacaacagaaccagctacttctaccccaccttcagcgagagcagcgagcacagccacctgctggtgagccccgtgctggtggccagcgccgtgatcggcgtggtgatcatcctgagctgcatcaccatcatcgtgggcagcatcagaagagacagacaggccagactgcagagacacagacacagacaccacagacaccaccaccaccaccaccaccacagaagaagaagacacagagagtacgagcacggctacgtgagcgacgagcacacctacagcagaagcagcagaagaatgagatacgcctgcagcagcagcgaggactggcccccccccctggacatcagcagcgacggcgacgtggacgccaccgtgctgagagagctgtaccccgacagcccccccggctacgaggagtgcgtgggccccggcgccacccagctgtacgtgcccaccgacgccccccccccctacagcctgaccgacagctgccccaccctggacggcaccagcgacagcggcagcggccacagccccggcagacaccagcaggagcagagaacccccgcccagggcggcctgcacaccgtgagcatggacaccctgcccccctacgaggccgtgtgcggcgccggcccccccagcggcctgctgcccctgcccggccccgaccccggccccagaggcagccagggcagccccacccccaccagagcccccgccagcggccccgagagaatcgtgtag

SEQ ID NO: 316119 - DNA, 780 bp, Artificial Sequence
  derived and/or modified sequence
atgagcttcaagagaccctgccccctggccagatacaacagaaccagctacttctaccccaccttcagcgagagcagcgagcacagccacctgctggtgagccccgtgctggtggccagcgccgtgatcggcgtggtgatcatcctgagctgcatcaccatcatcgtgggcagcatcagaagagacagacaggccagactgcagagacacagacacagacaccacagacaccaccaccaccaccaccaccacagaagaagaagacacagagagtacgagcacggctacgtgagcgacgagcacacctacagcagaagcagcagaagaatgagatacgcctgcagcagcagcgaggactggcccccccccctggacatcagcagcgacggcgacgtggacgccaccgtgctgagagagctgtaccccgacagcccccccggctacgaggagtgcgtgggccccggcgccacccagctgtacgtgcccaccgacgccccccccccctacagcctgaccgacagctgccccaccctggacggcaccagcgacagcggcagcggccacagccccggcagacaccagcaggagcagagaacccccgcccagggcggcctgcacaccgtgagcatggacaccctgcccccctacgaggccgtgtgcggcgccggcccccccagcggcctgctgcccctgcccggccccgaccccggccccagaggcagccagggcagccccacccccaccagagcccccgccagcggccccgagagaatcgtgtag

SEQ ID NO: 316120 - DNA, 753 bp, Artificial Sequence
  derived and/or modified sequence
gctcgctacaatcgcacatcttatttctaccccacctttagcgagtcttcagagcactcgcatctgctcgttagtcccgtgctagtagcatctgccgtgataggtgtggttatcattctgtcatgcatcaccatcatcgtaggatctattcgccgcgaccgtcaggccagactgcaaagacataggcatcggcatcatcggcaccaccatcaccatcaccaccaccgcaggcgcagacacagggaatacgaacatggatacgtctccgatgaacatacttattcccgctctagtaggcgaatgcggtatgcttgctcaagtagcgaagactggcctccacctctggacattagctcagatggcgatgtggatgcaaccgtactaagggaactttatcccgattccccccctggctatgaagaatgtgtgggaccaggggccacacagctgtacgttcccacagacgcacctcccccgtatagtctgactgactcttgccccacactggatggcacatcggatagcggcagcggccactcccccggaaggcatcagcaggagcaacgcacacctgcccaggggggactgcacacggtaagtatggataccttgcccccttatgaagcggtgtgtggcgctggtccgccctcaggactgctccccctccccggtcccgatcctggcccccgaggttctcagggcagtcccactccaactcgggcccctgcaagtggacctgagcgcatcgtgtag

SEQ ID NO: 316121 - DNA, 780 bp, Artificial Sequence
  derived and/or modified sequence
atgagcttcaagcgcccctgtcctctcgctcgctacaaccggaccagctacttttatccaactttctccgaatcttctgagcatagtcatctgctcgtctccccagtgcttgtagctagcgcagttataggcgtcgtaatcatcttatcttgtatcaccatcatcgtgggctcgattcgccgggaccgccaggcccgactccagaggcatagacatcggcatcatcggcaccaccaccaccaccaccaccaccgccgccggagacacagagaatacgaacacggctacgtcagcgatgagcatacttactccaggagcagcaggcgaatgagatatgcttgctcgtcctcagaagattggccgcctcctctggacattagttccgacggggacgtggatgcaaccgtgctgcgcgagctctaccccgattccccacccggctacgaagagtgtgtcggtccgggggcaacccagctctacgtgcccactgacgcgccccctccttacagcctcacagatagctgtcctactcttgatggcactagcgattctggatctgggcattctcctgggcgccatcaacaggagcagcggacccctgcccaggggggcttgcacacagtgagcatggacaccctccccccatatgaagctgtctgcggcgccgggccccctagtggactactgcccctccccggtcccgaccccggccctaggggatcccaaggctcccccacaccaacgcgtgcaccggcgtccgggccagagcgaatcgtgtag

SEQ ID NO: 316122 - DNA, 753 bp, Artificial Sequence
  derived and/or modified sequence
gcccgctacaacagaaccagctacttctaccccaccttcagcgagagcagcgagcacagccacctgctggtgtcccctgtgctggtggccagcgctgtgattggagtggtgatcatcctgagctgcatcaccatcatcgtgggcagcatcagaagagaccggcaggcccggctgcagaggcaccgccaccgccaccaccgccaccaccaccaccaccaccaccacagaagaagaagacaccgggagtatgaacatggctacgtgtctgatgagcacacctacagccgcagcagcaggaggatgagatatgcctgcagcagcagcgaggactggcccccacccctggacatcagcagtgatggagatgtggatgccaccgtgctgcgggagctgtacccagacagccccccaggctatgaagaatgtgtgggccctggggccacccagctgtatgtgcccacagatgcccccccaccctacagcctgacagacagctgccccaccctggatggcaccagtgacagcggcagcggccacagccctggccgccaccagcaggagcagaggaccccagcccagggcggcctgcacacagtgtccatggacaccctgcccccctatgaagctgtgtgtggggccggccccccatctggcctgctgcccctgcccggccctgaccccggcccccggggcagccagggcagccccacccccacccgggccccagccagcggccctgagagaattgtgtag

SEQ ID NO: 316123 - DNA, 780 bp, Artificial Sequence
  derived and/or modified sequence
atgtccttcaagaggccctgccccctggcccgctacaacagaaccagctacttctaccccaccttcagcgagagcagcgagcacagccacctgctggtgtcccctgtgctggtggccagcgctgtgattggagtggtgatcatcctgagctgcatcaccatcatcgtgggcagcatccggcgggaccggcaggcccggctgcagaggcaccgccaccgccaccaccgccaccaccaccaccaccaccaccacagaagaagaagacaccgggagtatgagcacggctacgtgtctgatgagcacacctacagccgcagcagcaggaggatgagatatgcctgcagcagcagcgaggactggcccccacccctggacatcagcagtgatggagatgtggatgccaccgtgctgcgggagctgtacccagacagccccccaggctatgaggagtgtgtgggccctggggccacccagctgtatgtgcccacagatgcccccccaccctacagcctgacagacagctgccccaccctggatggcaccagtgacagcggcagcggccacagccctggccgccaccagcaggagcagaggaccccagcccagggcggcctgcacacagtgtccatggacaccctgcccccctatgaggccgtgtgtggggccggcccccccagcggcctgctgcccctgcccggccctgaccccggcccccggggcagccagggcagccccacccccacccgggccccagccagcggccctgagcgcatcgtgtag

SEQ ID NO: 316124 - DNA, 753 bp, Artificial Sequence
  derived and/or modified sequence
gcccggtacaaccggaccagctacttctaccccaccttcagcgagtcaagcgaacatagccatcttcttgtgtcccctgtcttggtcgcaagtgctgttatcggcgtggtaataattttatcctgtatcaccataatagttgggtccattagaagagaccgacaggcccgattgcaacggcaccgccacaggcaccaccgtcaccaccatcatcatcaccatcataggcgacgtcgccatagggagtatgaacacgggtacgtctccgacgagcatacatacagtcgctcatcgcgacgaatgcgctacgcctgtagctccagcgaagattggcctccaccactcgacatcagcagcgacggcgatgtggatgcgaccgttttaagggaactgtatcccgacagcccaccaggctacgaggagtgcgtggggccaggcgctacacagctatacgtaccaactgacgctcccccaccatattcattaaccgatagctgccccactctagacggaaccagcgattctgggagtggacacagccctggccgacaccagcaagagcagagaaccccagcacaggggggcttacataccgtgtccatggacaccctccctccgtatgaggctgtgtgcggagctggccctccctcaggtctcttacctctcccagggccagaccccggtcccaggggctcccaaggcagcccaacacccacgagagctccagcttctgggcccgaacgaatcgtgtag

SEQ ID NO: 316125 - DNA, 780 bp, Artificial Sequence
  derived and/or modified sequence
atgagcttcaagcggccctgccccctggcccggtacaaccggacctcctacttctaccccaccttttcagagtcaagcgagcattcccatcttttagtttcccctgttcttgtggctagtgcagtgataggtgtggttatcattctgagctgtatcacaattatcgtgggctctatccgcagagaccgacaggctcgtctccaacgccataggcacaggcaccaccggcaccaccaccatcaccaccatcaccgcaggcgaagacacagggagtatgagcacgggtatgtctcggacgaacacacctactcaaggtctagccgccgaatgcgctacgcttgctccagctcagaggactggcctccccctctcgatatctcttctgatggtgacgttgatgcgactgtgctgcgagaactctatccagacagtccacccggatatgaagagtgcgtagggccaggggctacacagctttatgtccctacagacgccccaccaccatattctcttaccgactcttgccccactttagatggcacatcagactccggcagcggtcacagtccaggaaggcaccaacaggaacagaggacacccgctcagggaggtctccatacggtaagcatggatactctgccaccatacgaagccgtgtgcggcgcaggtccacctagcggcttactccccctgcccggtccggatcccgggcccaggggaagccagggctctcctactccaactagagcgcccgcctctgggcccgaaagaattgtgtag

SEQ ID NO: 316126 - DNA, 753 bp, Artificial Sequence
  derived and/or modified sequence
gcacggtacaacagaacctcctatttctacccaactttttccgaaagttcggagcactcacaccttctggtctctccagtgctggtggcgtctgcagttattggagtggtgatcattctaagctgcattaccataattgtgggctctatccggagagatagacaggctagattgcagcgacacagacatcgccaccacagacatcaccaccatcaccaccatcatcgcaggaggcggcatcgggagtatgagcacgggtatgtgtcagatgagcacacttattcccgctcatctcgtcgcatgcgctatgcctgcagtagtagtgaagactggccccctcctctcgacattagcagtgacggggatgtggacgctactgtcctcagggaattgtaccctgattctccacccggatacgaagagtgcgtgggaccaggcgcaacacagctttacgttcccaccgatgccccaccaccctattcactcacagactcctgccccactttagacggaacgagtgacagtggctcaggtcattctcccggtcggcaccagcaggagcagcggacgcccgctcaggggggattacacaccgtctcaatggatactctccccccttacgaggccgtatgtggggctggccctccatctggccttttgcccctcccaggtcccgaccccggtccgcgaggatcccagggcagtcctactcctactagagctcccgcaagcggcccagagcggatagtctag

SEQ ID NO: 316127 - DNA, 780 bp, Artificial Sequence
  derived and/or modified sequence
atgtcgtttaagcgcccatgcccacttgccaggtataaccgcacttcttatttctacccaacattttcggaatctagcgaacatagccaccttctcgtgtctcccgtactggtcgcatcggccgtgattggcgtagtcatcatactctcttgcattaccattatcgtgggaagtatacggcgtgatcggcaagcacgccttcagcgccataggcacaggcatcatcgccaccatcaccaccaccaccaccatcggaggcggaggcatagagaatacgagcatgggtacgtgagcgatgagcacacatatagccggtcctctagaagaatgagatacgcctgctcctcatcagaggactggcctccccctcttgatatctctagtgacggagatgtggatgccactgtgctacgcgaactgtatccggactcacctcccggatatgaggaatgcgtagggcctggcgctacccaactctatgtgcccaccgatgcaccaccaccctacagtttgactgactcttgtcctaccctggatgggacctctgattccggatctgggcattccccagggagacaccagcaggaacaaagaacgccagcgcaggggggtctgcataccgtgagcatggatactctccctccctacgaagcagtgtgtggggcagggcctccaagtgggttgcttcctctcccaggcccagacccgggtccaagggggtcacaagggagccccacccctacgagagcgcctgctagtggacctgagcggatcgtctag

SEQ ID NO: 316128 - DNA, 3190 bp, Artificial Sequence
  derived and/or modified sequence
gcctgctgctgtgtgggtgtcgggctggctgtgcgcaaaggggcgcggctcggccctcccccgcacccgcgccccccgccccgcatctcggagtgacccgggccgcggcgccgcggtgctgaggcccgggagccgcgccgccgccgaggggggccggggccggtgacggtggcgtgggcggcggcgcggggacgacgggcggccgggcggggctgcggcagggcagggccagggccagggccggggcctgggaagccgccgccgccgctgcctcggcccgggatcgcgggcggctggtcggcccggctcgcctggccccgcctggcccgccccgccccgcccctgcgcgcccagcaggccgaagcgtagcggcgcgccccccgcgacgcccgagcccgagcgcagtggcctccgagcgggaaccggactgggagccggagccggggcgggaaccggagctggagccgaagctggagccggcactgcggcgcacggagcggagcgctgcagccaagccgatagcacgatacaaccgcaccagctacttctaccccacattctcagagagctcggagcacagccatctgctcgtgtcccccgtgctggtggcgagtgccgtcataggtgtggtcatcatcctctcctgcatcaccatcattgtgggcagcatccgcagggacaggcaggcccggcttcagcggcaccgccaccgccaccaccgccaccaccaccaccatcatcaccaccgccggcgtcgacaccgagagtacgagcacggctacgtgtcggacgagcacacatacagccgctcaagccgcaggatgcgctatgcctgcagctcctcagaggactggcccccacccttggacatcagctctgacggggacgtggatgccacggtgctcagggagctgtacccagattctccaccaggctacgaggagtgtgtggggccaggggccactcagctgtatgtccccacggacgcaccaccaccctactcgctgactgattcctgccccacgctggatggcacctccgactcaggcagcggccacagccctggccgacaccagcaggagcagaggaccccggcccaaggtggccttcacacggtctccatggacacccttcccccctacgaggctgtgtgcggggctggccccccatcaggcctgctgccactgccgggcccagacccagggccaaggggctcccagggctcacccaccccaacccgggccccagcctctggcccagagaggattgtgtgagggacccagccagccgggtcctgctggtccctacaggctgaaccacattctttaggcacacaaaggcgtgcacacacacacagagatgcacacgtgactcataacacacacatagaccaaacttgtatacacacagacatctacactgacataccccatgtacacacacagatctagacgtgctccacatatgtgtgaatatgcgcacatacaggcctaccacaaacacaaaacccacctgcaaaggtttcacggaacgtggagctctcctggcctcccgtccctcctcccggcctgtttgttgtgcctctgtagagagcgcttcggagagagaggcgaagtaggaagtgggattttctcttccctctcctgggcccgtttgcccctaccctcgcccagcaagctgcgcccaaattctattctgcctctggaaactgctggaccatccaaggtcagctgcctgccctgacccctaccccagggccagcttgtcctcctgggaggcgggacaggccccagtgaggttccgttgtgcgctgtgcctatctctcgattccagggcagatgagccacaacatcaccaccctgccacttacaaggtgggggacctgggtctggggtctcaggcgcaaactggaggccctcacagcccactaggccccctcccaaccccagtaccctcagtccctcagtcaggtggtgctagtagagctatctctgacgctgcaggccccaggtagatgggcagggccctccgtgggtgtgcagcggcggttccctcatcagtccagccactgcccaggactaagggtcttcaaggaagatgaggccattgcccttctccaggtggcttcaccacagtgctgcctgggcacctctctgaggcagagaagtggcccctccctcagtccctgcctggccgaccactgtggcctgcacgcgaatgggtcagagccagaccccggagctggtgctgtccttctaggtggctgctcatagctggggatggtgagtggctgtgttctggccttgcccacgtgggtgtttgcagagacaaaatgaaggggatatgctccccataaataccaccttgccaccacaagaggaccagaaggctactcagccttgctgccacagaaggggatttgtagggtcagcctggctgcagaaaggctggctcagatcttgaccaagaaaccccagcgatttccatcaaagaccacgcaggtaacagaggtgattcctgaagacccagcccacagagggtggcagccaagcatctctgagcagtgtccctgctagcatcgccagcggccatcactctgcctccctcccacctcttgtccctcgtcgttaaaaaacagcaccctatcctgcttccccacatttctgttcctccaatgaagggctaagactatttagtaatctctttcttaagcagaggagtggcaaggatggcaatcttgaattttattttctgtagagatagcatttcttctggtgcggagctgaaaggaatccacccagaagttctgtagcatcctgcgtgcagcctcctggagccccagactccatctgggggagggacttgtttacaagcagttctgaccaccttagtggtgtactgttttctaggcaaaaaatatctgtctgttgtactgtatagcctttaaaatgcagtccaggaatgagactcttttaagaaacacatcctgcttctgcaattccagagagtgctgggggaaaaaaagggataaaaattcctacctactcatcagtgtttgaaagatggagctgaatagcttttcttgttcctggactaggcaatgaataagcaacaatgtatcttttctgtgttcaaaataaatacataatatcaataaaatgtagcaagaagtaacactttcagagagtgc

SEQ ID NO: 316129 - DNA, 3297 bp, Artificial Sequence
  derived and/or modified sequence
gcctgctgctgtgtgggtgtcgggctggctgtgcgcaaaggggcgcggctcggccctcccccgcacccgcgccccccgccccgcatctcggagtgacccgggccgcggcgccgcggtgctgaggcccgggagccgcgccgccgccgaggggggccggggccggtgacggtggcgtgggcggcggcgcggggacgacgggcggccgggcggggctgcggcagggcagggccagggccagggccggggcctgggaagccgccgccgccgctgcctcggcccgggatcgcgggcggctggtcggcccggctcgcctggccccgcctggcccgccccgccccgcccctgcgcgcccagcaggccgaagcgtagcggcgcgccccccgcgacgcccgagcccgagcgcagtggcctccgagcgggaaccggactgggagccggagccggggcgggaaccggagctggagccgaagctggagccggcactgcggcgcacggagcggagcgctgcagccaagccgagtgagtggaggggccttccctgcgagaagtcagagctgtgcccgtgggcaggctggctccgctgttctgctccaaggattacatgtccttcaaacgtccctgccccttagcacgatacaaccgcaccagctacttctaccccacattctcagagagctcggagcacagccatctgctcgtgtcccccgtgctggtggcgagtgccgtcataggtgtggtcatcatcctctcctgcatcaccatcattgtgggcagcatccgcagggacaggcaggcccggcttcagcggcaccgccaccgccaccaccgccaccaccaccaccatcatcaccaccgccggcgtcgacaccgagagtacgagcacggctacgtgtcggacgagcacacatacagccgctcaagccgcaggatgcgctatgcctgcagctcctcagaggactggcccccacccttggacatcagctctgacggggacgtggatgccacggtgctcagggagctgtacccagattctccaccaggctacgaggagtgtgtggggccaggggccactcagctgtatgtccccacggacgcaccaccaccctactcgctgactgattcctgccccacgctggatggcacctccgactcaggcagcggccacagccctggccgacaccagcaggagcagaggaccccggcccaaggtggccttcacacggtctccatggacacccttcccccctacgaggctgtgtgcggggctggccccccatcaggcctgctgccactgccgggcccagacccagggccaaggggctcccagggctcacccaccccaacccgggccccagcctctggcccagagaggattgtgtgagggacccagccagccgggtcctgctggtccctacaggctgaaccacattctttaggcacacaaaggcgtgcacacacacacagagatgcacacgtgactcataacacacacatagaccaaacttgtatacacacagacatctacactgacataccccatgtacacacacagatctagacgtgctccacatatgtgtgaatatgcgcacatacaggcctaccacaaacacaaaacccacctgcaaaggtttcacggaacgtggagctctcctggcctcccgtccctcctcccggcctgtttgttgtgcctctgtagagagcgcttcggagagagaggcgaagtaggaagtgggattttctcttccctctcctgggcccgtttgcccctaccctcgcccagcaagctgcgcccaaattctattctgcctctggaaactgctggaccatccaaggtcagctgcctgccctgacccctaccccagggccagcttgtcctcctgggaggcgggacaggccccagtgaggttccgttgtgcgctgtgcctatctctcgattccagggcagatgagccacaacatcaccaccctgccacttacaaggtgggggacctgggtctggggtctcaggcgcaaactggaggccctcacagcccactaggccccctcccaaccccagtaccctcagtccctcagtcaggtggtgctagtagagctatctctgacgctgcaggccccaggtagatgggcagggccctccgtgggtgtgcagcggcggttccctcatcagtccagccactgcccaggactaagggtcttcaaggaagatgaggccattgcccttctccaggtggcttcaccacagtgctgcctgggcacctctctgaggcagagaagtggcccctccctcagtccctgcctggccgaccactgtggcctgcacgcgaatgggtcagagccagaccccggagctggtgctgtccttctaggtggctgctcatagctggggatggtgagtggctgtgttctggccttgcccacgtgggtgtttgcagagacaaaatgaaggggatatgctccccataaataccaccttgccaccacaagaggaccagaaggctactcagccttgctgccacagaaggggatttgtagggtcagcctggctgcagaaaggctggctcagatcttgaccaagaaaccccagcgatttccatcaaagaccacgcaggtaacagaggtgattcctgaagacccagcccacagagggtggcagccaagcatctctgagcagtgtccctgctagcatcgccagcggccatcactctgcctccctcccacctcttgtccctcgtcgttaaaaaacagcaccctatcctgcttccccacatttctgttcctccaatgaagggctaagactatttagtaatctctttcttaagcagaggagtggcaaggatggcaatcttgaattttattttctgtagagatagcatttcttctggtgcggagctgaaaggaatccacccagaagttctgtagcatcctgcgtgcagcctcctggagccccagactccatctgggggagggacttgtttacaagcagttctgaccaccttagtggtgtactgttttctaggcaaaaaatatctgtctgttgtactgtatagcctttaaaatgcagtccaggaatgagactcttttaagaaacacatcctgcttctgcaattccagagagtgctgggggaaaaaaagggataaaaattcctacctactcatcagtgtttgaaagatggagctgaatagcttttcttgttcctggactaggcaatgaataagcaacaatgtatcttttctgtgttcaaaataaatacataatatcaataaaatgtagcaagaagtaacactttcagagagtgc

SEQ ID NO: 316130 - protein, 242 aa, Artificial Sequence
  derived and/or modified sequence
MPRGFTWLRYLGIFLGVALGNEPLEMWPLTQNEECTVTGFLRDKLQYRSRLQYMKHYFPINYKISVPYEGVFRIANVTRLQRAQVSERELRYLWVLVSLSATESVQDVLLEGHPSWKYLQEVETLLLNVQQGLTDVEVSPKVESVLSLLNAPGPNLKLVRPKALLDNCFRVMELLYCSCCKQSSVLNWQDCEVPSPQSCSPEPSLQYAATQLYPPPPWSPSSPPHSTGSVRPVRAQGEGLLP

SEQ ID NO: 316131 - DNA, 729 bp, Artificial Sequence
  derived and/or modified sequence
atgcccagaggcttcacctggctgagatacctgggcatcttcctgggcgtggccctgggcaacgagcccctggagatgtggcccctgacccagaacgaggagtgcaccgtgaccggcttcctgagagacaagctgcagtacagaagcagactgcagtacatgaagcactacttccccatcaactacaagatcagcgtgccctacgagggcgtgttcagaatcgccaacgtgaccagactgcagagagcccaggtgagcgagagagagctgagatacctgtgggtgctggtgagcctgagcgccaccgagagcgtgcaggacgtgctgctggagggccaccccagctggaagtacctgcaggaggtggagaccctgctgctgaacgtgcagcagggcctgaccgacgtggaggtgagccccaaggtggagagcgtgctgagcctgctgaacgcccccggccccaacctgaagctggtgagacccaaggccctgctggacaactgcttcagagtgatggagctgctgtactgcagctgctgcaagcagagcagcgtgctgaactggcaggactgcgaggtgcccagcccccagagctgcagccccgagcccagcctgcagtacgccgccacccagctgtaccccccccccccctggagccccagcagccccccccacagcaccggcagcgtgagacccgtgagagcccagggcgagggcctgctgccctag

SEQ ID NO: 316132 - DNA, 729 bp, Artificial Sequence
  derived and/or modified sequence
atgccccggggctttacatggctgcggtatctgggaatattcttgggcgtagccctgggaaatgagcccctggagatgtggcccctgacacaaaacgaggagtgtaccgttaccggttttctgcgcgacaaactgcaataccgttccagacttcaatatatgaagcattacttcccgatcaactacaagatctctgttccctatgagggggtattccggattgctaacgtgaccaggctgcaaagagcccaggtgtccgaacgagagttacggtacctgtgggtcctcgtgtctctgtccgctactgaatcggtacaggacgtcctgctcgagggacatcctagctggaaatatctccaggaagtggagacgttactgctgaacgtgcagcaaggattaactgatgttgaggtgtcccccaaagtagaatcagtgctgtctctgctgaacgcaccagggcctaaccttaagttggtcaggcctaaggccctgctggataattgcttccgggtcatggagcttctttattgttcctgttgcaagcagtcgtctgtgctgaattggcaagactgcgaagtgcctagccctcagagctgttctcctgaaccttctcttcagtacgctgccacccaactgtacccaccccctccctggtctccctcgtccccgccacacagcaccggaagcgttcggccagtcagggcacagggtgaagggcttcttccttag

SEQ ID NO: 316133 - DNA, 729 bp, Artificial Sequence
  derived and/or modified sequence
atgccacgtggctttacttggcttagatacctgggaatctttctcggagtagccttggggaacgaacctttggaaatgtggccgctcacccagaatgaggagtgtaccgtgactggctttctcagggacaaactgcagtatcggtcacgactgcagtacatgaagcactacttccctatcaattacaaaatctcagttccctatgaaggagtgttccggatagccaatgttacccggcttcaacgggcacaggtgagcgagcgcgagctgcgatatctgtgggtactggtgtccttgtcggctaccgagtcggtgcaggacgtgctacttgaaggacatccgtcttggaagtacctccaggaggtagaaacactcctgctcaatgtgcagcaaggactcactgatgtggaggtgtcccctaaggtagagagcgttctttccctgctgaacgcacctgggcccaacctcaagctggtgcgccccaaagccctgctagataactgttttcgagttatggagttgctatattgttcttgctgcaagcaatcgagcgtcctgaattggcaggattgcgaagttccaagtccccaatcttgtagcccagagcctagcttgcagtacgcagctacacaactgtatccaccccccccttggagcccttcttctcccccgcatagtaccggctccgtgcggcccgtgagagcccagggggagggcctactaccatag

SEQ ID NO: 316134 - DNA, 729 bp, Artificial Sequence
  derived and/or modified sequence
atgccccggggcttcacctggctgcgctacctgggcatcttcctgggcgtggccctgggcaatgagcccctggagatgtggcccctgacccagaatgaggagtgcaccgtgacaggcttcctgcgggacaagctgcagtaccgcagccggctgcagtacatgaagcactacttccccatcaactacaagatctctgtgccctatgagggcgtcttccgcatcgccaacgtgacccggctgcagagggcccaggtgtctgagcgggagctgcgctacctgtgggtgctggtgtccctgagcgccacagagagcgtgcaggatgtgctgctggagggccaccccagctggaagtacctgcaggaggtggagaccctgctgctgaatgtgcagcagggcctgacagatgtggaggtgagccccaaggtggagagcgtgctgagcctgctgaatgcccctggccccaacctgaagctggtgcggcccaaggccctgctggacaactgcttccgggtgatggagctgctgtactgcagctgctgcaagcagagctctgtgctgaactggcaggactgtgaggtgcccagcccccagagctgcagccctgagcccagcctgcagtatgctgccacccagctgtacccacctccaccctggagccccagcagccccccccacagcactggatctgtgcggcctgtgcgggcccagggcgagggcctgctgccctag

SEQ ID NO: 316135 - DNA, 729 bp, Artificial Sequence
  derived and/or modified sequence
atgccccggggcttcacctggctgcggtacctgggcatcttcctgggcgtggctttgggtaatgaacctttggagatgtggcctctgacgcagaacgaagaatgtaccgtgacaggctttctgcgcgacaaactacaataccgttctaggttacagtatatgaagcactatttcccaatcaactacaagatctccgtgccttatgagggagtgttccgcatcgccaacgtaaccaggctgcagagagctcaggtgtcagagcgtgaattaaggtacctatgggtactggtgagcctcagcgctacggagtctgtgcaggatgttcttctcgaaggtcatcccagctggaaatatctacaggaggtggaaacgctgctgctcaacgtgcagcagggtctgactgatgttgaggtgtctcccaaggtggaatctgtgctgagcttgctgaatgctcccggaccaaacctgaaactggtgcgtcctaaagctctactagataactgtttccgggttatggaactattgtactgctcatgctgtaagcagtcttcagttctcaattggcaggactgtgaggtgccttcaccgcaatcgtgctctccagagccgtccctgcagtacgctgcaacgcagctgtacccgcctcctccatggagcccctctagtcccccccactctacaggatctgtcagaccagtgcgggcccaaggggaaggcctgctgccatag

SEQ ID NO: 316136 - DNA, 729 bp, Artificial Sequence
  derived and/or modified sequence
atgccccggggcttcacctggctgcggtacctgggcatcttcctgggagtggccctgggcaacgaacccctggagatgtggccactgacacagaatgaagagtgcacagtaaccggatttctgcgtgacaagctgcaatacagaagtaggctccaatatatgaagcattattttccgatcaactataaaatttcagtaccctatgaaggagttttcagaatagccaacgtgacgcggctgcagagggctcaggtttcggagagggaattaaggtacctctgggttctggtgagtctgtccgctactgagagcgtgcaggacgtgcttcttgaggggcatcctagctggaagtacctccaggaagtggagaccctgctgctgaacgttcagcaaggactcaccgacgtggaggtgtctcctaaagtcgaaagcgtgctcagtctactcaacgctcctggccccaacctaaagcttgtgcgacccaaagctctgctcgacaattgcttccgggtgatggagctgttatattgtagctgttgtaagcagagcagtgttctgaattggcaagattgcgaggttccttccccacagagctgctcgccagaaccctccctgcagtacgccgctacacagttgtatccaccccctccctggagtccctcgtccccaccacatagcaccggttccgttaggccagtgcgtgcgcagggcgaaggtctgcttccatag

SEQ ID NO: 316137 - DNA, 729 bp, Artificial Sequence
  derived and/or modified sequence
atgccccgtgggttcacatggctcagatacttaggcatttttctgggtgtggctctgggaaacgaaccgctcgagatgtggcctttgacccagaacgaagagtgcacggtgacgggattcctgcgtgacaagctccaatatcgctctcgtctgcagtacatgaagcactactttccaataaactataaaatttccgtcccctacgagggcgtatttcgcattgcaaacgtaacccgcctccagcgtgcccaagtcagtgagcgagagctgagatacctgtgggtccttgtaagccttagcgcgactgagagtgttcaagacgtgctcctcgaagggcacccgagttggaagtatcttcaggaggtggagaccctgctgctcaatgttcagcaaggcttaacagatgtggaggtctctccaaaggtggaaagtgtgctgtccctgctgaacgcccctggccctaacttgaagctggtaaggccaaaggcgcttctcgataattgctttagggtcatggagctcctgtactgttcctgctgcaaacaaagttcagtgctcaattggcaggattgtgaagtgccaagcccacagagctgcagccctgagccaagtctgcagtacgccgctacccagttgtatccaccaccaccatggagtccaagctcccctccacattctacaggatcagtgaggcctgtccgcgctcagggggagggacttctgccttag

SEQ ID NO: 316138 - DNA, 729 bp, Artificial Sequence
  derived and/or modified sequence
atgccacgaggcttcacctggctgcgctatcttggcatcttcctaggagtagccctcggcaacgagccactcgaaatgtggcctctcacacagaatgaggagtgcaccgttaccggctttctgcgcgataagctgcagtatagaagcagactccagtatatgaagcattatttcccgataaattacaaaattagcgtaccttacgagggggtattcaggatagctaatgtgaccaggttgcaacgcgctcaagtctcagagcgggagctgcgttatctttgggttcttgtgagcctctccgctactgagtctgtccaggacgttttgctggagggccatccctcctggaaatacctccaggaagtggagacgctcctcctgaacgtccaacagggcctaacggatgtggaggtgtccccaaaggtcgaatccgttctgtcactgctgaatgctcccggtccaaacctcaagctggtacgccctaaagccctgctcgataattgtttcagggtgatggaactgctttactgtagttgctgcaagcaatcttcagtgctgaactggcaggattgcgaggtgccgagtccacagagctgttctcccgaacctagtctgcagtacgccgctactcagctgtaccctccccctccttggtcaccctccagtcccccacacagcacaggttccgtgaggccagtacgagctcaaggggaagggttgctgccttag

SEQ ID NO: 316139 - DNA, 1607 bp, Artificial Sequence
  derived and/or modified sequence
agcagctgcagtcggagaaatcagagaaagcgtcacccagccccagattccgaggggcctgccagggactctctcctcctgctccttggaaaggaagaccccgaaagacccccaagccaccggctcagacctgcttctgggctgccatgggacttgcggccaccgccccccggctgtcctccacgctgccgggcagataagggcagctgctgcccttggggcacctgctcactcccgcagcccagccactcctccagggccagcccttccctgactgagtgaccacctctgctgccccgaggccatgtaggccgtgcttaggcctctgtggacacactgctggggacggcgcctgagctctcagggggacgaggaacaccaccatgccccggggcttcacctggctgcgctatcttgggatcttccttggcgtggccttggggaatgagcctttggagatgtggcccttgacgcagaatgaggagtgcactgtcacgggttttctgcgggacaagctgcagtacaggagccgacttcagtacatgaaacactacttccccatcaactacaagatcagtgtgccttacgagggggtgttcagaatcgccaacgtcaccaggctgcagagggcccaggtgagcgagcgggagctgcggtatctgtgggtcttggtgagcctcagtgccactgagtcggtgcaggacgtgctgctcgagggccacccatcctggaagtacctgcaggaggtggagacgctgctgctgaatgtccagcagggcctcacggatgtggaggtcagccccaaggtggaatccgtgttgtccctcttgaatgccccagggccaaacctgaagctggtgcggcccaaagccctgctggacaactgcttccgggtcatggagctgctgtactgctcctgctgtaaacaaagctccgtcctaaactggcaggactgtgaggtgccaagtcctcagtcttgcagcccagagccctcattgcagtatgcggccacccagctgtaccctccgcccccgtggtcccccagctccccgcctcactccacgggctcggtgaggccggtcagggcacagggcgagggcctcttgccctgagcaccctggatggtgactgcggataggggcagccagaccagctcccacaggagttcaactgggtctgagacttcaaggggtggtggtgggagccccccttgggagaggacccctgggaagggtgtttttcctttgagggggattctgtgccacagcagggctcagcttcctgccttccatagctgtcatggcctcacctggagcggaggggacctggggacctgaaggtggatggggacacagctcctggcttctcctggtgctgccctcactgtccccccgcctaaagggggtactgagcctcctgtggcccgcagcagtgagggcacagctgtgggttgcaggggagacagccagcacggcgtggccattctatgaccccccagcctggcagactggggagctgggggcagagggcggtgccaagtgccacatcttgccatagtggatgctcttccagtttcttttttctattaaacaccccacttcctttgg

SEQ ID NO: 316140 - DNA, 1779 bp, Artificial Sequence
  derived and/or modified sequence
catcagacgggaagcctggactgtgggttgggggcagcctcagcctctccaacctggcacccactgcccgtggcccttaggcacctgcttggggtcctggagccccttaaggccaccagcaaatcctaggagaccgagtcttggcacgtgaacagagccagatttcacactgagcagctgcagtcggagaaatcagagaaagcgtcacccagccccagattccgaggggcctgccagggactctctcctcctgctccttggaaaggaagaccccgaaagacccccaagccaccggctcagacctgcttctgggctgccatgggacttgcggccaccgccccccggctgtcctccacgctgccgggcagataagggcagctgctgcccttggggcacctgctcactcccgcagcccagccactcctccagggccagcccttccctgactgagtgaccacctctgctgccccgaggccatgtaggccgtgcttaggcctctgtggacacactgctggggacggcgcctgagctctcagggggacgaggaacaccaccatgccccggggcttcacctggctgcgctatcttgggatcttccttggcgtggccttggggaatgagcctttggagatgtggcccttgacgcagaatgaggagtgcactgtcacgggttttctgcgggacaagctgcagtacaggagccgacttcagtacatgaaacactacttccccatcaactacaagatcagtgtgccttacgagggggtgttcagaatcgccaacgtcaccaggctgcagagggcccaggtgagcgagcgggagctgcggtatctgtgggtcttggtgagcctcagtgccactgagtcggtgcaggacgtgctgctcgagggccacccatcctggaagtacctgcaggaggtggagacgctgctgctgaatgtccagcagggcctcacggatgtggaggtcagccccaaggtggaatccgtgttgtccctcttgaatgccccagggccaaacctgaagctggtgcggcccaaagccctgctggacaactgcttccgggtcatggagctgctgtactgctcctgctgtaaacaaagctccgtcctaaactggcaggactgtgaggtgccaagtcctcagtcttgcagcccagagccctcattgcagtatgcggccacccagctgtaccctccgcccccgtggtcccccagctccccgcctcactccacgggctcggtgaggccggtcagggcacagggcgagggcctcttgccctgagcaccctggatggtgactgcggataggggcagccagaccagctcccacaggagttcaactgggtctgagacttcaaggggtggtggtgggagccccccttgggagaggacccctgggaagggtgtttttcctttgagggggattctgtgccacagcagggctcagcttcctgccttccatagctgtcatggcctcacctggagcggaggggacctggggacctgaaggtggatggggacacagctcctggcttctcctggtgctgccctcactgtccccccgcctaaagggggtactgagcctcctgtggcccgcagcagtgagggcacagctgtgggttgcaggggagacagccagcacggcgtggccattctatgaccccccagcctggcagactggggagctgggggcagagggcggtgccaagtgccacatcttgccatagtggatgctcttccagtttcttttttctattaaacaccccacttcctttgg

SEQ ID NO: 316141 - DNA, 252 bp, Artificial Sequence
  derived and/or modified sequence
atggcagcagccacagcatccccacgcagcttgctcgtcctgcttcaggtggttgtgctggctttagcgcaaatcaggggccctccaggcgagagggggcctcctggaccccctggacctccaggagtccctggttcagacggtatagacggccctccgggacctgtcgggctgcctggagaaattggcatccgaggacctaagggcgacccaggccctgatgggcctagcggtccacctgggcctccctag

SEQ ID NO: 316142 - DNA, 600 bp, Artificial Sequence
  derived and/or modified sequence
atgctccccgtgcaacgtcgcaagctcgaccctctcctgaagaaatatagacaccataagaaggcgactcgcactaaaagaagaagaaaagaaaaaatggaggcacagtgcagcccagtgcccccaacccctagtaccccacctcagagcgaagaggacgaggcagtggataagaaaccaaccctgctgtccgcccaggaagatacgccggacctcctgcatgaggatcgtctccagtatttgcaggaagaagggtcaggcgtgatgcaccaggagtgccaaattcaatcctgtgaactttccgtggcccagaagccacggccctcctcaccagcggtcacctcattagcatctccccccctctgtttcggctcattcctgagttgtgtctgccagaccttctctagaagcaggaagcagaaacccccccggagaaaaggcaacaaccaggctgaggctggtggtgatgctgaggtgcttaggcctggacccgccaagcccgaactctcgctgagtaaaacttgtagccacctgaaatcgattgagctgtcattcgtcttctcctttattgttctcagtgtgtgtcactgttccagttag

SEQ ID NO: 316143 - DNA, 3307 bp, Artificial Sequence
  derived and/or modified sequence
cgcccttcccccaccaccagcggcgagtgggtgacagagcccccgtctccgcgcgtcttcgccgccctgcgccgtgacccgctgtggcactgggccacgagtggaggctgcgcccctccagttctgccttcatagttctctgcctttgcccaaaactgcagaaaatgaacaaatcccagggatcagtttcattcacggatgtgactgtggactttacccaggaggaatgggaacaactggacccctctcagaggatcctatacatggatgtgatgctggagaattatagcaacttactttcagtggaagtgtggaaggctgatgaccagatggagagagaccacagaaacccagacgagcaggcgaggcaatttttaattcttaagaaccaaaccccaattgaggaaagaggcgatctctttggaaaagcacttaatctgaacacagactttgtttctttaagacaagtaccttataaatatgacttatatgaaaaaactttgaaatataattcagacttgcttaatagtaatagaagctatgcaggaaagcagactgatgagtgtaatgaatttggaaaagcacttctctacctgaagcaagagaaaacccacagtggagtagaatattctgaatacaataaaagtggaaaagccctcagccataaagcagccatttttaaacatcagaaaataaaaaacttggttcaacctttcatttgtacttactgtgacaaggctttctcctttaagtcactcctcattagtcataagagaatacatactggagaaaagccatatgaatgcaatgtatgtaagaaaaccttctcccataaggccaacctcatcaaacatcagagaattcacactggggagaaacctttcgagtgtccggaatgtggaaaagctttcacccaccagtcaaacctcattgtacaccagagagcacatatggagaagaagccctatgagtgcagtgaatgtggaaagacatttgcccaaaagtttgaactcaccacacaccagagaattcatacaggagagcgaccctatgagtgtaacgaatgtgcaaaaaccttctttaagaagtcaaaccttatcatacatcagaagattcacacgggggagaaacgctatgagtgcagtgaatgtggaaaatcctttatccagaactcacagctcatcatacacatgagaactcatacaggagagaaaccctatgaatgtactgagtgcggcaaaactttcagccagaggtcaactcttagattacacttgcgaatccacacaggagagaaaccatatgagtgttccgaatgtgggaaggcctttagcaggaagtcccgactcagtgtccatcagagagttcacatcggggagaaaccctgaaactccagccaggtcttactgtggaaaactcctgccagaactcttcaagcgggtgaaaaacctcatgacagtattgagggaacatgggaattcatactgagatgcaatctctcaactcaaaaatgtattaaaaataggatcccatgagaacattatactggaagttacatgtgatacccagctaaagaatacatatcagaatatatccagttgtaaatagccatacccagttgtactacaatgagctttttaaaatcttgaatgaattgagtattctagacagcagcataagaaatatacaaacagtatcctatgaatttagtggttttatgtggatatgccacaaaacacaagtggtatgctttagatctgcacatgtgaatttagcataatcactgggaatttgaaattcttgtcctctgtgataattaggacataacaagattttccatactaaacatcacatgtgtttttcagtatctctgcaatccagtatgcattccaaatgaaatgtgtaacatttaaagtagcatggaacctacgtctttccctactgcttgctggcatatatcagttggtatgaacattgttcttgagctgcctcttaggaaacagaagacagtgttgaagttttccctgcttctggtttgctgaagattttctagaagcactatttacacaaatatgcaaatgtgaaataaccgatctataacgtgaaggaggcagacatgagctgtactactcagtatgcaccacagaataagagtttgccgtgtaaagacaatatccccattcgtcatgctcttattttcccgtgggatatttgcatacaaatgcatgtctgttaccaaaatattgtgtaacacagacagaaaccacctgtttttgtctttccttgtttcccttaatatttcatgaattgtctagcaaaaatggtaggatgcttctgtagttcacaaatgttacatttcagagactttagaggaaaaattattttaaataactgtcaactgtttcattgctttttaaatttttcacgtgcataaccccctttagaagtaaatttttacactattttgttgtttaaaggaggcatttctacttccttgagttttgctgttgccaacctaaaacatttccctttggaacatgagttataagttattacttttcctttacatgtttacacttttataaaaatcagatttttcagtggtctctccagatattaacaagaattgttgtgtaactcaaagatttgcttttatagacttgatttcaaattcttaagttcagcctttccctatcaatcacaaatcatgtattggaaattataaatggcaaccaaaaactggcttttaaaaaatatttttggatatcattgatgtgctgtcacactatatattgagtgactttctgaacaaatttatccagaacatccatagcccaataagcttttgtctaagttgtcatcttacttactcacaaaggaggggaaaacgttattttcatagctgcttttagaaatgtaaattgtaacagcctccttggacaacattgtgagtctgttttaacattaatatactcttacaacctaggaatctcctgggaatctatccctaaggaataaaaagcgccagcacttaagattatatgtttactaatgtatattgtattttttggtaaggaccaaaaaaacaaacaaaaaaaagaccatcagtaagggaatggatgaataaattgtggtaaaaacataccatggctgaatggtatttccttgaaaagaatgtgtgggaacaaactccaaacttctctaggtcaaatgaggaaagcaagaggggagagagagagtgtatgtgtgtgtgtagcagtttttataaaataaagataaacccttataaaaaaaaaaaaaaaaaaaa

SEQ ID NO: 316144 - DNA, 3285 bp, Artificial Sequence
  derived and/or modified sequence
cgcccttcccccaccaccagcggcgagtgggtgacagagcccccgtctccgcgcgtcttcgccgccctgcgccgtgacccgctgtggcactgggccacgagtggaggctgcgcccctccagttctgccttcatagttctctgcctttgcccaaaactgcagaaaatgaacaaatcccagggatcagtttcattcacggatgtgactgtggactttacccaggaggaatgggaacaactggacccctctcagaggatcctatacatggatgtgatgctggagaattatagcaacttactttcagtggaagtgtggaaggctgatgaccagatggagagagaccacagaaacccagacgagcaggcgaggcaatttttaattcttaagaaccaaaccccaattgaggaaagaggcgatctctttggaaaagcacttaatctgaacacagactttgtttctttaagacaagtaccttataaatatgacttatatgaaaaaactttgaaatataattcagacttgcttaatagtaatagaagctatgcaggaaagcagactgatgagtgtaatgaatttggaaaagcacttctctacctgaagcaagagaaaacccacagtggagtagaatattctgaatacaataaaagtggaaaagccctcagccataaagcagccatttttaaacatcagaaaataaaaaacttggttcaacctttcatttgtacttactgtgacaaggctttctcctttaagtcactcctcattagtcataagagaatacatactggagaaaagccatatgaatgcaatgtatgtaagaaaaccttctcccataaggccaacctcatcaaacatcagagaattcacactggggagaaacctttcgagtgtccggaatgtggaaaagctttcacccaccagtcaaacctcattgtacaccagagagcacatatggagaagaagccctatgagtgcagtgaatgtggaaagacatttgcccaaaagtttgaactcaccacacaccagagaattcatacaggagagcgaccctatgagtgtaacgaatgtgcaaaaaccttctttaagaagtcaaaccttatcatacatcagaagattcacacgggggagaaacgctatgagtgcagtgaatgtggaaaatcctttatccagaactcacagctcatcatacacatgagaactcatacaggagagaaaccctatgaatgtactgagtgcggcaaaactttcagccagaggtcaactcttagattacacttgcgaatccacacaggagagaaaccatatgagtgttccgaatgtgggaaggcctttagcaggaagtcccgactcagtgtccatcagagagttcacatcggggagaaaccctgaaactccagccaggtcttactgtggaaaactcctgccagaactcttcaagcgggtgaaaaacctcatgacagtattgagggaacatgggaattcatactgagatgcaatctctcaactcaaaaatgtattaaaaataggatcccatgagaacattatactggaagttacatgtgatacccagctaaagaatacatatcagaatatatccagttgtaaatagccatacccagttgtactacaatgagctttttaaaatcttgaatgaattgagtattctagacagcagcataagaaatatacaaacagtatcctatgaatttagtggttttatgtggatatgccacaaaacacaagtggtatgctttagatctgcacatgtgaatttagcataatcactgggaatttgaaattcttgtcctctgtgataattaggacataacaagattttccatactaaacatcacatgtgtttttcagtatctctgcaatccagtatgcattccaaatgaaatgtgtaacatttaaagtagcatggaacctacgtctttccctactgcttgctggcatatatcagttggtatgaacattgttcttgagctgcctcttaggaaacagaagacagtgttgaagttttccctgcttctggtttgctgaagattttctagaagcactatttacacaaatatgcaaatgtgaaataaccgatctataacgtgaaggaggcagacatgagctgtactactcagtatgcaccacagaataagagtttgccgtgtaaagacaatatccccattcgtcatgctcttattttcccgtgggatatttgcatacaaatgcatgtctgttaccaaaatattgtgtaacacagacagaaaccacctgtttttgtctttccttgtttcccttaatatttcatgaattgtctagcaaaaatggtaggatgcttctgtagttcacaaatgttacatttcagagactttagaggaaaaattattttaaataactgtcaactgtttcattgctttttaaatttttcacgtgcataaccccctttagaagtaaatttttacactattttgttgtttaaaggaggcatttctacttccttgagttttgctgttgccaacctaaaacatttccctttggaacatgagttataagttattacttttcctttacatgtttacacttttataaaaatcagatttttcagtggtctctccagatattaacaagaattgttgtgtaactcaaagatttgcttttatagacttgatttcaaattcttaagttcagcctttccctatcaatcacaaatcatgtattggaaattataaatggcaaccaaaaactggcttttaaaaaatatttttggatatcattgatgtgctgtcacactatatattgagtgactttctgaacaaatttatccagaacatccatagcccaataagcttttgtctaagttgtcatcttacttactcacaaaggaggggaaaacgttattttcatagctgcttttagaaatgtaaattgtaacagcctccttggacaacattgtgagtctgttttaacattaatatactcttacaacctaggaatctcctgggaatctatccctaaggaataaaaagcgccagcacttaagattatatgtttactaatgtatattgtattttttggtaaggaccaaaaaaacaaacaaaaaaaagaccatcagtaagggaatggatgaataaattgtggtaaaaacataccatggctgaatggtatttccttgaaaagaatgtgtgggaacaaactccaaacttctctaggtcaaatgaggaaagcaagaggggagagagagagtgtatgtgtgtgtgtagcagtttttataaaataaagataaaccctt

SEQ ID NO: 316145 - DNA, 3230 bp, Artificial Sequence
  derived and/or modified sequence
cgccgccctgcgccgtgacccgctgtggcactgggccacgagtggaggctgcgcccctccaggtacgagaggggcttccagttctgccttcatagttctctgcctttgcccaaaactgcagaaaatgaacaaatcccagggatcagtttcattcacggatgtgactgtggactttacccaggaggaatgggaacaactggacccctctcagaggatcctatacatggatgtgatgctggagaattatagcaacttactttcagtggaagtgtggaaggctgatgaccagatggagagagaccacagaaacccagacgagcaggcgaggcaatttttaattcttaagaaccaaaccccaattgaggaaagaggcgatctctttggaaaagcacttaatctgaacacagactttgtttctttaagacaagtaccttataaatatgacttatatgaaaaaactttgaaatataattcagacttgcttaatagtaatagaagctatgcaggaaagcagactgatgagtgtaatgaatttggaaaagcacttctctacctgaagcaagagaaaacccacagtggagtagaatattctgaatacaataaaagtggaaaagccctcagccataaagcagccatttttaaacatcagaaaataaaaaacttggttcaacctttcatttgtacttactgtgacaaggctttctcctttaagtcactcctcattagtcataagagaatacatactggagaaaagccatatgaatgcaatgtatgtaagaaaaccttctcccataaggccaacctcatcaaacatcagagaattcacactggggagaaacctttcgagtgtccggaatgtggaaaagctttcacccaccagtcaaacctcattgtacaccagagagcacatatggagaagaagccctatgagtgcagtgaatgtggaaagacatttgcccaaaagtttgaactcaccacacaccagagaattcatacaggagagcgaccctatgagtgtaacgaatgtgcaaaaaccttctttaagaagtcaaaccttatcatacatcagaagattcacacgggggagaaacgctatgagtgcagtgaatgtggaaaatcctttatccagaactcacagctcatcatacacatgagaactcatacaggagagaaaccctatgaatgtactgagtgcggcaaaactttcagccagaggtcaactcttagattacacttgcgaatccacacaggagagaaaccatatgagtgttccgaatgtgggaaggcctttagcaggaagtcccgactcagtgtccatcagagagttcacatcggggagaaaccctgaaactccagccaggtcttactgtggaaaactcctgccagaactcttcaagcgggtgaaaaacctcatgacagtattgagggaacatgggaattcatactgagatgcaatctctcaactcaaaaatgtattaaaaataggatcccatgagaacattatactggaagttacatgtgatacccagctaaagaatacatatcagaatatatccagttgtaaatagccatacccagttgtactacaatgagctttttaaaatcttgaatgaattgagtattctagacagcagcataagaaatatacaaacagtatcctatgaatttagtggttttatgtggatatgccacaaaacacaagtggtatgctttagatctgcacatgtgaatttagcataatcactgggaatttgaaattcttgtcctctgtgataattaggacataacaagattttccatactaaacatcacatgtgtttttcagtatctctgcaatccagtatgcattccaaatgaaatgtgtaacatttaaagtagcatggaacctacgtctttccctactgcttgctggcatatatcagttggtatgaacattgttcttgagctgcctcttaggaaacagaagacagtgttgaagttttccctgcttctggtttgctgaagattttctagaagcactatttacacaaatatgcaaatgtgaaataaccgatctataacgtgaaggaggcagacatgagctgtactactcagtatgcaccacagaataagagtttgccgtgtaaagacaatatccccattcgtcatgctcttattttcccgtgggatatttgcatacaaatgcatgtctgttaccaaaatattgtgtaacacagacagaaaccacctgtttttgtctttccttgtttcccttaatatttcatgaattgtctagcaaaaatggtaggatgcttctgtagttcacaaatgttacatttcagagactttagaggaaaaattattttaaataactgtcaactgtttcattgctttttaaatttttcacgtgcataaccccctttagaagtaaatttttacactattttgttgtttaaaggaggcatttctacttccttgagttttgctgttgccaacctaaaacatttccctttggaacatgagttataagttattacttttcctttacatgtttacacttttataaaaatcagatttttcagtggtctctccagatattaacaagaattgttgtgtaactcaaagatttgcttttatagacttgatttcaaattcttaagttcagcctttccctatcaatcacaaatcatgtattggaaattataaatggcaaccaaaaactggcttttaaaaaatatttttggatatcattgatgtgctgtcacactatatattgagtgactttctgaacaaatttatccagaacatccatagcccaataagcttttgtctaagttgtcatcttacttactcacaaaggaggggaaaacgttattttcatagctgcttttagaaatgtaaattgtaacagcctccttggacaacattgtgagtctgttttaacattaatatactcttacaacctaggaatctcctgggaatctatccctaaggaataaaaagcgccagcacttaagattatatgtttactaatgtatattgtattttttggtaaggaccaaaaaaacaaacaaaaaaaagaccatcagtaagggaatggatgaataaattgtggtaaaaacataccatggctgaatggtatttccttgaaaagaatgtgtgggaacaaactccaaacttctctaggtcaaatgaggaaagcaagaggggagagagagagtgtatgtgtgtgtgtagcagtttttataaaa

SEQ ID NO: 316146 - protein, 132 aa, Artificial Sequence
  derived and/or modified sequence
MLTAAVLSCALLLALPATRGAQMGLAPMEGIRRPDQALLPELPGLGLRAPLKKTTAEQAEEDLLQEAQALAEVLDLQDREPRSSRRCVRLHESCLGQQVPCCDPCATCYCRFFNAFCYCRKLGTAMNPCSRT

SEQ ID NO: 316147 - DNA, 399 bp, Artificial Sequence
  derived and/or modified sequence
atgttgacagccgctgttctgagttgtgctctgctgctggccctcccggctacccgaggagctcagatgggcttggccccaatggaaggtatacgccggcctgaccaggccctgctgcccgaacttcctggcctcggcctgcgggccccactgaaaaaaacgacggctgaacaagcagaggaagatctgttacaggaggctcaggcactcgcagaggtattggatttacaggatcgggaacctagaagctcccgaagatgcgtgagactacatgagagttgcctcggacaacaagtgccctgctgtgacccttgcgccacttgttactgtagattctttaatgccttttgttactgccgcaagctgggcacggcaatgaatccttgttcccggacatag

SEQ ID NO: 316148 - DNA, 399 bp, Artificial Sequence
  derived and/or modified sequence
atgctgacagctgctgtgctgagctgtgccctgctgctggccctgcctgccaccaggggggcccagatgggcctggcccccatggagggcatccggcggccagaccaggccctgctgcctgagctgcccggcctgggcctgcgggcccccctgaagaagaccacagctgagcaggccgaggaggacctgctgcaggaggcccaggccctggccgaggtgctggacctgcaggaccgggagcccaggagcagcagaagatgtgtgcggctgcacgagagctgcctgggccagcaggtgccctgctgtgacccctgtgccacctgctactgccgcttcttcaatgccttctgctactgcaggaagctgggcacagccatgaacccctgcagcaggacatag

SEQ ID NO: 316149 - DNA, 764 bp, Artificial Sequence
  derived and/or modified sequence
agctcctaggtccctgtcctgtggaaatttgtggaccctgggcaccctctcttgctcccaaattttaatcggctcctggaaacctcaccccaaattggagataggcactcctcttgtagaacaaaaggctcaggttcagggagtgagggcctgaactgtgcccccaccctccaggaagggtccttcacggcctggctgcagggatcagtcacgtgtggcccttcattaggccctgccatataagccaagggcacggggtggccgggaactctctaggcaagaatcccggaggcagaggccatgctgaccgcagcggtgctgagctgtgccctgctgctggcactgcctgccacgcgaggagcccagatgggcttggcccccatggagggcatcagaaggcctgaccaggccctgctcccagagctcccaggcctgggcctgcgggccccactgaagaagacaactgcagaacaggcagaagaggatctgttgcaggaggctcaggccttggcagaggtactagacctgcaggaccgcgagccccgctcctcacgtcgctgcgtaaggctgcatgagtcctgcctgggacagcaggtgccttgctgtgacccatgtgccacgtgctactgccgcttcttcaatgccttctgctactgccgcaagctgggtactgccatgaatccctgcagccgcacctagctggccaacgtcagggtcggggctagggtaggggcaaggaaactcgaataaaggatgggaccaac

SEQ ID NO: 316150 - DNA, 399 bp, Artificial Sequence
  derived and/or modified sequence
atgctgaccgccgccgtgctgagctgcgccctgctgctggccctgcccgccactcgaggggcccagatgggactagcccctatggagggaattcggaggcctgatcaggcgctacttcccgaactgccgggtctgggactgagagcgccacttaagaagactacggctgagcaagctgaagaggatctcctgcaggaagcccaggctctcgcagaagttttggatctccaggaccgggaacctcgatctagccgacgctgcgtgcgactgcacgagtcctgcctgggccaacaggtgccttgttgtgacccctgtgcaacatgttactgccgctttttcaatgctttttgctattgtagaaaactgggcaccgcgatgaacccatgtagcaggacctag

SEQ ID NO: 316151 - DNA, 399 bp, Artificial Sequence
  derived and/or modified sequence
atgctgaccgccgctgtactcagttgcgcgttgctgttggccctgcctgccacccgtggcgcacaaatggggctggcccctatggaaggaattagaaggcccgaccaagctctgctgcctgaacttccgggactaggtctgcgggctcctctgaagaagactacagctgagcaggccgaagaggacctgctgcaggaagcccaggccttagcagaggtccttgacctgcaggaccgggagcccaggtcttccagaagatgcgtgcgcctgcatgagagctgcctgggacaacaggtcccctgctgcgatccctgcgcaacctgctattgtagattctttaatgccttctgctattgtcggaaactggggacagctatgaatccctgtagccgaacatag

SEQ ID NO: 316152 - DNA, 399 bp, Artificial Sequence
  derived and/or modified sequence
atgctgaccgccgccgtgctgagctgcgccctgctgctggccctgcccgccaccagaggcgcccagatgggcctggcccccatggagggcatcagaagacccgaccaggccctgctgcccgagctgcccggcctgggcctgagagcccccctgaagaagaccaccgccgagcaggccgaggaggacctgctgcaggaggcccaggccctggccgaggtgctggacctgcaggacagagagcccagaagcagcagaagatgcgtgagactgcacgagagctgcctgggccagcaggtgccctgctgcgacccctgcgccacctgctactgcagattcttcaacgccttctgctactgcagaaagctgggcaccgccatgaacccctgcagcagaacctag

SEQ ID NO: 316153 - protein, 687 aa, Artificial Sequence
  derived and/or modified sequence
MLENYENLASVGHHLFQPSVIYWLEQEEELRAGRRAVLQEWRLKTKGPALRQDRSWFRASNETQTARSHNGGQLCDRTQCGEAFSEHSGLSTHVRTQNTGDSCVSNHYERDFFIPCQKTLFKIGEQFSVLGQCGKAFSSTPNVVSQQACTRDRSLDYSSCGEVFLNQSYLQARAGSHNGEETWKWKPCGKALTHSMGCATPVEMHAVRNPHVCRECGKAFRYTAYLTGRVQVHPGEKPCELEECGKASPVSSSLTQHVRIHAAEKPCECKECGKAFTGLSGLSKHVQTDPGQKPYECKDCGKACGGFYLLNEHGKTHTREKPFACVVCGKYFRNSSCLNNHVRIHTGIKPYTCSYCGKAFTVRCGLTRHVRTHTGEKPYTCKDCGKAFCTSSGLTEHVRTHTGEKPYECKDCGKSFTVSSSLTEHARIHTGEKPYECKQCGKAFTGRSGLTKHMRTHTGEKPYECKDCGKAYNRVYLLNEHVKTHTEEKPFICTVCRKSFRNSSCLNKHIQIHTGIKPYECKDCGKTFTVSSSLTEHIRTHTGEKPYECKVCGKAFTTSSHLIVHIRTHTGEKPYICKECGKAFASSSHLIEHRRTHTGEKPYICNECGKAFRASSHLHKHGRIHTGQKPYKCKECGKAYNRFYLLKEHLKTYTEEQVFVCKDCGKSFKNSSCLNHHTQIHTDEKPF

SEQ ID NO: 316154 - DNA, 2386 bp, Artificial Sequence
  derived and/or modified sequence
tggccttggcttcaggaaaggagcattcagacgcttccgtcagcctcccaggatggcagcccctgacctggcccacggacgcggtgacctttgacgacgtggctgtggacttcacccaggaggaatggactttactggacccatctcagagagacctctacagagatgtgatgctggaaaactacgagaacctggcctcagtaggacatcacctgttccaacccagtgtgatctattggctggagcaggaagaggagttgagggcagggcggagagcagttctccaagaatggcgacttaaaaccaaagggccagcacttcggcaggatagatcttggttcagagcatcaaatgagacacagacggcaagaagccacaatggagggcagctctgtgaccgcacgcagtgtggagaagctttcagtgaacactcaggcctcagcacacacgtgagaactcaaaatacaggagacagttgtgtgtctaatcattatgaaagggacttttttattccatgccagaaaaccttgttcaaaattggagagcagttttccgtgttgggtcagtgtggaaaagccttcagctctactccaaatgttgtttcccagcaagcatgcactcgggacagatctcttgactacagcagctgtggggaagtgttccttaatcagtcataccttcaggcacgtgcgggaagtcacaacggagaagaaacatggaaatggaagccgtgtgggaaagctctaactcactccatgggctgcgccacacctgttgaaatgcatgccgtcaggaatccccacgtatgtagggaatgtgggaaggcctttaggtacactgcctaccttactggtcgcgtgcaagtccaccctggggaaaagccctgtgaattggaagaatgtggaaaagcctcccctgtttcttccagcctaactcaacatgtaagaattcatgctgcagagaaaccctgtgaatgtaaagaatgcggaaaagccttcactggactctcaggtctttctaaacacgtccaaacagaccctggacagaagccctatgaatgtaaggactgtgggaaagcctgcggtgggttttatctactgaatgagcatggaaaaactcacacgagggagaagccctttgcatgtgtggtttgcggaaaatattttagaaattcctcatgccttaataatcatgttcgaattcacactggaataaaaccctatacatgcagctactgtgggaaggccttcactgtgcgctgtggccttactagacacgtacgaacacacacgggcgagaagccatacacgtgtaaggactgcgggaaagccttctgtacatcctcgggccttactgagcatgtaaggactcacactggagagaaaccatatgaatgtaaagattgtgggaaatccttcactgtttcttcaagcctgactgagcacgcgagaatccataccggagagaaaccctacgaatgtaagcagtgtggcaaagccttcacagggcgctcaggcctcactaaacacatgcggacacacaccggggagaagccctatgaatgtaaggactgtgggaaagcctacaatagggtttatctactgaatgagcatgtgaaaactcacacagaggagaagccctttatatgtacggtatgcaggaaatccttcagaaattcctcgtgcctgaataagcacattcagattcacactggaataaaaccttatgaatgtaaggactgtgggaaaacattcactgtttcttcgagcctaaccgagcacatacgaactcacactggagagaaaccttatgaatgtaaagtatgcggaaaggccttcaccacatcctcacaccttatcgtgcacataagaacccacaccggtgagaaaccctacatatgtaaggagtgtgggaaagcctttgcttcctcctcacaccttatcgaacacagaaggactcacacaggagagaaaccttacatatgtaacgagtgtgggaaagccttccgtgcctcctctcacctgcataaacatggaagaattcacactgggcagaaaccctataaatgtaaggaatgtgggaaagcatacaataggttttatctactaaaagaacatttaaaaacttacactgaagagcaggtttttgtatgtaaggactgtggaaaatcttttaagaattcctcatgccttaaccatcacactcaaattcacactgatgagaaacctttctaatgtaaagaatgtggggaagctgtcagctacactcattcacgttgaagacatgaaagacctctcgttctccagatgtccatgacttgaggaatgtggctaggcaatcagcatctcatcacaacccggcaggcaggaactcaccctggagccct

SEQ ID NO: 316155 - protein, 237 aa, Artificial Sequence
  derived and/or modified sequence
MLPHVVLTFRRLGCALASCRLAPARHRGSGLLHTAPVARSDRSAPVFTRALAFGDRIALVDQHGRHTYRELYSRSLRLSQEICRLCGCVGGDLREERVSFLCANDASYVVAQWASWMSGGVAVPLYRKHPAAQLEYVICDSQSSVVLASQEYLELLSPVVRKLGVPLLPLTPAIYTGAVEEPAEVPVPEQGWRNKGAMIIYTSGTTGRPKGVLSTHQNIRAVVTGLVHKWAWTKDDV

SEQ ID NO: 316156 - DNA, 714 bp, Artificial Sequence
  derived and/or modified sequence
atgctccctcatgtggtcctgacttttagacggctcggatgtgccctagctagctgcaggttggccccagcccggcaccgtggaagtggactgttgcacactgctccagtcgccagaagcgaccgcagcgctccagttttcacccgagcattggcttttggagaccgcatcgcccttgtggatcaacacggccgacatacctatcgcgagctctactcccgctcactgagactgtcccaagagatttgccggctctgcggctgcgtcgggggagacctgagagaggaacgagtgtcgtttctttgcgccaatgatgcttcctacgtggttgctcaatgggcaagctggatgtccggaggcgtagccgtgcccctgtaccggaagcatcctgcggcccagctcgagtatgtaatttgcgattctcagtcttctgtggtgttagcgagccaggagtatcttgaattgttgagccccgtagttcggaagttgggagtaccactgctgccccttacccccgcaatctacactggagcagttgaagagcctgctgaggtgccagtgccggaacaaggatggcggaataaaggggccatgatcatctatactagcgggacaacaggccgccctaagggagtcctgtcgactcaccagaatattcgcgcagtggttactggcttggtgcacaagtgggcctggacaaaagatgacgtttag

SEQ ID NO: 316157 - DNA, 714 bp, Artificial Sequence
  derived and/or modified sequence
atgctgccccacgtggtgctgaccttccggcggctgggctgtgccctggccagctgccgcctggccccagcccggcaccggggcagcggcctgctgcacacagcccctgtggcccggagtgacagaagtgcccctgtgttcacccgggccctggcctttggagacagaattgccctggtggaccagcacggccgccacacctaccgggagctgtacagccgcagcctgcggctgagccaggagatctgccgcctgtgtggctgtgtgggcggggacctgcgggaggagcgggtgtccttcctgtgtgccaatgatgccagctatgtggtggcccagtgggcctcctggatgtctgggggcgtggccgtgcccctgtacaggaagcaccctgctgcccagctggagtatgtgatctgtgacagccagagctctgtggtgctggccagccaggagtacctggagctgctgagccctgtggtgaggaagctgggcgtgcccctgctgcccctgaccccagccatctacaccggggctgtggaggagcctgctgaggtgcctgtgcctgagcagggctggagaaataaaggagccatgatcatctacaccagcggcaccaccggccggcccaagggcgtgctgagcacccaccagaacatccgggctgtggtgacaggcctggtgcacaagtgggcctggaccaaggatgatgtgtag

SEQ ID NO: 316158 - DNA, 714 bp, Artificial Sequence
  derived and/or modified sequence
atgctgccccacgtggtgctgaccttccggcggctgggctgcgccctggccagttgtcgtttagctccagccagacacagagggtcgggcttactgcacaccgccccagttgcaagatcagacaggtcagcacctgtgtttacccgggcgttggcctttggtgaccggattgcgctggtagatcagcacggacgacacacttacagagaactgtacagtaggtcactgagactgtctcaagagatctgtagactgtgtggatgtgtggggggtgatctgcgcgaggagagggtttcattcctctgcgccaacgacgcctcatatgtggtggcccagtgggcttcatggatgtctggtggagtggcggtgcccctatatagaaagcacccagccgcacagctcgagtacgttatctgcgatagccagagcagcgtggtcttggcctctcaggagtatttggaactactgagcccagtcgtgcgaaaattgggcgtcccattgctccccctgacccccgctatctacaccggtgccgtagaggagccggccgaagtcccagtaccagaacaggggtggaggaataagggcgccatgattatttacacctcaggcacaactggcagacctaagggagtgctgtcgactcaccaaaacatcagagcagtggtgacagggctcgttcacaagtgggcttggacaaaggacgatgtttag

SEQ ID NO: 316159 - DNA, 714 bp, Artificial Sequence
  derived and/or modified sequence
atgctgccccacgtggtccttacctttcgtcgcctaggctgtgctttggcgtcttgtcgcctggcgcctgcccgacaccgtggcagcggtttgttacacaccgcgcctgtagcgagatctgaccgatccgcacctgtattcacaagagcgctggcctttggcgatcgtatcgcattggtggatcagcacggcaggcacacttatcgcgaactctatagccggtccctccgactgagccaggagatatgcaggctctgtggctgcgtagggggtgacctgagagaggaacgcgtgtcctttctctgcgcaaatgatgcgtcctatgtagtggcccagtgggcctcgtggatgtcaggaggagtcgctgtcccactgtaccggaagcatccagcggcacagctggagtacgttatttgtgattctcagtcatcagtcgtccttgcaagtcaggaatatttggagctgctttcccctgtcgtgcggaagctgggagtgccccttctgcctctgaccccagccatctacaccggtgccgtcgaggagcctgccgaagtgcctgtccccgagcaaggctggcgcaataagggtgccatgattatatatacatccggcacaacaggacgacccaaaggcgtactcagtacccatcagaacattagagccgtggtcactgggcttgtgcacaagtgggcttggacaaaggacgacgtgtag

SEQ ID NO: 316160 - DNA, 714 bp, Artificial Sequence
  derived and/or modified sequence
atgctgccccacgtggtgctgaccttcagaagactgggctgcgccctggccagctgcagactggcccccgccagacacagaggcagcggcctgctgcacaccgcccccgtggccagaagcgacagaagcgcccccgtgttcaccagagccctggccttcggcgacagaatcgccctggtggaccagcacggcagacacacctacagagagctgtacagcagaagcctgagactgagccaggagatctgcagactgtgcggctgcgtgggcggcgacctgagagaggagagagtgagcttcctgtgcgccaacgacgccagctacgtggtggcccagtgggccagctggatgagcggcggcgtggccgtgcccctgtacagaaagcaccccgccgcccagctggagtacgtgatctgcgacagccagagcagcgtggtgctggccagccaggagtacctggagctgctgagccccgtggtgagaaagctgggcgtgcccctgctgcccctgacccccgccatctacaccggcgccgtggaggagcccgccgaggtgcccgtgcccgagcagggctggagaaacaagggcgccatgatcatctacaccagcggcaccaccggcagacccaagggcgtgctgagcacccaccagaacatcagagccgtggtgaccggcctggtgcacaagtgggcctggaccaaggacgacgtgtag

SEQ ID NO: 316161 - DNA, 869 bp, Artificial Sequence
  derived and/or modified sequence
gggcgccggaactggtccggcccgactcacgaccccgcgggacccggccggaacccggcccgaccccggcgcgcgcgcggcggaggacgaggaagagttgtggcgaggcagatcctgccccgtggccgcggccgtctcctcggccgcctgtcagtgcaatgctgccccatgtggtgctcaccttccggcgcctgggctgcgccttggcgtcctgccggctggcgcctgcgagacacagaggaagtggtcttctgcacacagccccagtggcccgctcggacaggagcgccccggtgttcacccgtgccctggcctttggggacagaatcgccctggttgaccagcacggccgccacacgtacagggagctttattcccgcagccttcgcctgtcccaggagatctgcaggctctgcgggtgtgtcggcggggacctccgggaggagagggtctccttcctatgcgctaacgatgcctcctacgtcgtggcccagtgggcgtcatggatgagtggcggtgtggcagtccccctctacaggaagcatcccgcggcccagctggagtatgtcatctgcgactcccagagctctgtggtccttgccagccaggagtacctggagctcctgagcccggtggtcaggaagctgggggtcccgctgctgccgctcacaccagccatctacactggagcagtagaggaaccggcagaggtcccggtcccagagcagggatggaggaacaagggcgccatgatcatctacaccagtgggaccacggggaggcccaagggcgtgctgagcacgcaccaaaacatcagggctgtggtgaccgggctggtccacaagtgggcatggaccaaagacgacgtg

SEQ ID NO: 316162 - DNA, 1430 bp, Artificial Sequence
  derived and/or modified sequence
tcagaggcccgacagcctctttctgaggaggacgtagccagcctttcctggagacccttgcaccttccttctgcagactggcagagagctgccctctctctctggacacacagaaccttccgagaggtgttgaaagaggaagatgttcacttaacttaccaagactggttacacctggagctggaaattcaacctgaagctgatgctctttcagatactgaacgctcaaggagttatgaccactcagaaaattctgatttggtctttggtggccgcacaggaaatgaggatattatttccagattgcaggagatggtagctgacctggagctgcagcaagacctcatagtgcctctcggccacaccccttcccaggagcacttcctctttgagattttccgcagacggctccaggctctgacaagcgggtggagcgtggctgccagccttcagagacagagggagctgctaatgtacaaacggatcctcctccgcctgccttcgtctgtcctctgcggcagcagcttccaggcagaacagcccatcactgccagatgcgagcagttcttccacttggtcaactctgagatgagaaacttctgctcccacggaggtgccctgacacaggacatcactgcccacttcttcaggggcctcctgaacgcctgtctgcggagcagagacccctccctgatggtcgacttcatactggccaagtgccagacgaaatgccccttaattttgacctctgctctggtgtggtggccgagcctggagcctgtgctgctctgccggtggaggagacactgccagagcccgctgccccgggaactgcagaagctacaagaaggccggcagtttgccagcgatttcctctcccctgaggctgcctccccagcacccaacccggactggctctcagctgctgcactgcactttgcgattcaacaagtcagggaagaaaacatcaggaagcagctaaagaagctggactgcgagagagaggagctattggttttccttttcttcttctccttgatgggcctgctgtcgtcacatctgacctcaaatagcaccacagacctgccaaaggctttccacgtttgtgcagcaatcctcgagtgtttagagaagaggaagatatcctggctggcactctttcagttgacagagagtggtaagaaacacgctgctgaggcacaaatgcggagggccgctcttttcagaggcatcttgcaaatggttaagaacgagccctccttgaggttccttgctaagtaagtttataagctccattttagttgggacagattaagcacaaacttgtttaaagcaataagataatttactggctcactggtcaaccccaggaccaatgggcctatcatggggactgcctctctctgcaccacacccaccctcctgcaaga

SEQ ID NO: 316163 - DNA, 969 bp, Artificial Sequence
  derived and/or modified sequence
atggtggccgacctggagctgcagcaggacctgatcgtgcccctgggccacacccccagccaggagcacttcctgttcgagatcttcagaagaagactgcaggccctgaccagcggctggagcgtggccgccagcctgcagagacagagagagctgctgatgtacaagagaatcctgctgagactgcccagcagcgtgctgtgcggcagcagcttccaggccgagcagcccatcaccgccagatgcgagcagttcttccacctggtgaacagcgagatgagaaacttctgcagccacggcggcgccctgacccaggacatcaccgcccacttcttcagaggcctgctgaacgcctgcctgagaagcagagaccccagcctgatggtggacttcatcctggccaagtgccagaccaagtgccccctgatcctgaccagcgccctggtgtggtggcccagcctggagcccgtgctgctgtgcagatggagaagacactgccagagccccctgcccagagagctgcagaagctgcaggagggcagacagttcgccagcgacttcctgagccccgaggccgccagccccgcccccaaccccgactggctgagcgccgccgccctgcacttcgccatccagcaggtgagagaggagaacatcagaaagcagctgaagaagctggactgcgagagagaggagctgctggtgttcctgttcttcttcagcctgatgggcctgctgagcagccacctgaccagcaacagcaccaccgacctgcccaaggccttccacgtgtgcgccgccatcctggagtgcctggagaagagaaagatcagctggctggccctgttccagctgaccgagagcggcaagaagcacgccgccgaggcccagatgagaagagccgccctgttcagaggcatcctgcagatggtgaagaacgagcccagcctgagattcctggccaagtag

SEQ ID NO: 316164 - DNA, 969 bp, Artificial Sequence
  derived and/or modified sequence
atggtagcagatctcgaactgcaacaggatctcatagtgcctttggggcatactcccagccaggagcactttctgttcgagattttcagaaggagactgcaggcgctgacgtccggctggtctgtggctgcaagtttgcagagacaaagggagttactgatgtataaacgaatccttctcagactgccctccagcgttctctgcggcagttcttttcaggctgaacagcccatcacggcacgctgtgaacagtttttccaccttgtgaattctgagatgcggaatttttgtagccacggaggcgctctgacgcaggatattaccgcgcacttctttcgtggtctcctgaacgcgtgcctgcggtcacgagatccttctctgatggtggacttcatacttgcgaagtgtcagaccaaatgtcctttaatcctcacttcggcacttgtttggtggccatctttggagccagtgctcttatgccgctggaggcgccactgccagagcccactgccacgggaattacaaaagctgcaggaaggaagacagtttgcatccgacttcctcagtcctgaagccgccagtcctgcccccaaccctgactggctctccgctgctgctctgcattttgccattcagcaagttagagaagagaacattaggaaacagctgaaaaagttagactgcgagagagaggaactccttgtgtttctgtttttctttagcctcatgggactcttatcctcccacttgacctccaactccaccaccgacctgcctaaagccttccacgtgtgcgccgcaatactggaatgtctggagaaaaggaagataagttggctcgccctcttccagctcacagagtccggaaagaaacacgcagccgaagcacagatgagacgggccgcattgtttaggggcattctgcagatggtcaagaacgaaccttcccttcgcttcctcgcaaaatag

SEQ ID NO: 316165 - DNA, 969 bp, Artificial Sequence
  derived and/or modified sequence
atggtggccgacctggagctgcagcaggacctgattgtgcccctgggccacacccccagccaggagcacttcctgtttgagatcttcagaagaaggctgcaggccctgaccagcggctggagcgtggccgccagcctgcagaggcagcgggagctgctgatgtacaagaggatcctgctgcggctgcccagctctgtgctgtgtggcagcagcttccaggccgagcagcccatcacagcccgctgtgagcagttcttccacctggtgaacagcgagatgaggaacttctgcagccatggaggagccctgacccaggacatcacagcccacttcttccggggcctgctgaatgcctgcctgcggagccgggaccccagcctgatggtggacttcatcctggccaagtgccagaccaagtgccccctcatcctgaccagcgccctggtgtggtggcccagcctggagcctgtgctgctgtgccgctggaggaggcactgccagagccccctgccccgggagctgcagaagctgcaggagggccggcagtttgccagtgacttcctgagccctgaggccgccagccctgcccccaacccagactggctgtctgctgctgccctgcactttgccatccagcaggtgcgggaggagaacatcaggaagcagctgaagaagctggactgtgagcgggaggagctgctggtgttcctgttcttcttcagcctgatgggcctgctgagcagccacctgaccagcaacagcaccacagacctgcccaaggccttccacgtgtgtgccgccatcctggagtgcctggagaagaggaagatctcctggctggccctcttccagctgacagagagcggcaagaagcatgctgctgaggcccagatgagaagagctgccctcttccggggcatcctgcagatggtgaagaatgagcccagcctgcgcttcctggccaagtag

SEQ ID NO: 316166 - DNA, 969 bp, Artificial Sequence
  derived and/or modified sequence
atggtggccgacctggagctgcagcaggacctgatcgtgcccctgggtcacacacccagccaagaacacttcctcttcgagatttttcgccgaaggttgcaagctctcacaagtggctggtcagtcgccgcttctctgcagcgccagcgcgagttactcatgtataagagaattttgttgcgactgcccagcagcgtcctctgtggctcatcatttcaggccgagcagccaattaccgcccgatgtgagcagtttttccacctggtcaactctgaaatgcggaatttctgcagccacggcggagcactgacacaggatatcacagctcactttttcagaggcctgctgaatgcctgcttacggtcacgtgacccatctctcatggtcgactttattctggctaagtgtcagacgaagtgccctctgatcctcacctccgctcttgtgtggtggccatctcttgagcccgtgttgctgtgtaggtggcggcgacactgtcagagccccttaccaagggaattgcagaagctacaggaaggcaggcagtttgcctccgatttcttatcccccgaggctgctagtccagcccccaatcccgattggctttcggctgctgccctgcattttgcaattcagcaggtaagagaagagaatatacggaagcagcttaaaaagttggattgtgagcgcgaggagcttctggtgttcctcttcttcttctcccttatgggattgctgtcttcccacttgacctcgaattccaccacagatctgccgaaggcgttccacgtgtgcgctgccatcttggagtgtttggagaaacggaagatcagctggctggctctattccaacttactgagtctgggaaaaaacacgccgcagaggcccagatgaggcgagctgccctgttcaggggtatcctgcagatggtgaagaacgagccctccctgcgattcctggcaaaatag

SEQ ID NO: 316167 - DNA, 969 bp, Artificial Sequence
  derived and/or modified sequence
atggtggccgacttggagctgcagcaggacctgatcgttcccctgggccatactcccagtcaggagcattttcttttcgagatctttagacggaggctacaagccctgacatccggctggtcagtagcggcttccctccagcgacagagggaactcctgatgtataagcgaattctgctgaggctgccttcaagcgtcctgtgtggaagcagttttcaggcggagcagcccattacggcacgatgtgagcagttttttcatctcgtgaattctgaaatgcgcaatttctgcagtcatggaggggcacttacccaagatattacagcgcactttttccggggtttgttaaatgcctgtctccgcagcagagacccaagcctgatggttgacttcatcttggccaaatgtcaaaccaagtgccctctgatcttgacatccgcactggtgtggtggccttctctggaacccgtgctgctatgcaggtggcgccgtcactgccaatctcccctgcctcgtgagctccagaaactacaagaggggcgtcagtttgcatcagattttctctcccccgaggccgctagtccagcccctaaccccgactggttgtctgcagcagccctccatttcgcaatacagcaggttagggaggaaaatatccgcaagcagttgaagaaattggactgtgaaagagaggagctgctcgtcttcctctttttttttagccttatgggactacttagcagccacctgacgtccaatagtaccaccgacttaccaaaggcatttcacgtttgcgcggctatcttggagtgcctggaaaagcggaagatatcatggctcgccctgttccagttaaccgagagcggcaagaagcacgccgctgaggcccagatgcgacgcgcagctctattcaggggtatcctgcagatggtgaagaacgagccatccctgcgcttcctggcaaagtag

SEQ ID NO: 316168 - protein, 297 aa, Artificial Sequence
  derived and/or modified sequence
MSDSWVPNSASGQDPGGRRRAWAELLAGRVKREKYNPERAQKLKESAVRLLRSHQDLNALLLEVEGPLCKKLSLSKVIDCDSSEAYANHSSSFIGSALQDQASRLGVPVGILSAGMVASSVGQICTAPAETSHPVLLTVEQRKKLSSLLEFAQYLLAHSMFSRLSFCQELWKIQSSLLLEAVWHLHVQGIVSLQELLESHPDMHAVGSWLFRNLCCLCEQMEASCQHADVARAMLSDFVQMFVLRGFQKNSDLRRTVEPEKMPQVTVDVLQRMLIFALDALAAGVQEESSTHKIVRC

SEQ ID NO: 316169 - protein, 302 aa, Artificial Sequence
  derived and/or modified sequence
MSDSWVPNSASGQDPGGRRRAWAELLAGRVKREKYNPERAQKLKESAVRLLRSHQDLNALLLEVEGPLCKKLSLSKVIDCDSSEAYANHSSSFIGSALQDQASRLGVPVGILSAGMVASSVGQICTAPAETSHPVLLTVEQRKKLSSLLEFAQYLLAHSMFSRLSFCQELWKIQSSLLLEAVWHLHVQGIVSLQELLESHPDMHAVGSWLFRNLCCLCEQMEASCQHADVARAMLSDFVQMFVLRGFQKNSDLRRTVEPEKMPQVTVDVLQRMLIFALDALAAGVQEESSTHKIVRASAARS

SEQ ID NO: 316170 - protein, 265 aa, Artificial Sequence
  derived and/or modified sequence
MSDSWVPNSASGQDPGGRRRAWAELLAGRVKREKYNPERAQKLKESAVRLLRSHQDLNALLLEVEGPLCKKLSLSKVIDCDSSEAYANHSSSFIGSALQDQASRLGVPVGILSAGMVASSVGQICTAPAETSHPVLLTVEQRSSLLLEAVWHLHVQGIVSLQELLESHPDMHAVGSWLFRNLCCLCEQMEASCQHADVARAMLSDFVQMFVLRGFQKNSDLRRTVEPEKMPQVTVDVLQRMLIFALDALAAGVQEESSTHKIVRC

SEQ ID NO: 316171 - protein, 216 aa, Artificial Sequence
  derived and/or modified sequence
MSRRALRRLRGEQRGQEPLGPGALHFDLRDDDDAEEEGPKRELGVRRPGGAGKEGVRVNNRFELINIDDLEDDPVVNGERSGCALTDAVAPGNKGRGQRGNTESKTDGDDTETVPSEQSHASGKLRKKKKKQKNKKSSTGEASENGLEDIDRILERIEDSTGLNRPGPAPLSSRKHVLYVEHRHLNPDTELKRYFGARAILGEQRDRVLLGCPVWF

SEQ ID NO: 316172 - DNA, 4817 bp, Artificial Sequence
  derived and/or modified sequence
gaaaatcaaaccctccggaatgtccccctgaagaggaccactgttgcagcggggaccctcctttcaggcatcctcattttatcatgtccctttgctttcttccccagtggccttttcaaaggtcagagagaaatgcttagtcaaacccctacttgagtatcacaggtgactaattttgggatcgaagattaaggaggttttgttgcgtccttaaagaacttggaattggagtccaggtagttttggaaaacttcctggagaaggatggattttaccctgtaaaagaagaaagacatggatgcataagaagagggttgaagagggggaggcctcagacttctcgctggcctgggattcctccgtgacagcagcaggaggcctagaaggagagccagagtgcgatcagaaaaccagccgtgcgctggaagacaggaacagcgtgacaagtcaagaggagagaaatgaggatgatgaagacatggaggatgaatcaatttacacctgcgatcactgtcagcaggacttcgagtctctggcagacctgacggaccaccgggcccaccgctgtcctggagatggtgatgacgacccacaactctcctgggtggcctcgtctccctccagcaaggatgttgcgtcacccacgcagatgatcggagatggttgtgacctcggcctcggcgaggaggaagggggcacgggcctgccatacccttgccagttctgcgacaagtccttcatccgcttgagctacttgaagaggcacgagcagatccacagcgacaagctgccgttcaagtgcacctactgcagccgcctcttcaagcacaagaggagccgtgaccggcacatcaagctgcatacgggcgacaagaagtatcactgccacgagtgcgaggcagccttctcccgcagcgaccacctcaagatccacctgaagacccacagctccagcaagcccttcaagtgcactgtgtgcaagcgcggcttctcctccaccagctcgctgcagagccacatgcaggcccacaaaaagaacaaggagcatctggccaagtcggagaaggaagccaagaaggacgacttcatgtgcgactactgcgaggacaccttcagccagacggaggagctggagaagcacgtgctcacccgccacccgcagctgtccgagaaggcggacctgcagtgcattcactgccctgaggtcttcgtcgacgagaacacactgctcgcccatatccaccaagcccacgccaaccagaaacacaagtgccccatgtgccctgagcagttctcctcagtggaaggtgtctactgccacctggacagccaccggcagcccgactccagcaaccacagtgtcagtcccgaccctgtactgggcagcgtggcctccatgagcagcgccacacccgactccagcgcctctgtggagcgtggctccaccccggactccaccttgaagccgctgcgggggcagaagaagatgcgggatgacgggcagggctggaccaaggtggtctatagctgcccctattgttccaagcgggactttaacagcctggccgtgctggagatccacctgaagaccatccacgcggacaagccccagcagagccacacatgtcagatctgcctggactccatgcccaccctctacaacctcaacgagcacgttcgcaagctgcacaagaaccatgcctaccctgtgatgcagtttggcaacatctctgccttccactgcaactactgccccgagatgttcgccgacatcaatagcctgcaggagcacatccgcgtctcccactgcggccccaacgccaacccctctgacggtaataatgctttcttctgcaaccagtgctccatgggtttccttactgagtcctccctcaccgagcacatccagcaggcccactgcagtgtgggcagtgccaaactagagtctccggtggtgcagcccacgcagtccttcatggaggtctattcctgcccctactgcaccaactcccccatctttggctccatcctgaaactcaccaagcacatcaaggagaaccacaagaacattccactggcccacagcaagaagtccaaggccgagcagagcccagtctcgtccgatgtggaggtgtcttccccgaagcggcagcggctctcagcaagcgccaactccatctccaatggggagtatccttgcaatcaatgcgacctcaagttctccaactttgagagcttccagacccacctgaagctgcacctggagctgctgctgcggaagcaagcgtgcccccagtgcaaagaggactttgactcccaggagtccctcctgcagcacctgacagtgcattacatgaccacgtcgacccactatgtgtgcgagagctgcgacaagcaattttcctcggtggatgacctgcagaagcacctgctggacatgcacacctttgtgttgtaccactgcaccctgtgtcaggaggtcttcgactccaaggtgtccatccaggtgcacctggcggtgaagcacagcaatgagaagaagatgtaccgctgcacggcctgcaactgggacttccgcaaggaggctgacctgcaggtgcacgtcaaacacagccacctgggcaacccggccaaggctcacaagtgcatcttctgtggggagaccttcagcaccgaggtggagctgcagtgccacatcaccacacacagcaagaagtataactgtaagttctgcagcaaggccttccacgccatcatcctgctggagaagcacctgcgggagaagcactgtgtgtttgatgctgcgaccgagaacggcacggccaatggggtacccccaatggccaccaagaaagctgagcctgctgacctgcagggcatgctgcttaagaaccctgaggcacctaacagccatgaggccagcgaggatgacgtggacgcgtcggagcccatgtacggctgtgacatctgtggggcggcctacaccatggaggtgctgctgcagaatcaccggctgcgggaccacaatatccggccgggcgaggatgatggctcacgcaagaaggctgagtttatcaagggcagtcacaagtgcaacgtttgttcacggactttcttctcggagaacgggctacgggagcacctgcagacgcaccggggccctgccaagcactacatgtgtcccatctgtggtgagcgcttcccttcgctgctgacgctcaccgaacacaaggtgacccacagcaagagcctggacacgggcacctgtcgcatctgcaagatgcccctgcagagcgaggaggagtttattgagcactgccagatgcaccctgacctgcgcaactcactcacgggcttccgctgtgtggtctgcatgcagacagtcacttccacgcttgagctcaagatccatggcaccttccacatgcagaagctggcgggcagctcagcggcgtcctcccccaatggccaggggctgcagaagctctacaagtgcgccctgtgcctcaaggagttccgcagcaagcaggacctggtgaagcttgacgtcaatgggctgccctacggcctctgcgccggctgcatggcccgcagcgccaacggacaggtgggtggcctggccccgcccgagcccgccgaccggccctgtgccggcctccgttgccccgagtgcagtgtcaagtttgagagtgccgaagacctggagagccacatgcaggtggaccaccgtgacctcacgccggagaccagtgggccccggaaaggcacccagacatcgccagtgccccggaaaaagacataccagtgcatcaagtgccagatgaccttcgagaacgagagagagatccaaatccacgttgccaaccacatgattgaggaaggcatcaaccacgagtgtaagctgtgcaaccagatgttcgactccccggccaagctcctctgtcacctcattgagcacagcttcgagggcatgggcggcaccttcaaatgccccgtgtgtttcacagtcttcgtccaggccaacaagttgcagcagcacatctttgccgtgcacgggcaggaggacaagatctacgactgctcacagtgccctcagaagttcttcttccagaccgagctgcagaaccacacgatgagccagcacgcacagtgagggatcgctcaacaggacacctctccgcagaaggcttgccggagacgccgtggggagggccatttgaacattacatccaatcaaagtgtcatttgcaacccagatgtaaaactctaatgatttggccatgaggcgctgctattataagcagctggaaatgaatattaatggcagagattaaaagtattccatgctcagtattttttattgtcctgctacagctagtgtgcttttagactttccgccgcagactacatttctagagttagagaaacctgctttttaaggctattgtcctttgttccttcatgtattatattgatagtttttaaaaaagaattagtgtgattttttttctttgcttcttttttttctttcttgtttttcttcccccccaccccccacccccttcggttaactactttttaattgcaattctaggtaattgtgcatcgtgatgtgattgcttggctattgtctgaatatttccttttaattttttaattaaagactaatgctttgattggatttgccagttcaccggacagtgattaaaactatgtaatgaatataatcggtttcagtgcaactggatggtctgcttttaaatgtgacttaatctgactgcagtaactagtacagttcaataaagggaatccatgcg

SEQ ID NO: 316173 - DNA, 7660 bp, Artificial Sequence
  derived and/or modified sequence
ggaaaacttcctggagaaggatggattttaccctgtaaaagaagaaagacatggatgcataagaagagggttgaagagggggaggcctcagacttctcgctggcctgggattcctccgtgacagcagcaggaggcctagaaggagagccagagtgcgatcagaaaaccagccgtgcgctggaagacaggaacagcgtgacaagtcaagaggagagaaatgaggatgatgaagacatggaggatgaatcaatttacacctgcgatcactgtcagcaggacttcgagtctctggcagacctgacggaccaccgggcccaccgctgtcctggagatggtgatgacgacccacaactctcctgggtggcctcgtctccctccagcaaggatgttgcgtcacccacgcagatgatcggagatggttgtgacctcggcctcggcgaggaggaagggggcacgggcctgccatacccttgccagttctgcgacaagtccttcatccgcttgagctacttgaagaggcacgagcagatccacagcgacaagctgccgttcaagtgcacctactgcagccgcctcttcaagcacaagaggagccgtgaccggcacatcaagctgcatacgggcgacaagaagtatcactgccacgagtgcgaggcagccttctcccgcagcgaccacctcaagatccacctgaagacccacagctccagcaagcccttcaagtgcactgtgtgcaagcgcggcttctcctccaccagctcgctgcagagccacatgcaggcccacaaaaagaacaaggagcatctggccaagtcggagaaggaagccaagaaggacgacttcatgtgcgactactgcgaggacaccttcagccagacggaggagctggagaagcacgtgctcacccgccacccgcagctgtccgagaaggcggacctgcagtgcattcactgccctgaggtcttcgtcgacgagaacacactgctcgcccatatccaccaagcccacgccaaccagaaacacaagtgccccatgtgccctgagcagttctcctcagtggaaggtgtctactgccacctggacagccaccggcagcccgactccagcaaccacagtgtcagtcccgaccctgtactgggcagcgtggcctccatgagcagcgccacacccgactccagcgcctctgtggagcgtggctccaccccggactccaccttgaagccgctgcgggggcagaagaagatgcgggatgacgggcagggctggaccaaggtggtctatagctgcccctattgttccaagcgggactttaacagcctggccgtgctggagatccacctgaagaccatccacgcggacaagccccagcagagccacacatgtcagatctgcctggactccatgcccaccctctacaacctcaacgagcacgttcgcaagctgcacaagaaccatgcctaccctgtgatgcagtttggcaacatctctgccttccactgcaactactgccccgagatgttcgccgacatcaatagcctgcaggagcacatccgcgtctcccactgcggccccaacgccaacccctctgacggtaataatgctttcttctgcaaccagtgctccatgggtttccttactgagtcctccctcaccgagcacatccagcaggcccactgcagtgtgggcagtgccaaactagagtctccggtggtgcagcccacgcagtccttcatggaggtctattcctgcccctactgcaccaactcccccatctttggctccatcctgaaactcaccaagcacatcaaggagaaccacaagaacattccactggcccacagcaagaagtccaaggccgagcagagcccagtctcgtccgatgtggaggtgtcttccccgaagcggcagcggctctcagcaagcgccaactccatctccaatggggagtatccttgcaatcaatgcgacctcaagttctccaactttgagagcttccagacccacctgaagctgcacctggagctgctgctgcggaagcaagcgtgcccccagtgcaaagaggactttgactcccaggagtccctcctgcagcacctgacagtgcattacatgaccacgtcgacccactatgtgtgcgagagctgcgacaagcaattttcctcggtggatgacctgcagaagcacctgctggacatgcacacctttgtgttgtaccactgcaccctgtgtcaggaggtcttcgactccaaggtgtccatccaggtgcacctggcggtgaagcacagcaatgagaagaagatgtaccgctgcacggcctgcaactgggacttccgcaaggaggctgacctgcaggtgcacgtcaaacacagccacctgggcaacccggccaaggctcacaagtgcatcttctgtggggagaccttcagcaccgaggtggagctgcagtgccacatcaccacacacagcaagaagtataactgtaagttctgcagcaaggccttccacgccatcatcctgctggagaagcacctgcgggagaagcactgtgtgtttgatgctgcgaccgagaacggcacggccaatggggtacccccaatggccaccaagaaagctgagcctgctgacctgcagggcatgctgcttaagaaccctgaggcacctaacagccatgaggccagcgaggatgacgtggacgcgtcggagcccatgtacggctgtgacatctgtggggcggcctacaccatggaggtgctgctgcagaatcaccggctgcgggaccacaatatccggccgggcgaggatgatggctcacgcaagaaggctgagtttatcaagggcagtcacaagtgcaacgtttgttcacggactttcttctcggagaacgggctacgggagcacctgcagacgcaccggggccctgccaagcactacatgtgtcccatctgtggtgagcgcttcccttcgctgctgacgctcaccgaacacaaggtgacccacagcaagagcctggacacgggcacctgtcgcatctgcaagatgcccctgcagagcgaggaggagtttattgagcactgccagatgcaccctgacctgcgcaactcactcacgggcttccgctgtgtggtctgcatgcagacagtcacttccacgcttgagctcaagatccatggcaccttccacatgcagaagctggcgggcagctcagcggcgtcctcccccaatggccaggggctgcagaagctctacaagtgcgccctgtgcctcaaggagttccgcagcaagcaggacctggtgaagcttgacgtcaatgggctgccctacggcctctgcgccggctgcatggcccgcagcgccaacggacaggtgggtggcctggccccgcccgagcccgccgaccggccctgtgccggcctccgttgccccgagtgcagtgtcaagtttgagagtgccgaagacctggagagccacatgcaggtggaccaccgtgacctcacgccggagaccagtgggccccggaaaggcacccagacatcgccagtgccccggaaaaagacataccagtgcatcaagtgccagatgaccttcgagaacgagagagagatccaaatccacgttgccaaccacatgattgaggaaggcatcaaccacgagtgtaagctgtgcaaccagatgttcgactccccggccaagctcctctgtcacctcattgagcacagcttcgagggcatgggcggcaccttcaaatgccccgtgtgtttcacagtcttcgtccaggccaacaagttgcagcagcacatctttgccgtgcacgggcaggaggacaagatctacgactgctcacagtgccctcagaagttcttcttccagaccgagctgcagaaccacacgatgagccagcacgcacagtgagggatcgctcaacaggacacctctccgcagaaggcttgccggagacgccgtggggagggccatttgaacattacatccaatcaaagtgtcatttgcaacccagatgtaaaactctaatgatttggccatgaggcgctgctattataagcagctggaaatgaatattaatggcagagattaaaagtattccatgctcagtattttttattgtcctgctacagctagtgtgcttttagactttccgccgcagactacatttctagagttagagaaacctgctttttaaggctattgtcctttgttccttcatgtattatattgatagtttttaaaaaagaattagtgtgattttttttctttgcttcttttttttctttcttgtttttcttcccccccaccccccacccccttcggttaactactttttaattgcaattctaggtaattgtgcatcgtgatgtgattgcttggctattgtctgaatatttccttttaattttttaattaaagactaatgctttgattggatttgccagttcaccggacagtgattaaaactatgtaatgaatataatcggtttcagtgcaactggatggtctgcttttaaatgtgacttaatctgactgcagtaactagtacagttcaataaagggaatccatgcgattagcatccggctgcctggttctctcctccccagcctagggccgcgtggggggctgtcagctcctgtaaggtgtgttcccctacaagttcctgtgggcttgcacacgcccttggggacctgcacacaatagaccctgctccccttggaaaagaatcgtagtaacctaatgcatgcagactggacaggctggcagtggccacaggagtcaaagcagaagaccccttaatgatggaataccctgatcttcccactcttggatggggaaacagaggcccaagggtaacgtgcagctttcccaaggccacgcagcaggttggtcaccatgctgattgtgaagtcttcttggctttcccttcagggttggctttcccctttgttggatacaggcaggcaagtgggtagcccttcccttgccaggactccaggtggcacttgggttctgaggcacggagatgtgtgactggggactgcagagcagagccaggtaggagccgcaggttcccagtcatagagatcagtaggatgtgagagcattgagactggtggcgggggccaggtctggagtgaggcaggcaggggcctggggtacattatttcagggggcactcgctctcagggcccccctacacctgcaagtgctgggaatgggtgtcctcttgcattttacactctaggcaccttgcttatttcacctactcctggccctgctggcctcccagggcccacccagcagccttggtctccaggcctcctccatgttacctcccacacctccatcatgctggtgctcagctgacttgccaatcagaggccagaacttgcacggggaaacccttccttgctaacttttcacaaggggcaaggaaattggttattaccctctgcagagcggaaatgaaacaggcagacagattgcacctaattataatgtaatactaagtcacgggtgtggaatttggagcaattatacccatcatcttctagaagactcccatatcaaggggcttctggtgacctataagagttcccctttctttctgtcacctcatgtaatgttctcacgcgggtggggctttcagtttttcaaaaggcatcttacatatgtgaatcatagagcagaccctgccagtagtgggctgttgcctcctggaaactgaaggctgtgaatgccaattttcagcctcctggagacctggcagttttgggggaagaccccagggtagacaccagtgttcctctaagtgtgcccacccgtggactggggcttggggcctggggctggggctatgtctgagtgaggctgccacacatccacagccaggcctaccttttgggcagtgctgggactgtcgatgggaccagtatgtcccggggcctgccacatctccgtctcagggccctctccagctctggatttatcccaaaccccatggagcccaggtgagccctcagtaactaccaatagaagattcgatttgacggttggtggcgtagggctaaattagtcactgcccccattaaaaatacagcggggggtttaagagcttttcacgccatgtgggaatcagcagcgaagccggctgatgccttgggtaaggagagaggcggcctaggggaccgtgaggtaatgaggtttatggcggtgacaaggcagccagggaaccccaccgactcccccctcaccccggccgcattgttctccggctggctctgtccctgctgctacggctgagagcccctcgtgactttgtgtggggagggggctggcagtggggaccctgaggcccttcctgggactggcattctttaccatcaggtggtattagggttggggagcagtgtagggttataaacctgtgcctcggagaactcactaaccccttccagaggaaaggtctggagctgggatgagacacttgcctttcaactgtgaggggccttagagggtctctgggaggcttgtatgaagtgatgcctgacaaagggctgcacacagagacctgtaagcagcatggtcatcaatgatggtgccaggcatcctgcaggagggcaccttttcagccaggagggcgcgatggaatcagcctctcatttggatttggctttggggagtgggcgaggtgactgaaagcctaaggttcattgctgctgtatttagatgtacaaattgtcagtttctagcggctctctgggcagaggaattttgcccaggctgggaaatggaccaggacccttgggccacaggcccctgtcatggaacacctgcccagagtgcccagaagcaggcaggtaagggtttcagtctcagtggagaaactgtcatgggagaaatcttctcgagttccccagccttaaagaacgctccttttaaattcacagttgtgtaatattgaacttttcacctgtttttcttccctcctaaggtgtgtgttcctagggatggaacctgtacctataaatattcagtaaataggaccaaaactcaaatccatcccttcctctactcatccattcagcaagtatttactgagctgcccccaggtgccaggcactgcacagggcactggggataaggagatgaccagcagatgtggtccctggcctcatggaggccacagtggcacaggcaagcatgccagtaaatgcatagccacacctggtcatgagtgccgtgatggcaaagccagaagctgccagggattaatggagggacccgtgtatgagacacaggggtgcattaaggaaggccttgctgaggcaggggcttgagacctgaagaaataagggaggtgggcagtccaagagcagtgggaagagaacactgcaaatgcagaagccgtgagctggaaacgagccagaagtacccttagagagctgtattcctatggagtttcaattctaggtggcttaaaacaatcccagagaagttcagaatcttgtccaagatcataccattcaggatagacttgcgactataacttgggtgcctcaccttccagcctggggtgtctgactccattgttaattttattataacaatcatgatgacaacgatgaataaagtgaaattgtactgtacaggaaa

SEQ ID NO: 316174 - DNA, 3178 bp, Artificial Sequence
  derived and/or modified sequence
gtgtgactctgtgccagagcaattgactaaaactctcaggttttagatatcaagccaccggggacttcatgagccaagtcccttccattcctttccaggtgcatagaacttcccacaagagtgtcagcactgtgctttcatcccgagcatcttgtttctgtcattcttattcttctacccatcttcacagcaatcattttcttcacttttctttttttttttttttcgtcttggcccattgcacaccctaagacaaagcaatccatttttgttgttgttgttgtttgtgtgtttgtttgttttttgagacagagcctcgatccatcatccaggctgcagtgcagcagcgccatcatgactctctactgcctcaacctctcaggcccgagcaatcctcccagcttcctgagtagctcgggcctcagggctggggtctcctggatacaatggagcagatgagccgggaggacatgctggccatctcaacacccgtcttgaccagtctggatgtgccccctgagatgatgcccaccgtcatagatgaatacctaggaagcaactcggacgcacaagccaaatgccaggcgttccaggaattcatgggtgacgtattcatcaatgttcccaccgtcagtttttcaagataccttcgagattctggaagccctgtctttttctatgagttccagcatcgacccagttcttttgcgaagatcaaacctgcctgggtgaaggctgatcatggggccgagggtgcttttgtgttcggaggtcccttcctcatggacgagagctcccgcctggcctttccagaggccacagaggaggagaagcagctaagcctcaccatgatggcccagtggacccactttgcccggacaggggaccccaatagcaaggctctgcctccttggccccaattcaaccaggcggaacaatatctggagatcaacccagtgccacgggccggacagaagttcagggaggcctggatgcagttctggtcagagacgctccccagcaagatacaacagtggcaccagaagcagaagaacaggaaggcccaggaggacctctgaggccaggcctgaaccttcttggctggggcaaaccactcttcaagtggtggcagagtcccagcacggcagcccgcctctccccctgctgagactttaatctccaccagcccttaaagtgtcggccgctctgtgactggagttatgctcttttgaaatgtcacaaggccgcctcccacctctggggcattgtacaagttcttccctctccctgaagtgcctttcctgctttcttcgtggtaggttctagcacattcctctagcttcctggaggactcactcccccaggaagccttccctgccttctctgggctgtgcggccccgagtctgcgtccattagagcacagtccacccgaggctagcaccgtgtctgtgtctgtctccccctcagaggagctctctcaaaatggggattagcctaaccccactctgtcacccacaccaggatcgggtgggacctggagctagggggtgtttgctgagtgagtgagtgaaacacagaatatgggaatggcagctgctgaacttgaacccagagccttcaggtgccaaagccatactcaggcccccaccgacattgtccaccctggccagaagggtgcatgccaatggcagagacctgggatgggagaagtcctggggcgccaggggatccagcctagagcagaccttagcccctgactaaggcctcagactagggcgggaggggtctcctcctctctgctgcccagtcctggcccctgcacaagacaacagaatccatcagggccatgagtgtcacccagacctgaccctcaccaattccagccctgaccctcaggacgctggatgccagctcccagccccagtgccgggtcctccctcccttcctggcttggggagaccagtttctggggagcttccaagagcacccaccaagacacagcaggacaggccaggggagggcatctggaccagggcatccgtcgggctattgtcacagagaaaagaagagacccacccactcgggctgcaaaaggtgaaaagcaccaagaggttttcagatggaagtgagaggtgacagtgtgctggcagccctcacagccctcgcttgctctccctgccgcctctgcctgggctcccactttggcagcacttgaggagcccttcaacccgccgctgcactgtaggagcccctttctgggctggccaaggccggagccagctccctcagcttgcggggaggtgcggagggagaggggcgggcaggaaccggggctgcgcgcagcgcttgcgggccagagtgagttccgggtgggcgtgggctcggcggggccccactcagagcagctggccggccccaggcagtgagggccttagcacctgggccagcagctgctgtgctcgatttctcgctgggccttagctgcctccccgcggggcagggctcgggacctgcagccctccatgcctgaccctccccccaccccccgtgggctcctgtgcggccggagcctccccaaggagcgccgccccctgctccacagcgcccagtcccatcgaccacccaagggctgaggagtgcgggtgcacagcgcgggactggcaggcagctccacctgctgccccagtgctggatccactgggtgaagccagctgggctcctgagtctggtggggacttggagaacctttatgtctagctaagggattgtaaatacaccgatgggcactctgtatctagctcaaggtttgtaaacacaccaatcagcaccctgtgtctagctcagtgtttgtgaatgcaccaatccacactctgtatctggctactctggtggggacttggagaacctttgtgtccacactctgtatctagctaatctagtggggatgtggagaacctttgtgtctagctcagggatcgtaaacgcaccaatcagcaccctgtcaaaacagaccacttgactctctgtaaaatggaccaatcagcaggatgtgggtggggcgagacaagagaataaaagcaggctgcctgagccagcagtgacaacccccctcgggtcccctcccacgccgtggaagctttgttctttcgctctttgcaataaatcttgctactgccc

SEQ ID NO: 316175 - protein, 318 aa, Artificial Sequence
  derived and/or modified sequence
MGLHLRPYRVGLLPDGLLFLLLLLMLLADPALPAGRHPPVVLGWFTTKHPGPPSFLMVWMYVSLALGRPSHWSSWTPAKAAWVPISTPWWRALWAGATHGVRMSEGLPMTGAEPQRQPQAWKDKYIRAFVSLGAPWGGVAKTLRVLASGDNNRIPVIGPLKIREQQRSAVSTSWLLPYNYTWSPEKVFVQTPTINYTLRDYRKFFQDIGFEDGWLMRQDTEGLVEATMPPGVQLHCLYGTGVPTPDSFYYESFPDRDPKICFGDGDGTVNLKSALQCQAWQSRQEHQVLLQELPGSEHIEMLANATTLAYLKRVLLGP

SEQ ID NO: 316176 - protein, 212 aa, Artificial Sequence
  derived and/or modified sequence
MGLHLRPYRVGLLPDGLLFLLLLLMLLADPALPAGRHPPVVLGDNNRIPVIGPLKIREQQRSAVSTSWLLPYNYTWSPEKVFVQTPTINYTLRDYRKFFQDIGFEDGWLMRQDTEGLVEATMPPGVQLHCLYGTGVPTPDSFYYESFPDRDPKICFGDGDGTVNLKSALQCQAWQSRQEHQVLLQELPGSEHIEMLANATTLAYLKRVLLGP

SEQ ID NO: 316177 - protein, 447 aa, Artificial Sequence
  derived and/or modified sequence
MRNSTTEKIEPRELDPILTEVTLMNARSELYLRFLKKRISSDFEVGDSMASEEVKQEHQKCLDKLLNNCLLSCTMQELIGLYVTMEEYFMRETVNKAVALDTYEKGQLTSSMVDDVFYIVKKCIGRALSSSSIDCLCAMINLATTELESDFRDVLCNKLRMGFPATTFQDIQRGVTSAVNIMHSSLQQGKFDTKGIESTDEAKMSFLVTLNNVEVCSENISTLKKTLESDCTKLFSQGIGGEQAQAKFDSCLSDLAAVSNKFRDLLQEGLTELNSTAIKPQVQPWINSFFSVSHNIEEEEFNDYEANDPWVQQFILNLEQQMAEFKASLSPVIYDSLTGLMTSLVAVELEKVVLKSTFNRLGGLQFDKELRSLIAYLTTVTTWTIRDKFARLSQMATILNLERVTEILDYWGPNSGPLTWRLTPAEVRQVLALRIDFRSEDIKRLRL

SEQ ID NO: 316178 - DNA, 1344 bp, Artificial Sequence
  derived and/or modified sequence
atgcgcaattccaccacagaaaagatagaaccgagggaactggatcccatccttaccgaggtaaccttaatgaacgccagatccgagctgtacttacgatttttaaaaaaacgcatctccagcgactttgaggtgggagatagtatggcaagcgaggaggtgaagcaggaacaccagaagtgcctggacaagttgcttaacaattgtctgcttagctgtaccatgcaggaattgatcgggctctatgttaccatggaggagtactttatgagggagaccgtgaataaagctgttgctctggatacttacgagaaaggacagcttacttcctccatggtggacgacgtattctacattgtcaaaaagtgtattgggagagctctttcttcaagtagcattgactgtctgtgcgcgatgatcaacctcgccactactgagctggaatccgatttcagggacgtactgtgcaacaaacttcggatgggttttccggctactacattccaagatatccagcgtggggtgacaagcgctgtgaacatcatgcattcatccctccagcaagggaagttcgacaccaagggaatcgagtccacagatgaagcaaagatgtccttccttgttaccctgaataatgtggaggtctgttcggaaaatatcagcactctgaaaaagacccttgaaagcgattgtaccaagttgttcagccagggcattggcggcgagcaggcccaagctaagttcgacagctgtctgtcagacctagccgctgtctcgaacaaattccgggatctgttgcaagaggggctgacagaactgaacagcaccgctattaaaccacaggtccagccgtggatcaactctttcttttcagtgtcgcacaatatcgaggaggaagagtttaacgactatgaagccaacgatccctgggttcagcagttcatcctgaatctggaacagcagatggccgagttcaaggcgagcctgagtccagtgatttatgacagcctcaccggccttatgacctctctcgtcgcagttgagcttgagaaggtggtactgaaatccacatttaacagattgggcggcctgcagtttgacaaggagctccgcagcctgatagcttatttaacaaccgtgaccacatggacaatcagggataaatttgcacgcttgtcccagatggccaccatactcaatctagagcgcgtcaccgagatattggactattgggggccgaactctgggcccctcacatggcgcttgactccagccgaagtgcggcaggtgttagccctgcgtatcgactttaggtctgaggacatcaagaggctcaggctgtag

SEQ ID NO: 316179 - DNA, 1344 bp, Artificial Sequence
  derived and/or modified sequence
atgaggaacagcaccacagagaagattgagccccgggagctggaccccatcctgacagaggtgaccctgatgaatgcccggtctgagctgtacctgcgcttcctgaagaagaggatcagcagtgactttgaggtgggggacagcatggccagcgaggaggtgaagcaggagcaccagaagtgcctggacaagctgctgaacaactgcctgctgagctgcaccatgcaggagctgattggcctgtatgtgaccatggaggagtacttcatgagggagaccgtgaacaaggctgtggccctggacacctatgagaagggccagctgaccagctccatggtggatgatgtgttctacatcgtgaagaagtgcatcggccgggccctgagcagcagcagcattgactgcctgtgtgccatgatcaacctggccaccacagagctggagagtgacttcagagatgtgctgtgcaacaagctgaggatgggcttccctgccaccaccttccaggacatccagaggggcgtgaccagcgctgtgaacatcatgcacagcagcctgcagcagggcaagtttgacaccaagggcatcgagagcacagatgaggccaagatgtccttcctggtgaccctgaacaacgtggaggtgtgcagcgagaacatcagcaccctgaagaagaccctggagagtgactgcaccaagctgttcagccagggcattggaggagagcaggcccaggccaagtttgacagctgcctgagtgacctggccgctgtgagcaacaagttccgggacctgctgcaggagggcctgacagagctgaacagcacagccatcaagccccaggtgcagccctggatcaacagcttcttctctgtgagccacaacatcgaggaggaggagttcaatgactatgaggccaatgacccctgggtgcagcagttcatcctgaacctggagcagcagatggccgagttcaaggccagcctgagccctgtgatctatgacagcctgaccggcctgatgaccagcctggtggccgtggagctggagaaggtggtgctgaagagcaccttcaaccggctgggcggcctgcagtttgacaaggagctgcggagcctcatcgcctacctgaccaccgtgaccacctggaccatccgggacaagtttgcccggctgagccagatggccaccatcctgaacctggagcgggtgacagagatcctggactactggggccccaacagcggccccctgacctggaggctgaccccagctgaggtgcggcaggtgctggccctgagaattgacttccgctctgaggacatcaagaggctgcggctgtag

SEQ ID NO: 316180 - DNA, 1344 bp, Artificial Sequence
  derived and/or modified sequence
atgcggaacagcaccaccgagaagatcgagccccgggagctggaccctatcctaaccgaagtaactctcatgaacgcaagatctgaattgtacctcagatttctgaaaaaacgtatcagttccgatttcgaggtgggagacagtatggcttccgaggaagttaaacaggagcatcagaaatgccttgataagttattgaacaattgtcttctctcctgtactatgcaggagctcatcggcttgtatgtgacaatggaggagtacttcatgagggaaacagtcaacaaagcagttgccctggacacctacgagaagggacagctaacctcttccatggtggatgacgttttttatatcgtaaagaaatgcattggccgtgcactatccagctcctcgattgactgtctgtgtgctatgattaacctcgcaacgaccgaactcgaatcagattttcgtgacgttttatgtaataagcttcgaatgggtttccctgcaaccactttccaggatatccagagaggagtcacctcagccgttaacatcatgcacagcagcctgcagcagggaaagtttgatacaaaaggcatcgagtccactgatgaggctaagatgtcatttcttgtcaccctcaacaatgtcgaagtctgttccgaaaatattagtactctcaaaaagacattagaatctgattgcaccaaacttttcagtcagggcatcgggggggagcaggctcaggccaagttcgattcttgcctctcggatttagcggcagtgagtaacaaatttagggatttgttacaggagggcctaaccgaactgaacagcactgccattaagcctcaagttcaaccgtggatcaactccttttttagcgtgagccataatattgaggaggaggaattcaatgattatgaggctaatgatccttgggtgcagcaatttattctcaacctggaacagcagatggctgagttcaaagcttcactgtcacccgtaatttacgattccttgacgggactgatgacttcgctggtggcagtggaactcgaaaaagtagtgctgaagtccacatttaatcgcttgggaggtctccagtttgacaaggagctgaggtcacttattgcatacctgactacagtcaccacctggacgatccgcgataaattcgcaaggctgtcccagatggcaactatattgaatttagaacgcgttaccgagattttagactactgggggccaaactccggtcctctcacctggagattgacacctgcagaagtacggcaggtgctcgcactgcgaatagactttcgttctgaagatattaagagactgcgtctgtag

SEQ ID NO: 316181 - DNA, 1344 bp, Artificial Sequence
  derived and/or modified sequence
atgcgaaattccacgacagaaaaaatcgagccaagagagctcgaccctatcttgaccgaggttaccctcatgaacgcgaggagcgaactctatttgagattcctcaaaaaacgcatttcaagcgacttcgaggtgggggactctatggcgagcgaggaggtgaaacaagaacatcaaaaatgtctagacaaactccttaataattgtctgctctcatgtaccatgcaggagctgatcggcctctacgtgacaatggaggaatactttatgcgggaaactgtgaataaggctgttgcacttgacacttacgagaaaggacagttaacatctagcatggtcgatgacgtcttctacattgtcaaaaagtgcatcggacgtgcattgtctagctctagtattgattgcttatgtgcgatgatcaacctggcgaccaccgagctggagtccgactttcgcgatgtgctttgcaacaagctccgtatgggctttccagcaaccaccttccaagatattcagcgcggagttacttcagccgtgaacatcatgcactcctctcttcagcagggtaagtttgacaccaaaggaatcgagagcaccgacgaggcaaaaatgtccttcttggtcaccctgaataacgtggaggtgtgttcagagaacatctccacattaaaaaaaactcttgaatccgattgcactaagctgttttctcagggcatcggaggcgaacaggcacaggccaagttcgactcctgcctgagcgatcttgccgctgtgtcaaataaattccgcgaccttcttcaggaaggcctgaccgaactgaactcaacagctatcaagccacaggtacagccttggattaattctttcttttcggtcagccataacattgaggaagaagaattcaacgattatgaggccaacgacccgtgggtacagcagttcatcctcaacctggagcagcagatggccgagtttaaagccagtctctctccagtcatctacgactcccttacaggactgatgactagtctcgtcgctgtagagctcgagaaagtggtgcttaaatctacgtttaaccgtctgggaggcctgcagttcgacaaggaactgcggtctctgatagcctatctgactactgtgaccacttggaccattagagataagttcgcccgactgtcgcagatggccacaatcttaaatctcgaaagagtgaccgaaattttggactattggggcccaaacagcgggcctttgacatggcgcttaactccggctgaggtgaggcaggtcttagctctgcgcattgacttccggtcagaggacattaaacggctccggctgtag

SEQ ID NO: 316182 - DNA, 1344 bp, Artificial Sequence
  derived and/or modified sequence
atgagaaacagcaccaccgagaagatcgagcccagagagctggaccccatcctgaccgaggtgaccctgatgaacgccagaagcgagctgtacctgagattcctgaagaagagaatcagcagcgacttcgaggtgggcgacagcatggccagcgaggaggtgaagcaggagcaccagaagtgcctggacaagctgctgaacaactgcctgctgagctgcaccatgcaggagctgatcggcctgtacgtgaccatggaggagtacttcatgagagagaccgtgaacaaggccgtggccctggacacctacgagaagggccagctgaccagcagcatggtggacgacgtgttctacatcgtgaagaagtgcatcggcagagccctgagcagcagcagcatcgactgcctgtgcgccatgatcaacctggccaccaccgagctggagagcgacttcagagacgtgctgtgcaacaagctgagaatgggcttccccgccaccaccttccaggacatccagagaggcgtgaccagcgccgtgaacatcatgcacagcagcctgcagcagggcaagttcgacaccaagggcatcgagagcaccgacgaggccaagatgagcttcctggtgaccctgaacaacgtggaggtgtgcagcgagaacatcagcaccctgaagaagaccctggagagcgactgcaccaagctgttcagccagggcatcggcggcgagcaggcccaggccaagttcgacagctgcctgagcgacctggccgccgtgagcaacaagttcagagacctgctgcaggagggcctgaccgagctgaacagcaccgccatcaagccccaggtgcagccctggatcaacagcttcttcagcgtgagccacaacatcgaggaggaggagttcaacgactacgaggccaacgacccctgggtgcagcagttcatcctgaacctggagcagcagatggccgagttcaaggccagcctgagccccgtgatctacgacagcctgaccggcctgatgaccagcctggtggccgtggagctggagaaggtggtgctgaagagcaccttcaacagactgggcggcctgcagttcgacaaggagctgagaagcctgatcgcctacctgaccaccgtgaccacctggaccatcagagacaagttcgccagactgagccagatggccaccatcctgaacctggagagagtgaccgagatcctggactactggggccccaacagcggccccctgacctggagactgacccccgccgaggtgagacaggtgctggccctgagaatcgacttcagaagcgaggacatcaagagactgagactgtag

SEQ ID NO: 316183 - DNA, 582 bp, Artificial Sequence
  derived and/or modified sequence
atggaacgaccactggagaatggagatgaatccccagatagccagggccacgctaccgactggagattcgcagtatgttcttttcgggatgcatgggaagaggaagagcctgccagccaaatgcacgtaaaggacccaggtccaccacgacctcctgccggagcaacccaggacgaggaactgcagggcagcccattatctcgtaaatttcagttgcctccagccgcggacgagagcggggacgcacagcgagggaccgtagaatcctcatctgtgttgtcagaggggcctgggccttctggagtggaaagcctcttatgcccaatgagtagtcacctaagcctcgcccagggggaaagcgacactccaggtgtcggactggtgggagaccccgggcctagtcgggcaatgccctccggattaagtccgggcgctctggactccgatccagtgggacttggggacccattatcagagatctccaaactattagaggctggcaaggagggatgggctagggaggtctgggaaggaaatggagatgcgtggagagacgagtgtcaggactttggcggactgtag

SEQ ID NO: 316184 - DNA, 582 bp, Artificial Sequence
  derived and/or modified sequence
atggagcggcccctggagaatggagatgagagcccagacagccagggccacgccacagactggaggtttgctgtgtgcagcttcagagatgcctgggaggaggaggagcccgccagccagatgcacgtgaaggaccccggcccccccaggcctcctgctggggccacccaggatgaggagctgcagggcagccccctgagcaggaagttccagctgcccccagctgctgatgaaagtggagatgcccagaggggcaccgtggagagcagctctgtgctgtctgagggccctggccccagcggcgtggagagcctgctgtgccccatgagcagccacctgagcctggcccagggcgagagtgacaccccaggagtgggcctggtgggggaccccggccccagccgggccatgcccagcggcctgagccctggggccctggacagcgaccctgtgggcctgggggaccccctgtctgagatcagcaagctgctggaggccggcaaggagggctgggcccgggaggtgtgggagggcaatggagatgcctggagagatgagtgccaggactttggaggcctgtag

SEQ ID NO: 316185 - DNA, 582 bp, Artificial Sequence
  derived and/or modified sequence
atggagcggcccctggagaacggcgacgagagccccgacagccaggggcacgccacggactggagattcgccgtttgtagcttccgagatgcgtgggaagaagaggaaccagcatcacagatgcatgtgaaggaccctgggccaccacgcccccccgctggcgcaacacaggatgaagagctccaaggtagccccctgtccaggaagtttcagctgcctcccgctgccgatgaatctggcgatgcccagagagggacagtggaaagctcatccgtgctgagcgaaggtccagggccaagcggcgtggaaagtctgctctgcccgatgagcagccacctttccctcgcacagggagaatctgacacccctggagtcgggcttgtgggcgaccccgggcccagtagggccatgccatccgggcttagccccggagctctggactccgatcctgtaggactgggcgacccattgagcgaaattagcaaattactcgaggctggcaaggagggttgggccagggaagtatgggagggtaacggagatgcgtggcgggacgaatgtcaggactttggcgggctgtag

SEQ ID NO: 316186 - DNA, 582 bp, Artificial Sequence
  derived and/or modified sequence
atggaaagacccctcgaaaacggcgatgagtccccggactcccagggccacgcgaccgattggcgcttcgccgtctgtagcttccgtgatgcctgggaagaagaagagccagcttctcaaatgcacgtgaaagatccaggccctcctcgccctcccgcaggcgctactcaggacgaagagctgcaagggagccccttatcccgtaaattccagctcccacctgcggcagacgagtcgggtgacgctcagagagggacggtagagtccagcagcgtgctgtccgaaggcccaggccctagcggagtggaatccttactgtgcccgatgtcttcgcatctgtccctagcacagggagagagtgacacgcccggagtgggactggtgggtgaccccggtcccagccgtgccatgccatccggattgagcccaggtgcactggactccgaccccgtggggctaggggacccactttcagaaattagtaagctgctggaggcgggtaaagagggatgggccagggaagtctgggaagggaatggagatgcatggcgtgacgaatgccaggactttggagggctgtag

SEQ ID NO: 316187 - DNA, 582 bp, Artificial Sequence
  derived and/or modified sequence
atggagagacccctggagaacggcgacgagagccccgacagccagggccacgccaccgactggagattcgccgtgtgcagcttcagagacgcctgggaggaggaggagcccgccagccagatgcacgtgaaggaccccggcccccccagaccccccgccggcgccacccaggacgaggagctgcagggcagccccctgagcagaaagttccagctgccccccgccgccgacgagagcggcgacgcccagagaggcaccgtggagagcagcagcgtgctgagcgagggccccggccccagcggcgtggagagcctgctgtgccccatgagcagccacctgagcctggcccagggcgagagcgacacccccggcgtgggcctggtgggcgaccccggccccagcagagccatgcccagcggcctgagccccggcgccctggacagcgaccccgtgggcctgggcgaccccctgagcgagatcagcaagctgctggaggccggcaaggagggctgggccagagaggtgtgggagggcaacggcgacgcctggagagacgagtgccaggacttcggcggcctgtag

SEQ ID NO: 316188 - protein, 611 aa, Artificial Sequence
  derived and/or modified sequence
SIPKMEVKSYTKNNTIAPKKASHRILSDTSDEEDASVTVGTGEKLRLSAHTILPGSKTREPSNAKQQKEKNKVKKKRKKETKGREVRFGKRSDKFCSSESESESSESGEDDRDSLGSSGCLKGSPLVLKDPSLFSSLSASSTSSHGSSAAQKQNPSHTDQHTKHWRTDNWKTISSPAWSEVSSLSDSTRTRLTSESDYSSEGSSVESLKPVRKRQEHRKRASLSEKKSPFLSSAEGAVPKLDKEGKVVKKHKTKHKHKNKEKGQCSISQELKLKSFTYEYEDSKQKSDKAILLENDLSTENKLKVLKHDRDHFKKEEKLSKMKLEEKEWLFKDEKSLKRIKDTNKDISRSFREEKDRSNKAEKERSLKEKSPKEEKLRLYKEERKKKSKDRPSKLEKKNDLKEDKISKEKEKIFKEDKEKLKKEKVYREDSAFDEYCNKNQFLENEDTKFSLSDDQRDRWFSDLSDSSFDFKGEDSWDSPVTDYRDMKSDSVAKLILETVKEDSKERRRDSRAREKRDYREPFFRKKDRDYLDKNSEKRKEQTEKHKSVPGYLSEKHERRRRRMAPIRKGRRRQNQKDTKRNPVTRTKVRNQSWKNVRRTKNLINVLKRKK

SEQ ID NO: 316189 - DNA, 1317 bp, Artificial Sequence
  derived and/or modified sequence
agcgcgggccgagtgaatgaagacagagtccggagccggactatgcccaagggcgggtgtccaaaggccccccagcaggaggagttgcctctaagtagtgatatggtggagaagcaaactgggaagaaggataaggacaaggtttcattgactaagacccctaaactcgagcggggggacgggggcaaggaggtaagggagagagcctccaagcgaaaactgccctttaccgccggagcaaatggagagcagaaagattcagacacggagaagcagggccctgagcgaaagcggatcaagaaagaaccagtgacacggaaggcgggcttgctgtttggtatgggactctccggcatccgcgcaggctatcccctgtccgaacggcaacaggtggccctgttgatgcagatgactgcagaggagtccgcaaattctcccgttgatacaactccaaaacatccatcccaaagcacagtgtgtcagaagggaacacctaacagcgcttccaaaaccaaagataaggtgaataaacgcaatgaaagaggcgaaactcggctccatcgggctgcaatccgaggtgacgccagacggattaaggagctgatttctgagggagctgatgtaaacgtgaaggacttcgccggctggacagctctccacgaagcgtgcaatcgcggttattacgacgtcgctaagcagctgctggccgcaggggctgaagtcaatacaaagggtctggatgacgacacccctctccatgacgctgcgaacaacggccattacaaagtcgttaagctccttcttcgatacggcggcaaccctcagcagtccaatcgcaaaggcgaaacaccactgaaagtagctaattccccaaccatggttaacctgctactaggaaagggaacctacacctcatccgaggagtcgtcaaccgagagcagcgaagaggaagatgcgcctagctttgcaccatcctcttccgtcgatggaaacaatacagacagcgaattcgaaaagggactgaaacacaaggcaaagaaccccgagccgcagaaggcaaccgccccagttaaggatgaatacgaatttgacgaggatgatgagcaagacagggtcccgccggtggatgacaagcacctgcttaagaaagactatcgaaaagaaactaagagcaacagcttcatcagcattcccaaaatggagaaggtgactttgaagatcacaagactgcaccaacggaagaggcccattgttagctgccaaacccgcaggacaagacggaccagagtctccccctgggggcaggagcggtcatag

SEQ ID NO: 316190 - DNA, 1317 bp, Artificial Sequence
  derived and/or modified sequence
tctgctggccgggtgaatgaagatagagtgcgcagcaggaccatgcccaagggcggctgccccaaggccccccagcaggaggagctgcccctgagcagtgacatggtggagaagcagacaggcaagaaggacaaggacaaggtgtccctgaccaagacccccaagctggagagaggagatggcggcaaggaggtgcgggagcgggccagcaagaggaagctgcccttcaccgctggggccaatggagagcagaaggacagcgacacagagaagcagggccctgagaggaagaggatcaagaaggagcctgtgaccaggaaggccggcctgctgtttggcatgggcctgagcggcatccgggccggctaccccctgtctgagcggcagcaggtggccctgctgatgcagatgacagctgaggagagcgccaacagccctgtggacaccacccccaagcaccccagccagagcacagtgtgccagaagggcacccccaacagcgccagcaagaccaaggacaaggtgaacaagagaaatgaaagaggagagacccggctgcacagagctgccatcagaggagatgcccggcgcatcaaggagctgatcagcgagggcgcagatgtgaatgtgaaggactttgctggctggacagccctgcacgaggcctgcaacagaggctactatgatgtggccaagcagctgctggccgccggggctgaggtgaacaccaagggcctggatgatgacacccccctgcatgatgctgccaacaacggccactacaaggtggtgaagctgctgctgcgctatggaggcaacccccagcagagcaacaggaagggggagacccccctgaaggtggccaacagccccaccatggtgaacctgctgctgggcaagggcacctacaccagcagcgaggagagcagcacagagagcagcgaggaggaggatgcccccagctttgcccccagcagctctgtggatggcaacaacacagattctgaatttgagaagggcctgaagcacaaggccaagaaccctgagccccagaaggccacagcccctgtgaaggatgaatatgaatttgatgaagatgatgagcaggacagagtgccccctgtggatgacaagcacctgctgaagaaggactacaggaaggagaccaagagcaacagcttcatcagcatccccaagatggagaaggtgaccctgaagatcacccggctgcaccagaggaagaggcccatcgtgtcctgccagaccaggaggaccaggaggaccagggtgagcccctggggccaggagaggagctag

SEQ ID NO: 316191 - DNA, 1317 bp, Artificial Sequence
  derived and/or modified sequence
agcgccggccgggtgaacgaggaccgggtgcggagccggaccatgcccaaggggggctgccctaaggcacctcagcaggaggagttgcctctcagttctgacatggtggagaaacagaccggaaaaaaggacaaagataaagtgtctctcacgaagactccaaaactggagcgcggcgatggcggcaaggaagttcgggaaagagcctctaaaaggaagcttccatttaccgccggagccaacggcgagcaaaaggattccgacactgagaaacagggacccgagcgtaagcgcataaagaaggagcccgtgacgagaaaagccggcctcctctttggcatgggtttatcaggaatcagggcggggtaccccctttctgagcgtcaacaggtggccctgcttatgcagatgactgctgaggaatcagccaactcacccgttgatacaactcctaagcatcctagccagtcgactgtttgccagaagggaacgccaaattccgcttctaaaactaaagacaaagtcaacaaaaggaacgaacgaggcgagacaagactgcatagagccgccatcaggggcgacgcccggcgaatcaaggaattaatctccgaaggggcagacgtgaacgtgaaagacttcgccggatggaccgctctgcacgaggcttgcaatagaggctactatgacgtggcaaaacaactactggccgctggagctgaagtgaatacaaaaggactggacgacgatacacccttgcatgatgccgccaataatggacattacaaggttgtcaagcttttattgcggtacggcggaaacccacagcagtctaaccgaaagggagagacccctctgaaggtcgctaatagcccaacaatggtcaatttattactcggtaaggggacatacacttcttccgaggagtcatccaccgaaagctccgaggaagaagacgccccttcatttgcaccatctagttcggttgacggtaacaacaccgattcagagtttgagaaaggactcaagcataaggctaaaaaccctgaaccccaaaaagccacagcgccggtgaaggatgagtatgagtttgatgaagacgatgagcaggatcgggtcccacccgtggacgacaagcacctcctcaagaaagactaccggaaggaaaccaaaagtaacagctttatcagtatacccaaaatggagaaggttactttgaagatcacaagactgcaccagcggaagcggcctatagtttcgtgccagacccgcagaacgcggcgcacacgggtaagtccatggggccaggagcggtcctag

SEQ ID NO: 316192 - DNA, 1736 bp, Artificial Sequence
  derived and/or modified sequence
agaggccgccctgagacggtgcgcgatggaccgagggccccagccggggaggcgccgccgccgagcccgcggccagacgccccatcagtagcgtccgcaccgggagccgcggctctcgcccgagccgtgggcgcgcccgaggggcgggctcgcctcccgccgtccctcgcagctctgccgggcccgagcccgcgccgccgccgccgccgccttgccgctcgggccgcgcggcccgggaaacgcggccgcgggctgcatgggcagcgcccgcgccccgccgctgagccgtcgcggagccgcgcagccctcggagcacgaatatatacagccctgctctgggacacacctccattggatttaaaagacagtcctcgtcagcactgactttcagctatggaatcgcagacggttgatgatgaagcgccggccgtgtaaatgaagatcgggtgaggagcaggacgatgcccaagggtgggtgccctaaagcaccacagcaggaagagcttcccctcagcagcgacatggtggagaagcagactgggaaaaaggataaagataaagtttctctaaccaagaccccaaaactggagcgtggcgatggcgggaaggaggtgagggagcgagccagcaagcggaagctgcccttcaccgcgggcgccaatggggagcagaaggactcggacacagagaagcagggccctgagcggaagaggattaagaaggagcctgtcacccggaaggccgggctgctgtttggcatggggctgtctggaatccgagccggctaccccctctccgagcgccagcaggtggcccttctcatgcagatgacggccgaggagtctgccaacagcccagtggacacaacaccaaagcacccctcccagtctacagtgtgtcagaagggaacgcccaactctgcctcaaaaaccaaagataaagtgaacaagagaaacgagcgtggagagacccgcctgcaccgagccgccatccgcggggacgcccggcgcatcaaagagctcatcagcgagggggcagacgtcaacgtcaaggacttcgcaggctggacggcgctgcacgaggcctgtaaccggggctactacgacgtcgcgaagcagctgctggctgcaggtgcggaggtgaacaccaagggcctagatgacgacacgcctttgcacgacgctgccaacaacgggcactacaaggtggtgaagctgctgctgcggtacggagggaacccgcagcagagcaacaggaaaggcgagacgccgctgaaagtggccaactcccccacgatggtgaacctcctgttaggcaaaggcacttacacttccagcgaggagagctcgacggagagctcagaagaggaagacgcaccatccttcgcaccttccagttcagtcgacggcaacaacacggactccgagttcgaaaaaggcctcaagcacaaggccaagaacccagagccacagaaggccacggcccccgtcaaggacgagtatgagtttgatgaggacgacgagcaggacagggttcctccggtggacgacaagcacctattgaaaaaggactacagaaaagaaacgaaatccaatagttttatctctatacccaaaatggagaaagttacactaaaaataacacgattgcaccaaagaaagcgtcccatcgtatcctgtcagacacgtcggacgaggaggacgcgagtgtcaccgtggggacaggagagaagctga

SEQ ID NO: 316193 - DNA, 1317 bp, Artificial Sequence
  derived and/or modified sequence
tccgcaggcagggtcaacgaggatcgggtgaggagtcgcaccatgccaaagggtggttgcccgaaagcacctcagcaagaggagctcccactaagcagcgatatggttgaaaagcagacaggcaaaaaagacaaggataaggtctcgctcactaagacacccaagcttgaaaggggagatgggggtaaggaggtaagggagcgggcttctaagaggaagctgccttttaccgccggagcaaacggcgagcagaaagactcagacacagagaaacaaggccctgagcgtaagagaataaaaaaagagccggttacacggaaggcaggattacttttcggcatgggattaagcggcattcgagcgggttaccccctcagcgaacgccagcaggtggctctcctgatgcagatgacagccgaagagagcgctaacagtccagtggatacaacacccaagcatccttcccagtctactgtgtgtcagaaggggacccctaattctgcatccaaaacgaaagataaagtgaacaaacgcaacgagcggggtgagacacgattgcaccgcgcagccattcggggagacgcacgacggattaaggaactgattagtgagggtgcagacgtaaacgtgaaagacttcgcaggatggaccgcactccacgaagcgtgcaaccgcggttactacgacgtcgccaagcagctgcttgctgcaggggcagaggtgaatacgaagggcctggatgatgacaccccccttcacgacgcggcaaataacggacactacaaagtcgtgaaactgctcctgaggtacgggggaaacccacagcagtcaaatagaaagggtgagacaccactcaaggtggcgaattctcccaccatggtcaacttgctgctcggtaaaggaacatatactagttctgaggagtcttcaactgaatcttcggaagaggaagacgctccatcattcgcacccagttcatctgtggacggcaataacactgattccgaattcgagaagggcctcaagcataaagcaaaaaaccctgaaccacagaaggcaacagcccctgtgaaggatgaatatgaatttgacgaggacgacgagcaggaccgtgtaccacctgtcgacgacaagcatctcctgaagaaagactaccggaaggaaaccaagagtaactcattcatcagtatcccaaaaatggaaaaggtcactctcaaaattactcgtctgcaccagagaaagcgccctatcgtaagttgccaaacaaggaggaccagaagaacaagggttagcccgtggggacaagaacgttcatag

SEQ ID NO: 316194 - DNA, 1317 bp, Artificial Sequence
  derived and/or modified sequence
agcgccggcagagtgaacgaggacagagtgagaagcagaaccatgcccaagggcggctgccccaaggccccccagcaggaggagctgcccctgagcagcgacatggtggagaagcagaccggcaagaaggacaaggacaaggtgagcctgaccaagacccccaagctggagagaggcgacggcggcaaggaggtgagagagagagccagcaagagaaagctgcccttcaccgccggcgccaacggcgagcagaaggacagcgacaccgagaagcagggccccgagagaaagagaatcaagaaggagcccgtgaccagaaaggccggcctgctgttcggcatgggcctgagcggcatcagagccggctaccccctgagcgagagacagcaggtggccctgctgatgcagatgaccgccgaggagagcgccaacagccccgtggacaccacccccaagcaccccagccagagcaccgtgtgccagaagggcacccccaacagcgccagcaagaccaaggacaaggtgaacaagagaaacgagagaggcgagaccagactgcacagagccgccatcagaggcgacgccagaagaatcaaggagctgatcagcgagggcgccgacgtgaacgtgaaggacttcgccggctggaccgccctgcacgaggcctgcaacagaggctactacgacgtggccaagcagctgctggccgccggcgccgaggtgaacaccaagggcctggacgacgacacccccctgcacgacgccgccaacaacggccactacaaggtggtgaagctgctgctgagatacggcggcaacccccagcagagcaacagaaagggcgagacccccctgaaggtggccaacagccccaccatggtgaacctgctgctgggcaagggcacctacaccagcagcgaggagagcagcaccgagagcagcgaggaggaggacgcccccagcttcgcccccagcagcagcgtggacggcaacaacaccgacagcgagttcgagaagggcctgaagcacaaggccaagaaccccgagccccagaaggccaccgcccccgtgaaggacgagtacgagttcgacgaggacgacgagcaggacagagtgccccccgtggacgacaagcacctgctgaagaaggactacagaaaggagaccaagagcaacagcttcatcagcatccccaagatggagaaggtgaccctgaagatcaccagactgcaccagagaaagagacccatcgtgagctgccagaccagaagaaccagaagaaccagagtgagcccctggggccaggagagaagctag

SEQ ID NO: 316195 - protein, 373 aa, Artificial Sequence
  derived and/or modified sequence
MASELAMSNSDLPTSPLAMEYVNDFDLMKFEVKKEPVETDRIISQCGRLIAGGSLSSTPMSTPCSSVPPSPSFSAPSPGSGSEQKAHLEDYYWMTGYPQQLNPEALGFSPEDAVEALISNSHQLQGGFDGYARGAQQLAAAAGAGAGASLGGSGEEMGPAAAVVSAVIAAAAAQSGAGPHYHHHHHHAAGHHHHPTAGAPGAAGSAAASAGGAGGAGGGGPASAGGGGGGGGGGGGGGAAGAGGALHPHHAAGGLHFDDRFSDEQLVTMSVRELNRQLRGVSKEEVIRLKQKRRTLKNRGYAQSCRFKRVQQRHVLESEKNQLLQQVDHLKQEISRLVRERDAYKEKYEKLVSSGFRENGSSSDNPSSPEFFM

SEQ ID NO: 316196 - protein, 395 aa, Artificial Sequence
  derived and/or modified sequence
MWLPRVSSTAVTALLLAQTFLLLFLVSRPGPSSPAGGEARVHVLVLSSWRSGSSFVGQLFNQHPDVFYLMEPAWHVWTTLSQGSAATLHMAVRDLVRSVFLCDMDVFDAYLPWRRNLSDLFQWAVSRALCSPPACSAFPRGAISSEAVCKPLCARQSFTLAREACRSYSHVVLKEVRFFNLQVLYPLLSDPALNLRIVHLVRDPRAVLRSREQTAKALARDNGIVLGTNGTWVEADPGLRVVREVCRSHVRIAEAATLKPPPFLRGRYRLVRFEDLAREPLAEIRALYAFTGLSLTPQLEAWIHNITHGSGPGARREAFKTSSRNALNVSQAWRHALPFAKIRRVQELCAGALQLLGYRPVYSEDEQRNLALDLVLPRGLNGFTWASSTASHPRN

SEQ ID NO: 316197 - DNA, 1188 bp, Artificial Sequence
  derived and/or modified sequence
atgtggcttcccagagtgagctcaacggctgtgactgcactgctactggctcaaacattcctgcttttgtttctggtgagtcgtccaggcccgagctctccagccggaggagaggcccgggtgcacgtgctggtgttgtcatcatggcggagtgggtctagttttgtaggacagctttttaatcagcatcctgatgtgttctatcttatggaacctgcctggcacgtatggacgactctttctcagggtagcgccgccactctgcacatggcggtcagagatctggtgaggtccgtttttctttgcgacatggacgtgttcgatgcttacctaccttggcggcggaaccttagtgaccttttccaatgggctgtgtccagggctctatgttcccctccggcatgttctgcttttccgcgcggtgcgatatcctccgaggcagtttgtaagcctttatgtgcaagacagtctttcaccctggcacgggaagcctgtagatcctatagtcacgtggtgctgaaggaagtgaggttcttcaatctgcaggtgctgtatcccctgctgtctgaccctgcattgaaccttcgcatcgtgcatctcgtacgtgatccacgggccgtgctccgatcacgcgagcaaacagccaaggctttggctcgagataacggtatcgtgcttggcactaatgggacctgggtcgaagcagatcctggcttgagagtggtgcgggaagtttgccggagccacgtgaggatcgcagaggccgcaaccctgaagccccctccattcttgcggggtcgctaccggcttgtgagatttgaggatttggcacgcgagcctttagctgaaatcagagccttgtacgccttcacgggcctctccctgactcctcagttggaggcctggatacacaacatcacccatgggtctgggccaggcgccaggcgggaggcgtttaaaacatcgagcagaaatgccctgaatgtctcccaggcctggagacacgcgctgccttttgcaaaaattcgccgcgtgcaggaattgtgtgccggggccttacaacttctcgggtaccggccggtctacagcgaagacgagcagcggaacctcgccctggatcttgttttgccacgcggactaaatggattcacttgggcctcttccacagctagccatccaagaaattag

SEQ ID NO: 316198 - DNA, 1188 bp, Artificial Sequence
  derived and/or modified sequence
atgtggcttccccgcgtctcatcaaccgccgtcactgccctgcttctggcccagacatttctgctgctctttctggtttcgcgccccggcccttcctcacctgctggaggagaggctcgtgtccatgtcctggtactgtcatcctggagatctggatcctcatttgtgggccagctcttcaatcagcatccggacgtattttatcttatggagccagcatggcacgtttggaccaccctgtcccaggggtccgcagccaccctgcacatggccgttcgggaccttgtgcggtccgtgttcttatgtgatatggacgtctttgacgcttacttgccctggaggcggaatctcagtgacctgttccaatgggccgtgagtcgagctctgtgttcccctcctgcttgttcagccttcccccgaggagccatatcctccgaggccgtttgcaaacccctctgcgcaaggcaaagttttacactggctcgcgaagcctgtcggtcgtatagtcacgtcgtgcttaaggaagttcggtttttcaacttgcaggtactgtacccgctgctgtctgacccagccttgaatctgcgtatcgttcacctcgtccgcgacccaagagccgtgttacgctcccgggagcagaccgcaaaagccttggccagagataatggcatcgtgctggggacaaatggcacctgggtggaggctgaccctgggttgcgcgttgtcagggaagtatgtaggtcccatgtgagaattgccgaggcagccacattaaaacccccaccattcttgaggggcaggtataggttggtgcgtttcgaagatttggcgagggagccactagccgagatccgcgctctctatgcctttacggggctaagcttaaccccgcaactggaggcatggattcacaacatcacacacggttccgggccaggggcccggagggaggcctttaagaccagttcaaggaacgcactcaatgtctctcaagcttggcgccacgccctgccttttgcaaaaatccggcgggttcaggagttgtgcgccggtgcgctgcagctgttgggatataggcctgtctattctgaggatgagcaacgaaacctggcgttagacctggtgctgccgcgaggtctcaacggttttacatgggccagctccactgccagtcatcccaggaattag

SEQ ID NO: 316199 - DNA, 1188 bp, Artificial Sequence
  derived and/or modified sequence
atgtggctgccccgggtgagcagcacagctgtgacagccctgctgctggcccagaccttcctgctgctcttcctggtgtccaggcctggccccagcagccctgctggaggagaggcccgggtgcacgtgctggtgctgagctcctggaggagcggcagcagctttgtgggccagctgttcaaccagcacccagatgtgttctacctgatggagcccgcctggcacgtgtggaccaccctgagccagggcagcgctgccaccctgcacatggctgtgcgggacctggtgcgcagcgtcttcctgtgtgacatggatgtgtttgatgcctacctgccctggaggaggaacctgagtgacctcttccagtgggccgtgtcccgggccctgtgcagccccccagcctgcagcgccttccccaggggggccatcagcagcgaggccgtgtgcaagcccctgtgtgcccggcagagcttcaccctggcccgggaggcctgccgcagctacagccacgtggtgctgaaggaggtgcgcttcttcaacctgcaggtgctgtaccccctgctgagtgaccctgccctgaacctgagaattgtgcacctggtgcgggaccccagggctgtgctgcggagccgggagcagacagccaaggccctggcccgggacaatggcatcgtgctgggcaccaacggcacctgggtggaggccgaccccggcctgcgggtggtgcgggaggtgtgccgcagccacgtgagaattgctgaggccgccaccctgaagcccccacccttcctgcggggccgctaccgcctggtgcgctttgaggacctggcccgggagcccctggccgagatccgggccctgtatgccttcaccggcctgagcctgaccccccagctggaggcctggatccacaacatcacccacggcagcggccctggggcccggcgggaggccttcaagaccagcagcagaaatgccctgaatgtgtcccaggcctggaggcatgccctgccctttgccaagatcagaagagtgcaggagctgtgtgccggggccctgcagctgctgggctacagacctgtgtacagtgaagatgagcagaggaacctggccctggacctggtgctgccccggggcctgaatggcttcacctgggccagcagcacagccagccaccccaggaactag

SEQ ID NO: 316200 - DNA, 1188 bp, Artificial Sequence
  derived and/or modified sequence
atgtggctgccccgggtgagcagcaccgccgtgaccgccctgctgctggcccagaccttcttgctcctgttcctggtgtctcgccctggaccatcctctccggccggaggcgaagctagagtgcacgttctcgtcctgtcatcatggcggagtggctccagctttgtgggtcagttgttcaatcagcaccccgacgtcttctacctgatggaacccgcttggcacgtgtggaccacgttgtcacaaggcagcgccgcaaccctgcacatggctgtccgggacctagttcgatctgttttcctgtgcgacatggacgtgtttgatgcatacttaccatggaggaggaacctgtcagaccttttccaatgggcagtgtccagagctctgtgttctcctccggcctgctcagctttcccccggggcgctattagctcggaagccgtgtgtaagccactttgcgctagacagtcatttaccctggcacgggaggcgtgccgcagctattcacatgtggtgctgaaggaggtgaggtttttcaatctccaggttttatatcctctgctgtcagatccagccttgaacctacgtatagtccaccttgttagagaccctagggccgttctgcgctcacgtgagcagacagccaaagccctcgccagggataacggaatagtgctgggaacgaacggcacctgggttgaggccgaccccgggctccgcgtggtccgcgaggtctgcagatctcatgttcgcatagcggaagctgcaaccttgaaacccccccctttcctgcgtggaaggtaccggcttgtacgattcgaggacctggcccgggaacccctggccgaaataagggcactgtacgcgttcaccggcctgtccctgaccccccaacttgaggcttggatccacaacattacacacggaagcggtccaggtgcccgcagagaagccttcaaaaccagcagcaggaacgccctaaatgtatcacaggcttggcgccacgcattgccctttgccaaaatccggagggtccaggaactatgtgctggtgctttgcaacttctaggatatcgacccgtgtacagtgaagacgagcaaagaaatttggcccttgatttagtgcttcctcgcggcctgaatgggttcacgtgggcctcgagcacggcctcacaccccagaaattag

SEQ ID NO: 316201 - DNA, 1188 bp, Artificial Sequence
  derived and/or modified sequence
atgtggctgccccgggtgagcagcaccgccgtgaccgccctgctgttggcccagacatttcttctcttattcctcgtgagcagacccggcccatctagtcctgcaggcggtgaggcacgggttcacgttctagttttgtcatcttggcgatccgggtcttccttcgtcggacagctctttaaccagcacccagatgtgttctatttaatggagcctgcctggcacgtgtggaccactcttagtcagggaagcgcggcgactttgcatatggcagtgcgggatctggtgaggagtgtctttctttgcgacatggacgtgtttgatgcctacctcccctggcgtcggaatctcagcgatttgttccaatgggcggtgtcacgggctctgtgttcccccccggcgtgttcagctttcccaagaggcgccatcagctccgaagcagtttgtaagcccttatgtgccagacagtctttcaccttagcccgggaagcatgccggtcttactcccatgtggttttgaaggaagtgagattttttaacctgcaggtgttataccctctcctttccgacccagcactcaacctgcgaatcgtgcacctcgtccgggatcctagagcggtcctgcggtcccgggaacaaaccgccaaggcgctagcgagggacaatgggatcgtgctgggtactaatgggacctgggtagaggcagatcctgggctacgggtggtccgagaagtgtgtaggagccacgtccggatagccgaggccgcgacacttaaaccacctccatttcttcgaggaagataccggctcgtacggttcgaggacctggccagagaaccacttgccgagatcagagcactgtatgcctttaccggcctgtccctgacaccccaactggaagcttggattcataatattacacacggtagcgggccgggtgcccgccgagaggcattcaaaacatccagcagaaatgctttaaacgtgagccaggcttggcgtcatgccttgccttttgctaagatccggcgtgtccaggagctttgtgccggggccctgcagctgctgggctacaggcctgtttacagcgaggacgaacagaggaacttggcccttgatcttgtcctgcccagaggattgaacggtttcacctgggcctcaagcacagcgtctcaccccaggaactag

SEQ ID NO: 316202 - DNA, 1188 bp, Artificial Sequence
  derived and/or modified sequence
atgtggttaccaagggtcagtagcaccgccgtcaccgctctgttactcgcccagacattcttattacttttcctcgtctcccgccctggtccctcaagccctgctggcggtgaggctagggtgcatgtactggtgctcagtagctggagaagcggctcaagcttcgttggccagttgtttaaccagcacccagatgtattctatttgatggagccggcttggcacgtgtggacgaccctcagtcagggcagcgccgcaaccctgcacatggccgtgcgggacctggttaggagcgtgtttctctgcgacatggacgtgtttgatgcgtacttgccatggaggaggaatctatctgatctattccagtgggcggtgagtcgcgctctttgttccccccctgcatgctccgctttcccccgtggtgccatctccagcgaggctgtttgcaagccactctgtgctagacagtctttcacattggcacgcgaggcgtgtcggtcatatagtcatgtcgtcctaaaggaggttcgattttttaacctccaagtgctgtacccactgctttctgatccggctctaaatctgaggatagttcacctagtaagggatccccgtgccgtgctgaggtcccgagaacaaaccgccaaggcacttgccagagacaacggtattgttctgggcaccaacggaacatgggtcgaagctgatcctggactccgcgtcgtgagggaggtgtgccgttcccatgtgcgtatagcagaggccgcaacactcaagccacccccattcctgcgaggacgctaccggcttgtgcggtttgaggaccttgctcgggaacctctcgcggagatcagggctctctatgctttcacaggcctatctctgacgccacaactggaagcctggattcataacataacccatggaagcggtcctggggctcgcagggaagcattcaagacaagcagccgtaacgccctaaacgtgtcccaggcctggcgccacgcactcccctttgcaaagattagaagggtacaagaactatgcgcaggagcactccagctgcttggctaccgtccggtgtattctgaagatgaacagaggaaccttgcgttagatctagtcctgccacggggtctgaatggatttacctgggcatcatccacagccagccacccgagaaactag

SEQ ID NO: 316203 - DNA, 1188 bp, Artificial Sequence
  derived and/or modified sequence
atgtggctgccgcgagtctcctccaccgcagtcaccgcattgctccttgctcaaacctttctgctgctgttcctagtgagccgcccaggaccttccagccccgcaggtggagaagcccgtgttcacgtgctggttttgtcctcctggcgctcgggctcatcttttgtcggtcagctttttaaccagcatcccgacgtcttctatcttatggaaccggcatggcacgtctggacaaccctgtcacaggggagcgccgctaccctccatatggcagttagagatctggttagaagcgttttcctgtgcgatatggacgtctttgacgcttacttgccgtggaggcggaatctgtctgatctatttcagtgggcagtttcacgggctctgtgttcacctccggcttgctccgcctttcctagaggggctatttcctccgaggctgtctgcaagcctctctgtgcaagacaaagctttactctggcacgggaggcctgtcgcagttacagtcacgtcgtgctgaaagaagtccggttctttaatttgcaggtactgtatcctctgctgtccgacccagccttgaacctgaggatcgttcacctggtgagggacccgagggctgtgctcaggtctcgggagcaaaccgccaaagcactggcccgagataatggaatcgttcttggtactaatggcacctgggtagaagcagatccaggcctgcgcgtggtgcgagaagtgtgccgtagccacgtccgcatcgctgaggccgctaccctcaagcctcctccctttctgcggggtcgctataggctggtccggttcgaggatctggcgagggaaccgctagcagagattagagccctctatgctttcacaggtttgagtcttaccccccagctcgaagcatggatacataacattactcacggcagcggtcccggtgccagaagggaggccttcaaaacctcatctagaaacgctctgaacgtgtctcaggcctggcgccacgctctgcctttcgccaagattcggagggtgcaagagctttgcgccggtgctctacagctgctggggtacaggcctgtctatagcgaggacgaacagcgaaacctggccctggatctcgtgttgcccaggggcctgaacggattcacctgggcctcgagcaccgcctcccacccccgaaactag

SEQ ID NO: 316204 - DNA, 6885 bp, Artificial Sequence
  derived and/or modified sequence
gacgacgtttgggagcctttgctgagtccagggagagaggcgtcccccaccgtgccgctgcagctcgggcagagccgccaagctttggggtgctgaggaacctctaatcatctcccatggatttgtgatcagcgttgcagctctcccagcagccctggacagtggcccccagcagtcagcatgtggctgccgcgcgtctccagcacagcagtgaccgcgctcctcctggcgcagaccttcctcctcctctttctggtttcccggccagggccctcgtccccagcaggcggcgaggcgcgcgtgcatgtgctggtgctgtcctcgtggcgctcgggctcgtccttcgtgggccaactcttcaaccagcaccccgacgtcttctacctaatggagcccgcgtggcacgtgtggaccaccctgtcgcagggcagcgccgcaacgctgcacatggctgtgcgcgacctggtgcgctccgtcttcctgtgcgacatggacgtgtttgatgcctatctgccttggcgccgcaacctgtccgacctcttccagtgggccgtgagccgtgcactgtgctcgccacccgcctgcagtgcctttccccgaggcgccatcagcagcgaggccgtgtgcaagccactgtgcgcgcggcagtccttcaccctggcccgggaggcctgccgctcctacagccacgtggtgctcaaggaggtgcgcttcttcaacctgcaggtgctctacccgctgctcagcgaccccgcgctcaacctacgcatcgtgcacctggtgcgcgacccgcgggccgtgctgcgctcccgggagcagacagccaaggctctggcgcgtgacaacggcatcgtgctgggcaccaacggcacgtgggtggaggccgaccccggcctgcgcgtggtgcgcgaggtgtgccgtagccacgtacgcatcgccgaggccgccacactcaagccgccaccctttctgcgcggccgctaccgcctggtgcgcttcgaggacctggcgcgggagccgctggcagaaatccgtgcgctctacgccttcactgggctcagtctcacgccacagctcgaggcctggatccataacatcacccacggatctggacctggtgcgcgccgcgaagccttcaagacttcgtccaggaatgcgctcaacgtctcccaggcctggcgccatgcgctgccctttgccaagatccgccgcgtgcaggaactgtgcgctggtgcgctgcagctgctgggctaccggcctgtgtactctgaggacgagcagcgcaacctcgcccttgatctggtgctgccacgaggcctgaacggcttcacttgggcatcatccaccgcctcgcacccccgaaattagtggaggccacagttgtagcaggcgctaggcccgggaggagagtgcatggtgcagagggggctggggcgcacggagaagcaggtccctatattgaccaaggagtttgtggtacgacccctccccctccccaagtaggcaaggactgcacgtttctttctctcttgattcttggttttcctttgagtcctctggagctgccttctcatcaggtgcactcttcatggaaagcaactcttgcccctcctcctctgggcacagggtgtgcgttcagatgacttggctcctactcaagggctttcttcccctttaactctctccttctggtgacacatcctgcagcagctgagggggtgccctggcactggctgggagtggagaggcactgtggtgaaatggctccagaggtctgtacatcacatacatatgcacacaggcacacatggcaaaactcggaagtgaaaggacttgtctgaaatcacatggtgagaaggaggatgaagggaggagagagcttttgctctgggtctccagtggataggagaggacctgcctcctgggtgagaagggtcagattttcctattttaattgctttagggaagagcaagcagagtcatgaccagggacacagctgagagatagaggaggctgtgaatgctgagaccagagtttatcatgctggacaagcctggaaggaggcaataagtgggaaaggtaggaggagagaaggctggggagggctgggcagcaagccaggcacagtgagtggcagagcaagagggggaaagcaggatcagtgcctggaaggcaggtgtgcccgtcagcggggagtggaactcatcaggcttgccaagaggttggaagggaaatggctctgggctggaactgtcttcccttggtccttctggtccaggccttggaggaaagcagaggatgatccctgcctgtgagccacacctcctagctctgggggcaaaggggcttagtaaaggaatgctggatgtgtagagggtttagtcccgagctcaggaaatgagagcctataagtgcccagtacatgtttaaaagaagagctcatggaacctctggaaaggacagggaagttgagttagccacataaatgaacccaagtcacattggaacacagagctggtctgggaactgtgttggctgccaacagaacttctgaccctgttacctgtgaaatgaggcagtttccctcacgttgccatcagctaccaggagcgatgctggtggtcactagcttctgatcctcatcctgggtgtggccacagattgggggaacctggattgtggagtcacatcctccctgcaaagcaagcagggcaagggagatctggcattttctgctttacgtggagggagaacaggcacattagccttgaagctgaagctcattttaggttccttccaggtttagaagcttcaaccaaatgaaacttgaatctgtccctcgtgacaattataggaggaaggtatttaaaaccccagatttatgaatgtgtactacatggcttagagaatgtctttgttcttgttcaggtggttataacaaaataccttaagagtgggtaacttggctggatgcagtggctcatgcctgtaatcccagcactgtgggaggccgagggggatgaatcacctgaggtcaggcattcaagaacagcctggccaacatggcgaagcccctcctctactaaaaatacaaaattagcgaggcatggtcgcacatacctgtaatcccagctcctcgggaagctgaggcaggagaatcgcttgaacccaggaggcggaggttgcagtgagccaagatcacgccattgcactccagcctgggtgacagagcaagactccatctcaaaaaaaaaaaaaagactgggtaacttataaacaaatgttcttctcacaagtctggagactgggaagtccaagatcaagccaccagtgctgtctgatgagggcccactttttcaaagacagtgccttctagctgtgtcctcttatcgtagaagatgggagacagctctccagggccatttttttttttttttttttttttttgagatggagtctggctctgtcgcccaggctggagtgcagtggcacaatctcggctcactgcaacctctgcctctctctgcctcctgagttcaagcaattctcctgcctcagcctcctgaggagctgggactacagggatgcaccaccatgcccagctaatttttgtatttttgtagacactgggtttcaccatattggccaggttggtctcaaactcctgacctcaagtgatctgcccacctcagcctcccaaagtgctgagattacaggcatgagccactgtacccagtctccagggccttttaaagaatgtcactaatcccattcttgaggtctccaccttcattatctaatcacctcccaaaggctccacatcccaacaccatcatattgtgggttaagatttcaaccacaagccaggcgtggtggctcatgcctgtaatcccagcattttggaaggctgaggcaggtggatcacttgaggtcaggagtttgagaccagcctggccaacatggtgaaaccccatctctactaaaaataaaaaaaattagccgggtgtggtggtgcacacctgtaattccagctactcaggaggctgaggcaggagaatcccttgaatccaggaggcggacagtgcagtgagccgagataatgccactgcactccagcctggatgacagagcaagactccatctcatgcccagccagcatgcccaacaagcttcatttgcccctgtttaggtcacaaattttattgatggctgcaattaatggcctcttggtatccaagtcctttgttgtatgacccatccattctcccctgactcccaaggtgtcaggacatgcttgactggctcctgaatttgctctctgcgcatgggcagtacagtcaagcctcacagtgaacccaggtcagctttcaggacaaagaaagtggcctggctgactaggcacagtaaagccagggctgggtaggtacatacttgtgctgatcacgtatgtcttatatctctgtgagagtgcagtcccaacaggaaggtttaatcactggggactgcccaatgctgtgacagggcacagagctctgggttgctgtgggggtgactgcattgaccactgttagtggtttgctgtgttgacactctgtgctgtgtgaccatggctcctgccatcaagaagtagagtctgtttctccacctctgaatccaggctggtcctgtgacttgctttgtcctgtagacaagtgtagtgcaacttcctgtgagccagtttgaagcataggccttggaagcaaaactttacctccacctgtcttaggttttcagctggggctctgctgtgatttgattgtgtctcccaaagttggaaccttgatccccagtgttgtgaggtgaggcttgatggaaagtaaattacgccgtgcgggttatgcccttgtgaatgggtagagaacattatttctgggcgcaggcatggtagctcatgtctgtaatcccagcattttgggaggttgaggtgtgcggattacttgaggtcaggagtttgagaccagcctggccaacaaggtaaaacaccatttctagttaaaatacaaaaattagccaggtgtggtggcacatgcctgtaaggccagctacttgggaggctgagacaggagaatcgcttgaacccaggaggcagagattgcagtgagctgagatcgcaccactgtactccagcctgggcaacaaagcgagagtctgtcttaaaaaaaaccaccattatttcaggagtgagttggttatcctgagagtggtgccttttaaatgaaggagttcattctttgtctttctctcgccctcactttgcccttctgccatatgatgccttccatcatgctaggacacagcaagaaggctctcgctagatgctggctccttgatcttgggcttcccagcctccagaactgtaagccaatacacttctatttattatatatgacccttgctgggttcagtggctcacgcctgtaatcccaatactttgcaaggctgaggcaggaggatcacttgagaccaggcactcaagaccagcctgggcaacatagtgagaccccatctctacaaagttaaaaaaaaattagcagggcatggtgtcgtgcacctgtagtcctagctacttgggaggctgagttgggaggactgcttgaccctgggaggttgaggctacattgaaccatgatcatgccagtgcactccagcctgagtgacagagcaagacacctatctctaaataaatgaccccatctgtggtattgttatagcaaaacaaaacagattaagagagactttttaatgaaaagacagattcacaaagaaaaacaatgtttttgtttctgtttttttgaggcagagtcttgctcttgtcccccaggctggagtgcagtggcgccatcttggctcactgcaacctccgcctcccagtttcaagcgattctcctgcctcagcctcccgagtagctgggattacagatgtacaccaccacgcccggctaattttttttgtatttttagtagagatggggtttcaccatgtcgatcaggctgggctggaactcctgacctcaggtgatccacctgccttggcctcccaatgtgctaggattacaggcatgagccactgtacctggcgaaaaacagtttgttaacacaggcagccaacatcactcaggataagcctcaatgaaaagtaacaaagtgatggcttggaacactgtcttacacagcatttttaaaaaatacaataaatttgtagagataggatgaccaaggacaacagttttaggcttccaaaggtggtaaactatgggatggtaaatatccgagaggaagctgatgcaacaggatttgtctgcagcagcctctggtaccacctctgagtcaagggttgtgtccagtgatggagagtttatatcgtgcctttaggcagaaaaggggagggaaacctgaacttttcctgcactttctgcttcttaattgccttcagctgaaaatcattttttatgtgaaaaaggcatagtctgagctgacgcctctgctttcctccacctgaagagaacctgcgtgctgctcctttgcttcggacctccgcctctgcccgggagaaagcccaggccagcctgctggacaagcagagaccatgagaaggagagttcaggggtcccaaaccaggccatcctagaccagccagctccagctgatccgcacgcagccacttcggctaccttctactggccaaagggagtcccagggctcacccagattcagaggtggggaaactgagtccaccacttgagaagagtagctataaagacatatgagcgaggccagctgagcccagcactgcggccaagtcgaagactttaggagcaataaaagtgcttattgtgtttcagtca

SEQ ID NO: 316205 - DNA, 2093 bp, Artificial Sequence
  derived and/or modified sequence
caccgggcagcgccgagggttgccggccggcgcgcggggagtagagggcgcgggccgcagtgccgggttccagagggagctctgcgccgggtccttccctgtggtagccccaggacacccccagcctcaacatcccattctgggactcctgccctgttcccacattcgttctacctcgagtctccaggagcttccagtggcttggtcaccgccaactctcgtccatgcctcttagagcccctttcccggcctcaccgggtgtcgcttaatagtcttgggaccttaaggagcaagtcagcccctgcggaccctcccagtgaagagaaagagctggctgtgcggtggaatttggaagagacgacgtttgggagcctttgctgagtccagggagagaggcgtcccccaccgtgccgctgcagctcgggcagagccgccaagctttgggttctctagggtgtgtacccaggagtggatctgctgtatcatatggtcactctattcaacctttcgagaaaccaccaaattgtttcttcaggaaatgcaccatctgacatccccattttatgaggatccccacgtctctgtcatctcaccaacacttgtgctgaggaacctctaatcatctcccatggatttgtgatcagcgttgcagctctcccagcagccctggacagtggcccccagcagtcagcatgtggctgccgcgcgtctccagcacagcagtgaccgcgctcctcctggcgcagaccttcctcctcctctttctggtttcccggccagggccctcgtccccagcaggcggcgaggcgcgcgtgcatgtgctggtgctgtcctcgtggcgctcgggctcgtccttcgtgggccaactcttcaaccagcaccccgacgtcttctacctaatggagcccgcgtggcacgtgtggaccaccctgtcgcagggcagcgccgcaacgctgcacatggctgtgcgcgacctggtgcgctccgtcttcctgtgcgacatggacgtgtttgatgcctatctgccttggcgccgcaacctgtccgacctcttccagtgggccgtgagccgtgcactgtgctcgccacccgcctgcagtgcctttccccgaggcgccatcagcagcgaggccgtgtgcaagccactgtgcgcgcggcagtccttcaccctggcccgggaggcctgccgctcctacagccacgtggtgctcaaggaggtgcgcttcttcaacctgcaggtgctctacccgctgctcagcgaccccgcgctcaacctacgcatcgtgcacctggtgcgcgacccgcgggccgtgctgcgctcccgggagcagacagccaaggctctggcgcgtgacaacggcatcgtgctgggcaccaacggcacgtgggtggaggccgaccccggcctgcgcgtggtgcgcgaggtgtgccgtagccacgtacgcatcgccgaggccgccacactcaagccgccaccctttctgcgcggccgctaccgcctggtgcgcttcgaggacctggcgcgggagccgctggcagaaatccgtgcgctctacgccttcactgggctcagtctcacgccacagctcgaggcctggatccataacatcacccacggatctggacctggtgcgcgccgcgaagccttcaagacttcgtccaggaatgcgctcaacgtctcccaggcctggcgccatgcgctgccctttgccaagatccgccgcgtgcaggaactgtgcgctggtgcgctgcagctgctgggctaccggcctgtgtactctgaggacgagcagcgcaacctcgcccttgatctggtgctgccacgaggcctgaacggcttcacttgggcatcatccaccgcctcgcacccccgaaattagtggaggccacagttgtagcaggcgctaggcccgggaggagagtgcatggtgcagagggggctggggcgcacggagaagcaggtccctatattgaccaaggagtttgtggtacgacccctccccctccccaagtaggcaaggactgcacgtttctttctctcttgattcttggttttcctttgagtcctctggagctgccttctcatcaggtgc

SEQ ID NO: 316206 - DNA, 1188 bp, Artificial Sequence
  derived and/or modified sequence
atgtggctgcccagagtgagcagcaccgccgtgaccgccctgctgctggcccagaccttcctgctgctgttcctggtgagcagacccggccccagcagccccgccggcggcgaggccagagtgcacgtgctggtgctgagcagctggagaagcggcagcagcttcgtgggccagctgttcaaccagcaccccgacgtgttctacctgatggagcccgcctggcacgtgtggaccaccctgagccagggcagcgccgccaccctgcacatggccgtgagagacctggtgagaagcgtgttcctgtgcgacatggacgtgttcgacgcctacctgccctggagaagaaacctgagcgacctgttccagtgggccgtgagcagagccctgtgcagcccccccgcctgcagcgccttccccagaggcgccatcagcagcgaggccgtgtgcaagcccctgtgcgccagacagagcttcaccctggccagagaggcctgcagaagctacagccacgtggtgctgaaggaggtgagattcttcaacctgcaggtgctgtaccccctgctgagcgaccccgccctgaacctgagaatcgtgcacctggtgagagaccccagagccgtgctgagaagcagagagcagaccgccaaggccctggccagagacaacggcatcgtgctgggcaccaacggcacctgggtggaggccgaccccggcctgagagtggtgagagaggtgtgcagaagccacgtgagaatcgccgaggccgccaccctgaagcccccccccttcctgagaggcagatacagactggtgagattcgaggacctggccagagagcccctggccgagatcagagccctgtacgccttcaccggcctgagcctgaccccccagctggaggcctggatccacaacatcacccacggcagcggccccggcgccagaagagaggccttcaagaccagcagcagaaacgccctgaacgtgagccaggcctggagacacgccctgcccttcgccaagatcagaagagtgcaggagctgtgcgccggcgccctgcagctgctgggctacagacccgtgtacagcgaggacgagcagagaaacctggccctggacctggtgctgcccagaggcctgaacggcttcacctgggccagcagcaccgccagccaccccagaaactag

SEQ ID NO: 316207 - DNA, 417 bp, Artificial Sequence
  derived and/or modified sequence
atgggcgagcaggccgacggcaaggacagcatcgccagacaggtggcccccgagagccactggcccgagctgagagtgctgatcctggtggtgagcgccgagaagaagctgaccggcagcaccgtgggcatgagagccagcgtggagaccagccccctgctgagattcagagccgagagcgtggtgcccgcccacggcggcgacggccccctgcaccccggcgccagactgccccagctgagacccgccgaccacgagggccagcagcccgtgcccagacacctgcccagacacctgccccccagcctgaccagcatgcccagccccggcgccagcagcacctggtgcaccgccagcacccccaccaccggcacccccagatggagaacccccctgaccagagcccccatgccctag

SEQ ID NO: 316208 - DNA, 417 bp, Artificial Sequence
  derived and/or modified sequence
atgggtgaacaggctgacggcaaggattcaatcgccaggcaggtggcacctgagtcccactggccagagcttcgggtccttatactcgtcgtgtctgctgagaagaaattgaccggcagcacagtggggatgagagcgtcagttgagacgtcccccctgttgaggtttcgggcagagtctgtggtgccggcacatgggggggacgggcctttgcaccccggagcccgtttgccacaactgcgccccgcagatcatgaggggcagcagccggtgccccgacacctaccccggcatcttccaccctcactgacttccatgccctcaccaggcgcatccagtacttggtgcaccgcatccacacctacgacagggacccccagatggcggactcctctgactcgcgcacccatgccttag

SEQ ID NO: 316209 - DNA, 417 bp, Artificial Sequence
  derived and/or modified sequence
atgggagagcaggctgatggcaaggacagcatcgcccggcaggtggcccctgagagccactggccagagctgcgggtgctgatcctggtggtgtctgctgagaagaagctgaccggcagcacagtgggcatgagggcctctgtggagaccagccccctgctgcgcttccgggcagagagcgtggtgcctgcccatggaggagatggccccctgcaccctggggcccggctgccccagctgcggcctgctgaccacgagggccagcagcctgtgcccaggcacctgcccaggcacctgccccccagcctgacctccatgcccagccctggggccagcagcacctggtgcacagccagcacccccaccaccggcaccccccgctggaggacccccctgacccgggcccccatgccctag

SEQ ID NO: 316210 - DNA, 417 bp, Artificial Sequence
  derived and/or modified sequence
atgggcgagcaggccgacggcaaggacagcatcgcccggcaggtggcacccgaatctcactggcccgagctccgcgttcttatattggtcgtgagcgcagagaagaaacttactggatccacagtgggcatgagagctagcgtggaaacttccccactgcttagatttagggcggagtccgtggtgcctgcccacggaggagatgggcctctgcacccgggagcccgtttacctcagctcagacctgctgaccatgaaggccaacagccagtccccaggcaccttccccggcatctgcctccatccctaacgagtatgcctagccccggcgcttcgtctacttggtgtaccgcctctactcctaccacaggcaccccccgatggagaacacctctgactcgtgcccctatgccctag

SEQ ID NO: 316211 - DNA, 417 bp, Artificial Sequence
  derived and/or modified sequence
atgggagagcaagcagatggcaaggactctattgctagacaagtcgccccagagtcgcactggcccgaactccgcgtccttatcctagtggtgagcgcagaaaagaagctgactggatcaactgtcggaatgagagccagtgtggagacctctcccctcctgcgcttccgcgctgagagcgtggtccccgcacacggcggtgacggacccctacaccccggtgccaggttgccccagctccgacccgcagatcatgagggacagcagcccgtcccccgacacttaccaagacacttgcctccttcactgacttccatgccttcgcctggagcctcctcaacgtggtgtacagcgagtactcctactactggcacgccccgttggcgcacacctctaactagggctccaatgccctag

SEQ ID NO: 316212 - DNA, 907 bp, Artificial Sequence
  derived and/or modified sequence
agatctgaaatctcattttctgtgtggctgtgtgtttgggacaggggtaaccaattcctgactactctatatgctgcatagaacctggagaggatttttcaaagtaaatgaatctcgaaagctggattgcagagcaaacgagtgcagtcaattcagccaggggcttgcaagaggagaaagagaaaaagactgtggaatggaaagtttcccaacccaagcctttcccaaggggtagccattctctgttctacagtttagggcttgcatgtgctttttctggagtccaaaaatacataagttataaccaatttaacagacagaaaggcgcacagaggaatttaaagtgtgggctggggggcgaggcggtgggcgggaggcgagcgggcgcaggcggaacaccgttttccaagctaagccgccgcaaataaaaaggcgtaaagggagagaagttggtgctcaacgtgagccaggagcagcgtcccggctcctcccctgctcattttaaaagcacttcttcttgtattgtttttaaggtgagaaataggaaagaaaacgccggcttgtgcgctcgctgcctgcctctctggctgtctgcttttgcagggctgctgggagtttttaagctctgtgagaatcctgggagttggtgatgtcagactagttgggtcatttgaaggttagcagcccgggtagggttcaccgaaagttcactcgcatatattaggcaattcaatctttcattctgtgtgacagaagtagtaggaagtgagctgttcagaggcaggagggtctattctttgccaaaggggggaccagaattcccccatgcgagctgtttgaggactgggatgccgagaacgcgagcgatccgagcagggtttgtctgggcaccgtcggggtaggatcc

SEQ ID NO: 316213 - DNA, 231 bp, Artificial Sequence
  derived and/or modified sequence
atgattgctggggagcaccggctggaccctgccaccatcagcctgggcgtggaccagacagatgaccaccagcagcccacccacagccgcatcaggaagaagagggtgagccccacctctgtgtggttccagccctacttctgcatcctgaagaccctgtgcaccaccctggacacagtgcaggatgatgccaccagctcctggatgctgatctgccacgtggacttctag

SEQ ID NO: 316214 - protein, 240 aa, Artificial Sequence
  derived and/or modified sequence
MDVHGEAAGEAGQEGGEGLQGGAGQSEEGPSAEKCRVCPCVCRERHPQEERRCELASDGVPRRRSGLQGADSCDYEGGDQEYGPGDQSPGQGPEHHGPAEGLLSDGQVRAAGAEPGRPYIGDGGLHELGHHPDHAAGAGGQPHHADRRGEWPGGAGPAQPAARGRLCRGRELCAQPGGPAVTEVGRLEELAVPRRCAPPLPRDVLEGSCPLPTASCLCADPAGLRPAATLRLSPARPAWP

SEQ ID NO: 316215 - DNA, 2483 bp, Artificial Sequence
  derived and/or modified sequence
agcgactcacaaaaggtcctcgcgccagcggcgtgcgtcaccatggcgaccgcgcgccgcgcagccgcgccccgcccctctggcgggaccggccaccatcctctcgcgagagcatcccgtgcgaccggaagtggggcggcgaccccggaagtccccgccgggtgcagcttggtcggttcgatcgccgccgggacctgacaccgcccggagttggcgtcccttctccctctccgagtgctgctcctgtcattgtggccatggacgataccctgttccagttgaagttcacggcgaagcagctggagaagctggccaagaaggcggagaaggactccaaggcggagcaggccaaagtgaagaaggcccttctgcagaaaaatgtagagtgtgcccgtgtgtatgccgagaacgccatccgcaagaagaacgaaggtgtgaactggcttcggatggcgtcccgcgtagacgcagtggcctccaaggtgcagacagctgtgactatgaagggggtgaccaagaatatggcccaggtgaccaaagccctggacaaggccctgagcaccatggacctgcagaaggtctcctcagtgatggacaggttcgagcagcaggtgcagaacctggacgtccatacatcggtgatggaggactccatgagctcggccaccaccctgaccacgccgcaggagcaggtggacagcctcatcatgcagatcgccgaggagaatggcctggaggtgctggaccagctcagccagctgcccgagggcgcctctgccgtgggcgagagctctgtgcgcagccaggaggaccagctgtcacggaggttggccgccttgaggaactagccgtgccccgccggtgtgcaccgcctctgccccgtgatgtgctggaaggctcctgtcctctccccaccgcgtcttgcctttgtgctgaccccgcggggctgcggccggcagccactctgcgtctctcacctgccaggcctgcgtggccttagggttgttcctgttcttttaggttgggcggtgggtctgtgtcctggtgttgagtttctgcaaatttctgggggtgatttctgtgactctgggcccacagcggggaggccaagaggggccctgtggactttcacccagcactgtgggggccttcagactctggggcagcagacatgctgcttcccatcagccagagggggtcagggctgccctgttgccaaacaactccctgaggcctctccgcaccacctcagcgggcaggaggtcccaccatgtggacagacatagcccaaggaggcaccacaggtctatgtgtgctgggggatgtcaggtgccacccaacgctgtcctggtggtatttacaatgacatcctcctcctccatcactccaggggtggtgtctcggccgcccctaccagctggctgagccccctggcctcctgcgctccctcacttccctcagttcccaaagctgcccagtccatggggacagaaccgtcactcagatccacattcaagtgtgcccaccctgcagtcttcatcctcactcagctgctgcctctggaggtgcctttggccacatgtgctgtgctgtttgtctcctcgacagggagcctgtccaccagcaggctgcggtcccagcgggtgcgtctgcagctcctccccttgggcagcctggttctcccggaggacctttccttggggccctgcttcatgacgatgctgcctgtgtcaccctctaccatctgtaaacaactgggtgccttccccgaccacaccccaatgccttcccagcttggaagccaaggcagctgatgaagggagctcaggagagccgtcttcagctgggctggggttggggctgctgtgaggaaaacctgccattgtggccctggagagtcaccagcagctcttgggaaggacttgctgggaggctgagagaggctttgggcacagcctgctgtcttttccatttcctaaagtttacttcattgtcttgaggcttccaggttttgtttttgtttttgccaaagtagaaaaggcaggtggtgggcggctggcagggagtgcgggtccccgcccctcttcagtcctgccctcccctcctcagtcctgcccaccccgtgcagcccatgctgaggctgcagtggtgtcgtgggtgttacgtgcaggaacgtggagaccctgacgtgggctcactgcgtttggttttcttttcagaacttgggagcccccagggaggggctagtgttggtaggtcctagacgtggttccctccagcctccccaaaatcaaccctggtgttgagagaacgtccttctgtccatcgtgggtaacagccttggggagggtgcagagctctgcagagccatgggccaggtggggctgcctcagtcctgtccccttgggcactgaggagaggggcccattcacctttctcctagaatgctgttgtaaataaacaaatggatccctggaaacttt

SEQ ID NO: 316216 - protein, 36 aa, Artificial Sequence
  derived and/or modified sequence
MAALRYAGLDDTDSEDELPPGWEERTTKDGWVYYAK

SEQ ID NO: 316217 - protein, 311 aa, Artificial Sequence
  derived and/or modified sequence
MAALRYAGLDDTDSEDELPPGWEERTTKDGWVYYANHTEEKTQWEHPKTGKRKRVAGDLPYGWEQETDENGQVFFVDHINKRTTYLDPRLAFTVDDNPTKPTTRQRYDGSTTAMEILQGRDFTGKVVVVTGANSGIATGSCHHRVLCCCPRTGGSGRDVLQQLLPLHALTRSSERRDGPDPVGAQREADPRTAWQPVRLSGAQSGWAHTPALCVSPHASARAGPLPNVPPTQIRKSKGNKSSHNRVKNLKYQWEAGNSWGKVSLFWGWARHRSLCFLVVACLKVKTCLVCRFRISLEKHQQFSFFYCYRIA

SEQ ID NO: 316218 - protein, 234 aa, Artificial Sequence
  derived and/or modified sequence
MAALRYAGLDDTDSEDELPPGWEERTTKDGWVYYANHTEEKTQWEHPKTGKRKRVAGDLPYGWEQETDENGQVFFVDHINKRTTYLDPRLAFTVDDNPTKPTTRQRYDGSTTAMEILQGRDFTGKVVVVTGANSGIGFETAKSFALHGAHVILACRNMARASEAVSRILEEWQQGAATTVYCAAVPELEGLGGMYFNNCCRCMPSPEAQSEETARTLWALSERLIQERLGSQSG

SEQ ID NO: 316219 - protein, 364 aa, Artificial Sequence
  derived and/or modified sequence
MARASEAVSRILEEWHKAKVEAMTLDLALLRSVQHFAEAFKAKNVPLHVLVCNAATFALPWSLTKDGLETTFQVNHLGHFYLVQLLRMFCAAQLLPVSLWSPQSPIDLQILTTPWENWTSVASLQQKTTIGRCWLITGPSSATSSSPTSCTVAPTRGHVERSASWKYDVLQHSSQLVGVHTAVYLGEAFHQVHATGSCHHRVLCCCPRTGGSGRDVLQQLLPLHALTRSSERRDGPDPVGSERLIQERLASPAKWSSERMGTHTRPVCVPSRKCQGPLPNVPPTQIRKSKGNKSSHNRVKNLKYQWEAGNSWGKVSLFWGWARHRSLCFLVVACLKVKTCLVCRFRISLEKHQQFSFFYCYRIA

SEQ ID NO: 316220 - protein, 213 aa, Artificial Sequence
  derived and/or modified sequence
MAALRYAGLDDTDSEDELPPGWEERTTKDGWVYYANHTEEKTQWEHPKTGKRKRVAGDLPYGWEQETDENGQVFFVDHINKRTTYLDPRLAFTVDDNPTKPTTRQRYDGSTTAMEILQGRDFTGKVVVVTGANSGIGKASCHVGRILKHTRVEELSLLPTAINRELPPPCTVLLSQNWRVWEGCTSTTAAAACPHQKLRAKRRPGPCGRSARG

SEQ ID NO: 316221 - DNA, 1230 bp, Artificial Sequence
  derived and/or modified sequence
atgaccctgagcagaggcaaggtggacttcgccaccatccagtgcggccagtgcctgatggagaccatccagctgagcaaccacctgcaggtgccctgcgagtggttcgtgcagagccagaagcccgtggacaagctggagaagcacatgcccaagtacctgagacagaagctgagagccgagctgaagcccaagaccagaatcttcgagatccagcccatcagcggcgtgctggaccccggcgagaagagcaacgtgcaggtgaagttcatgcccaaggaggagaagttctacagccagaccctggtgttccagatcgcccagagcgcccagaagctgaccctgctggccagaggccagggcctggagcccagactggagttcagccccagcgtgctggacctgggccccctgctgctgtgcgcccccggcgacgaggccgaggtgatcgtgaagaacccctgcaacttccccatcgagttctacagcctggagttcgaccagcagtacctgatcgaggagaagatcctgagaaagctgaagggctacgacagctacaacaccctgctgctgccccccagaaaccccggcgagaagctgccccccgagctgtacgagtacttcaaggagatcaagaagagcaaggaggagcagatgagagccaagtacctggagaacctggcccaggagaacgaggaggaggacatcaccagcagcgaccagggcaccagcaacagcaccaagagaaccagcctgagcagaggcatcagcgtgaccagcaacctggaggagtggcacgccctgctggtggagagcaagacctacctggaggaggaggaggacgaggagagcctggagaagatcatcttccagaccgacaagctgcagagcatcgacagccacagcatggaggaggtgggcgaggtggagaacaaccccgtgagcaaggccatcgccagacacctgggcatcgacatcagcgccgagggcagactggccaagaacagaaagggcatcgccatcatcatccacggcacccccctgagcggcaagagcgccaacgccgtgagcgtggccaagtactacaacgccgcctgcctgagcatcgacagcatcgtgctggaggccgtggccaacagcaacaacatccccggcatcagagcctgcgagctgtgcatcagagccgccatcgagcagagcatgaaggagggcgaggaggccgccgagtag

SEQ ID NO: 316222 - DNA, 1230 bp, Artificial Sequence
  derived and/or modified sequence
atgaccctgagcaggggcaaggtcgatttcgccaccatccagtgtgggcagtgcttaatggagacaatccagctgtccaatcatctgcaggtcccctgcgaatggtttgtccaaagtcagaaaccagtggacaaactcgagaaacacatgcccaagtatctccgacaaaaactccgtgccgagttgaagcccaagactcggatatttgagattcagcctatatcaggcgtgttagaccctggtgaaaagagcaatgtacaggttaaatttatgcccaaagaagagaagttctactcccagaccctggtctttcagattgcccagagcgctcagaagttgactctgctggcccgagggcagggcttggagcctagattggaattctccccgtccgtgctggaccttggccccctgctcttgtgtgcccctggcgacgaggcagaggtgattgtgaagaacccctgtaatttccctatagagttctactccctcgaatttgaccagcagtacctgatcgaagagaagatcctccggaaactcaagggctacgacagttataacactttacttcttcctccacgtaatcccggagaaaaattgccaccagagctctacgagtacttcaaagaaatcaaaaaaagcaaagaggagcagatgcgagcgaagtacctggagaatctggcgcaagaaaatgaagaggaggatattacgtcatcggatcagggcacgagtaacagcactaagaggactagcctcagcagaggcattagcgtgacatccaatctcgaggagtggcacgcccttctcgtcgaaagtaaaacatatctcgaagaagaagaagatgaggagagccttgagaaaattatttttcagactgataagctacagagcatcgacagccacagtatggaggaggtaggcgaggtggaaaacaaccctgtgtccaaagccattgctagacatttgggtatagatatctcggccgaaggaaggctcgcaaagaatcgcaaaggtattgccatcatcatacacggcacacccttatcgggcaaaagcgctaatgccgtttctgtggctaagtattataatgccgcgtgtctctccattgattccattgtgctcgaagctgtcgcaaactccaacaatattcccggaatccgcgcctgtgagctgtgtatccgcgctgccatagagcagtccatgaaggagggtgaggaggcggcagagtag

SEQ ID NO: 316223 - DNA, 1230 bp, Artificial Sequence
  derived and/or modified sequence
atgaccctgagccggggcaaggtggactttgccaccatccagtgtggccagtgcctgatggagaccatccagctgagcaaccacctgcaggtgccctgtgagtggtttgtgcagagccagaagcctgtggacaagctggagaagcacatgcccaagtacctgcggcagaagctgcgggcagagctgaagcccaagacccgcatctttgagatccagcccatctctggagtgctggaccccggggagaagagcaatgtgcaggtgaagttcatgcccaaggaggagaagttctacagccagaccctggtgttccagatcgcccagagcgcccagaagctgaccctgctggcccggggccagggcctggagccccggctggagttcagccccagcgtgctggacctgggccccctgctgctgtgtgcccctggagatgaagctgaggtgattgtgaagaacccctgcaacttccccatcgagttctacagcctggagtttgaccagcagtacctgattgaggagaagatcctgaggaagctgaagggctatgacagctacaacaccctgctgctgccccccaggaaccctggagagaagctgcccccagagctgtatgagtacttcaaggagatcaagaagagcaaggaggagcagatgagggccaagtacctggagaacctggcccaggagaatgaggaggaggacatcaccagcagtgaccagggcaccagcaacagcaccaagaggaccagcctgagccggggcatctctgtgaccagcaacctggaggagtggcacgccctgctggtggagagcaagacctacctggaggaggaggaggatgaggagagcctggagaagatcatcttccagacagacaagctgcagagcattgacagccacagcatggaggaggtgggggaggtggagaacaaccctgtgtccaaggccatcgcccggcacctgggcatcgacatctctgctgagggccgcctggccaagaacagaaaaggaattgccatcatcatccacggcacccccctgagcggcaagagcgccaatgctgtgtctgtggccaagtactacaatgctgcctgcctgagcattgacagcatcgtgctggaggccgtggccaacagcaacaacatccctggcatccgggcctgtgagctgtgcatccgggccgccatcgagcagagcatgaaggagggggaggaggccgctgagtag

SEQ ID NO: 316224 - DNA, 1230 bp, Artificial Sequence
  derived and/or modified sequence
atgaccctgagccggggcaaggtggacttcgccaccatccagtgcgggcaatgcctgatggagaccatccagttgtccaatcatcttcaggttccatgcgaatggtttgtgcagtctcagaaacccgttgataagttggagaaacatatgccaaagtacctcagacagaaattgagagcagagttgaaacccaaaacgcgcatcttcgaaatccaacctattagcggagttctcgatcctggcgagaaatctaatgtgcaggttaaatttatgccaaaggaggagaagttttattcacaaactctcgtgttccagattgctcaaagcgcccagaagctgacccttctggcaagaggccagggactggaacccaggctggagttctcaccatctgtcctggacctgggacctcttttgctgtgcgccccaggagacgaggcagaggtgattgtcaaaaatccatgcaactttccgatagagttctatagtctggagttcgatcagcagtatctgatcgaggagaaaatcctcaggaaattgaagggttacgactcttataacacactactcctgcccccaagaaaccctggcgaaaagctcccaccagaactttacgagtactttaaagagattaagaagagcaaggaggagcagatgcgggctaagtatctagagaatctcgcccaagaaaacgaggaggaagacatcactagtagcgaccaaggaacatccaatagcactaagcgaacaagtctcagtcgcgggatcagcgtaacttctaatctggaggaatggcacgcgctcttggtggaaagcaagacttacctggaggaggaagaggacgaggagtccctcgaaaagatcatattccagactgacaaacttcaaagcattgatagccactccatggaagaagttggcgaggtggagaacaacccagtgtccaaggccatcgcgaggcatttgggcatcgatatttccgcggagggcagactagctaaaaatagaaagggaatcgctatcattattcacggcacgccactcagtgggaagtccgccaacgccgtgtccgtggccaagtactacaatgccgcctgtctcagcatcgactctatcgtgctcgaagcagtggcgaacagcaataacatccctggaatccgggcctgtgagctgtgtattcgggccgccatagagcagtctatgaaggaaggcgaggaggcggcagagtag

SEQ ID NO: 316225 - DNA, 1230 bp, Artificial Sequence
  derived and/or modified sequence
atgaccctgtctagaggtaaagtggatttcgccacaatccagtgtggacagtgcctcatggaaacaattcagctgtccaatcacctgcaggtcccttgcgagtggtttgtgcagtcccagaagcccgtggataagctagaaaagcacatgccgaaataccttcgtcaaaagctgcgtgccgagcttaaacctaaaacacggattttcgagatacagccaatcagtggagtgttggatcccggagagaaatcaaacgtgcaggtcaaatttatgcccaaagaagaaaaattttattctcaaacattggtgttccaaattgcccaatccgcccaaaagctcaccctgttagcgagggggcaggggctagagccacgactggagttctcaccttctgtacttgatctggggcctctcctgctgtgtgccccaggggacgaagctgaggtgatcgtgaagaatccttgcaattttccaatcgagttctatagcttggagtttgaccagcagtacttgattgaagaaaaaattctccggaagctgaaaggttatgattcctacaacacactgttattgcctcctagaaatcccggagaaaagttgcccccagagctctacgaatactttaaggagatcaagaaatccaaggaagagcagatgagagctaagtacttggagaatttagcacaggaaaacgaggaggaggacatcaccagctcagatcagggaacctccaacagcactaaaaggacaagcttgagccgaggcatttctgtgacctctaatttagaagagtggcacgccctcctggttgagtctaagacctaccttgaagaagaggaggacgaggagtccctcgagaaaattattttccagactgacaagctccaatctatcgattcccacagcatggaggaggttggagaggtggaaaacaaccccgtgtcaaaagcgatcgcgcgacacctgggcattgacatctccgcggaaggccgactggccaagaatagaaaaggcattgcgattatcatccacggtacacctctgtcggggaaatctgccaacgccgtgtctgttgcaaagtattacaacgccgcatgcctgtcaattgacagtatcgtgcttgaagccgtcgccaacagcaacaacattcctggaattagagcgtgcgaactgtgtatccgcgcagccattgaacagtccatgaaagaaggagaggaagctgccgaatag

SEQ ID NO: 316226 - protein, 950 aa, Artificial Sequence
  derived and/or modified sequence
MESAGGFKLGMEPLSGGGVCEKKKLLKMTSRRLEESMGAVQMGLVNMFKGFQSKVLPPLSPKVVTEEEVNRMLTPSEFLKEMSLTTEQRLAKTRLMCRPQIIELLDMGETTHQKFSGIDLDQALFQPFPSEIIFQNYTPCEVYEVPLILRNNDKIPRLVKVVEESSPYFKVISPKDIGHKVAPGVPSIFRILFTPEENKDYAHTLTCVTEREKFIVPIKARGARAILDFPDKLNFSTCPVKYSTQKILLVRNIGNKNAVFHIKTCRPFSIEPAIGTLNVGESMQLEVEFEPQSVGDHSGRLIVCYDTGEKVFVSLYGAAIDMNIRLDKNSLTIEKTYISLANQRTITIHNRSNIIAHFLWKVFATQQEEDREKYRACDDLIKEEKDETDEFFEECITDPLLREHLSVLSRTFANQRRLVQGDSKLFFNNVFTVEPLEGDVWPNSSAEITVYFNPLEAKLYQQTIYCDILGREIRLPLRIKGEGMGPKIHFNFELLDIGKVFTGSAHCYEAILYNKGSIDALFNMTPPTSALGACFVFSPKEGIIEPSGVQAIQISFSSTILGNFEEEFLVNVNGSPEPVKLTIRGCVIGPTFHFNVPALHFGDVSFGFPHTLICSLNNTSLIPMTYKLRIPGDGLGHKSISYCEQHVDYKRPSWTKEEISSMKPKEFTISPDCGTIRPQGFAAIRVTLCSNTVQKYELALVVDVEGIGEEVLALLITARCVVPALHLVNTEVDFGHCFLKYPYEKTLQLANQDDLPGFYEVQPQVCEEVPTVLFSSPTPSGVISPSSTIHIPLVLETQVTGEHRSTVYISIFGSQDPPLVCHLKSAGEGPVIYVHPNQVDFGNIYVLKDSSRILNLCNQSFIPAFFQAHMAHKKSLWTIEPNEGMVPPETDVQLALTANLNDTLTFKDCVILDIENSSTYRIPVQASGTGSTIVSDKPFAPELNLGAHFR

SEQ ID NO: 316227 - protein, 1017 aa, Artificial Sequence
  derived and/or modified sequence
MTSRRLEESMGAVQMGLVNMFKGFQSKVLPPLSPKVVTEEEVNRMLTPSEFLKEMSLTTEQRLAKTRLMCRPQIIELLDMGETTHQKFSGIDLDQALFQPFPSEIIFQNYTPCEVYEVPLILRNNDKIPRLVKVVEESSPYFKVISPKDIGHKVAPGVPSIFRILFTPEENKDYAHTLTCVTEREKFIVPIKARGARAILDFPDKLNFSTCPVKYSTQKILLVRNIGNKNAVFHIKTCRPFSIEPAIGTLNVGESMQLEVEFEPQSVGDHSGRLIVCYDTGEKVFVSLYGAAIDMNIRLDKNSLTIEKTYISLANQRTITIHNRSNIIAHFLWKVFATQQEEDREKYRACDDLIKEEKDETDEFFEECITDPLLREHLSVLSRTFANQRRLVQGDSKLFFNNVFTVEPLEGDVWPNSSAEITVYFNPLEAKLYQQTIYCDILGREIRLPLRIKGEGMGPKIHFNFELLDIGKVFTGSAHCYEAILYNKGSIDALFNMTPPTSALGACFVFSPKEGIIEPSGVQAIQISFSSTILGNFEEEFLVNVNGSPEPVKLTIRGCVIGPTFHFNVPALHFGDVSFGFPHTLICSLNNTSLIPMTYKLRIPGDGLGHKSISYCEQHVDYKRPSWTKEEISSMKPKEFTISPDCGTIRPQGFAAIRVTLCSNTVQKYELALVVDVEGIGEEVLALLITARCVVPALHLVNTEVDFGHCFLKYPYEKTLQLANQDDLPGFYEVQPQVCEEVPTVLFSSPTPSGVISPSSTIHIPLVLETQVTGEHRSTVYISIFGSQDPPLVCHLKSAGEGPVIYVHPNQVDFGNIYVLKDSSRILNLCNQSFIPAFFQAHMAHKKSLWTIEPNEGMVPPETDVQLALTANLNDTLTFKDCVILDIENSSTYRIPVQASGTGSTIVSDKPFAPELNLGAHFSLDTHYYHFKLINKGRRIQQLFWMNDSFRPQAKLSKKGRVKKGHAHVQPQPSGSQEPRDPQSPVFHLHPASMELYPGQAIDVILEGYSATPRVRG

SEQ ID NO: 316228 - DNA, 3659 bp, Artificial Sequence
  derived and/or modified sequence
aagctgggtatggagcccctcagcggcggcggggtctgtgagttggacgcggggtcttggcggggaatggaggtagaataaacgtgggacccggagtgcaccaagaaaaaaaaattactaaaaatgacaagtagaagacttgaggagtccatgggggctgttcagatgggattggtcaatatgttcaaaggatttcaaagcaaggttttgccacccctgagtccaaaggtggttacagaagaagaagtaaaccgaatgcttacaccctcagagttcctgaaggaaatgtccctgaccaccgagcagagactggcaaaaacacgtttgatgtgccgaccacagatcatcgaactcttagatatgggggaaacaacacatcagaagttttcaggaattgacctggatcaggcattattccagccctttccatcagaaattatatttcagaactacactccctgtgaagtctatgaagttccactgattttgaggaacaatgacaaaattccaaggttggtgaaagttgtggaagaaagttcgccttactttaaagtaatcagccccaaagatattggccacaaagtggctcctggagtgccttccatattccgaatcctctttactccagaggagaacaaggattacgcccatacgttgacctgtgttactgaaagagaaaagtttattgtacccatcaaagctagaggggcacgagccattctcgattttcctgacaagctgaatttttccacttgtcctgtcaaatacagcacccagaagattctgctggtacgaaacattggcaacaaaaatgctgtatttcacatcaaaacttgtaggcctttctctatagaaccagctattggaactcttaatgtgggagagtccatgcaactggaagtggagtttgagccacagagtgtgggcgatcacagtggaagacttatcgtgtgttatgacacaggtgaaaaggtgtttgtatctctctatggagctgccatagacatgaatataaggctggataagaattccttgaccatcgagaaaacctacatatctctggccaatcagcgaactataaccattcacaatcgcagtaatatcattgcccatttcctgtggaaggtatttgctacccagcaagaagaggacagagaaaaatatagggcctgtgatgatctgatcaaagaggagaaggatgagactgatgagttttttgaagagtgcattactgatcctttactccgagaacatctttctgttctgtcccgaacctttgcgaatcagaggaggctggtgcagggagacagcaagctgttcttcaataacgttttcactgtggagcccctggaaggtgatgtctggcccaactcatcagctgaaatcaccgtgtactttaacccactagaagccaagctctatcaacagaccatttactgcgacattttaggccgagaaatccgtctgcccctccgaatcaaaggggaaggcatgggacctaagattcacttcaactttgaattgctggatattgggaaagttttcactggatctgcacattgttatgaggcgatactgtacaacaaaggcagcatcgatgctctcttcaacatgacccctccaacttcagctttgggggcctgctttgttttcagtcccaaggaaggcatcattgaaccaagtggagtccaagctatccagatctccttcagctctaccatcctgggaaactttgaagaagagttcctggtcaatgtcaatgggtcacctgagcctgtgaaactgaccattagaggctgtgtcattggacctaccttccattttaatgttccagctctgcactttggtgatgtttcctttgggtttcctcataccttgatatgttccctcaataatacctctttgatccccatgacttacaaactgcgtatccctggggatggccttggccataaaagcatttcatattgtgagcagcatgtggactacaaaagaccatcttggaccaaggaagaaatatcctcaatgaaaccaaaagaattcaccatctctcctgactgtggcaccattcgcccccagggatttgctgctatcagggtgacattatgctccaacactgtgcagaaatacgagctggcactcgtggtggacgtggagggcatcggagaagaggtgctggcgctcttaattacagcaaggtgtgttgtacctgccctccacctggtcaatacagaggtggactttgggcactgcttcctgaagtacccgtatgagaaaacactccagcttgccaatcaagatgacctcccaggattctatgaggtccagcctcaggtgtgtgaggaggtgcctactgtgctgttttccagccccacccccagcggggtcatctccccaagcagcaccatccacataccactggtcctggagacccaggtcactggagaacacagatccacggtttacatctcaatctttgggagccaggacccccctttggtatgtcacttaaagagcgctggagaaggcccagttatctacgtccatcccaatcaagtggacttcgggaatatctacgtcctaaaagactcttccaggattctcaacctatgcaaccagtccttcattcccgcatttttccaggcacacatggcacacaaaaaatccctttggacgattgaacccaatgaaggcatggttcctccagaaactgatgttcaactggcactgaccgccaacctgaatgacacactgacattcaaggactgtgttattttggacattgaaaatagcagtacctatcggattcctgttcaggcttccggaactggttccactattgtttcagataagccctttgctccagaactcaatttgggggcacattttagcctggatacccactattaccactttaagttgatcaacaagggacgtcggatccaacagttgttctggatgaatgatagcttccgaccccaggccaagctgagtaagaagggccgggttaagaagggacatgctcatgtccaaccccagcccagtggctctcaggagcccagggatccacagagccccgtgtttcatctccaccccgccagcatggagctgtacccaggccaggcaattgatgtgatactcgaaggctattctgctactcccagggtaaggggatagcacatttggaagctattgttttttcctaaataaatctctactgtatctatttcttaggaaagtcccttgacatttatctgaggaaggatatggtttctcaaggattgtgtacaatcctgagttaccatagtagcatccgttgctttcggggtgcagctctgctcagtcttcaatttgtttctgtagctactgtgaacccaatcttaaaggaggttctcatgcccagggtccacagtgaccagccagcaagtctctggtagaaaaacacccagtttttagccaaagcaaattctcctattaacacttagcaggatgaatttaatattcattcaaaaagggtgtttatatcgacactctgggctgcctctcctattcaggtattgggacatccctgttcctttctttccagcctgactgcaactcacatttcaaaacatcttctttttatgcattaataaaagagccacatttatcttcagcaa

SEQ ID NO: 316229 - DNA, 87 bp, Artificial Sequence
  derived and/or modified sequence
atgatgagcgagcacgatctggccgatgttgtacaaatcgccgttgaggatctctcccctgaccatcccgtggtccttgagaattag

SEQ ID NO: 316230 - DNA, 87 bp, Artificial Sequence
  derived and/or modified sequence
atgatgtctgaacatgacctggctgatgtggtgcagattgctgtggaggacctgagcccagaccaccctgtggtgctggagaactag

SEQ ID NO: 316231 - DNA, 87 bp, Artificial Sequence
  derived and/or modified sequence
atgatgagcgagcacgacctggccgacgtggtgcagatcgccgtggaggatctgagccccgaccatccagtcgttctggagaattag

SEQ ID NO: 316232 - DNA, 87 bp, Artificial Sequence
  derived and/or modified sequence
atgatgagtgaacacgatctcgcagatgtggtgcaaatcgctgtggaggacctgagtcctgatcatcccgtggtactggagaactag

SEQ ID NO: 316233 - DNA, 87 bp, Artificial Sequence
  derived and/or modified sequence
atgatgagcgagcacgacctggccgacgtggtgcagatcgccgtggaggacctgagccccgaccaccccgtggtgctggagaactag

SEQ ID NO: 316234 - DNA, 753 bp, Artificial Sequence
  derived and/or modified sequence
atggggtcacctgagcctactcagggaccccggctgtctcccatcctgatcccatacagcggcagacgctataaggtggggagagcttctggcgctctttgccaccaggactccctaccacccatattggagctgggactgactttcctaagagcgagtgctgggttttccgtgcctacaagctcctctttcgcattacctgaaccactccgtagcctctgcctcgggaacggcgagggcctcgggctgtctctgactctcaccgtcctggcctggatcctcggactgtctgggacactgggcgccttggtcctcttcatggtggcgaccgggatctttcaagaggccctctggcacctgctgctcctgtcattcagcgtcgaagcacttccctgctttttcttcttccctttttttctgctgtgtcgctgcctcagagcagagttacagattcagcaaagacttgatggcacactctcccttgaccttatgcgcctggaatcagacggagaaacaggttgtgcagctgagagttccgtgctacagggggcccaactgatagccgtagcttcttccgatcccgccgcggccggggttgatggttcgcccctgcaaggatcagacatccaggtgcagtatgtgcagctggcccctgtcagcgaccacacggctggcgcccagacagccgaggctctgcaacccacgctgcagcccgaaatgcagctcgagcacggcgctatccaaatccagtag

SEQ ID NO: 316235 - DNA, 753 bp, Artificial Sequence
  derived and/or modified sequence
atgggcagccctgagcccacccagggcccccggctgagccccatcctgatcccctacagcggccgccgctacaaggtgggccgggccagcggggccctgtgccaccaggacagcctgccccccatcctggagctgggcctgaccttcctgcgggccagcgctggcttctctgtgcccaccagcagcagctttgccctgcctgagcccctgcggagcctgtgcctgggcaatggagagggcctgggcctgagcctgaccctgactgtgctggcctggatcctgggcctgagcggcaccctgggcgccctggtgctcttcatggtggccaccggcatcttccaggaggccctgtggcacctgctgctgctgtccttctctgtggaggccctgccctgcttcttcttcttccccttcttcctgctgtgccgctgcctgcgggcagagctgcagatccagcagaggctggatggcaccctgagcctggacctgatgaggctggagagtgatggagagaccggctgtgccgctgagagctctgtgctgcagggcgcccagctgattgctgtggccagcagtgaccctgctgctgctggggtggatggcagccccctgcagggcagtgacatccaggtgcagtatgtgcagctggcccctgtgtctgaccacacagctggggcccagacagctgaggccctgcagcccaccctgcagcctgagatgcagctggagcacggggccatccagatccagtag

SEQ ID NO: 316236 - DNA, 753 bp, Artificial Sequence
  derived and/or modified sequence
atgggcagccccgagcccacccagggcccccggctgagccccatcctaattccttactcaggtcgccgatataaggtaggccgcgctagcggcgccctgtgtcatcaggattccttgcctcctatcctggagctgggcctcacattcctgcgcgcctcggccggattttctgtgccaactagttctagtttcgctctgcctgagcccttgagatctttgtgtctgggcaatggcgagggtctgggactatccctgaccctgaccgtcttagcgtggatcttgggactgtcaggcacactgggtgctctcgtgttgttcatggttgctactgggattttccaagaggccctgtggcacctactgctcctgtctttcagtgtggaggctctaccttgcttcttcttcttcccttttttccttctctgtagatgtttgcgcgccgagttgcagatccagcagcggctggacggtactctctctctggatctgatgcgccttgaaagcgacggcgaaactgggtgtgcagccgaatctagcgttctgcagggcgcacagttaatcgcagtggccagtagcgatccggcagccgccggcgtagacggtagccctctgcaaggcagcgacattcaggtgcagtatgtccagctggcacctgtgtccgaccacaccgccggggcacaaacggcagaggctttgcaaccgaccctgcagcctgaaatgcagctcgagcacggggcaattcaaattcagtag

SEQ ID NO: 316237 - DNA, 753 bp, Artificial Sequence
  derived and/or modified sequence
atgggctcccctgaacccacgcagggccctcgtctgtctcctatcctgatcccttattccgggagaagatacaaagtgggcagagcaagcggcgctctgtgccaccaggacagtctgccgccaatccttgaattgggtcttactttcctgagagcctctgcagggttcagcgtcccaacctcttcatcgttcgcactgcccgaaccgctgaggagcctctgcctggggaacggcgagggactagggctcagtttaacactgaccgttctcgcctggatattaggactaagtggtaccttaggcgctcttgttctatttatggtcgccacaggaatttttcaggaagctctgtggcacctacttctgctttcctttagcgttgaggccctgccctgtttcttttttttcccatttttcctcctatgtcgttgtctgcgcgcagagctacagatacagcagcgactggatggcaccctgtcattggacctaatgagactggagtcggacggcgaaaccggttgcgccgcagagagctctgtgttgcagggtgcccagctcattgccgtcgcatcttccgatccagccgcagccggagtggacggaagccctctgcaggggtcagacatacaggttcaatatgtgcaacttgcgcctgttagcgaccatacggcaggagcacaaaccgccgaagccttgcagccgacacttcagccagaaatgcagttggaacatggagcgatccaaatacaatag

SEQ ID NO: 316238 - DNA, 1648 bp, Artificial Sequence
  derived and/or modified sequence
gggcaggtcccacggaggggatgctgcggccaggctccgtggggtggggcaccctgcgacgggctgctcctcttcccagggccaccggtgagactctcagtgcacagagtgcggttctgtgtggaggtgtgggatgcatctcctggccctcccgtagtggggtgcaaccccaagtgaagaccccgtggctcatgtcaagtgccctcagggctggggctgcccacccgcctgcctgggccgtcttgacaccggagctgcctgcctggatgttggagcgcccagtggattgagtgggaagtgggcctgggtgcttacaggcgatggggtcaccagagcccacccaggggcctcgcctgtcccccattctcattccatactctgggaggcggtacaaggtcgggagggccagcggggctctctgccaccaggactcacttccgcccatcttggaactgggcctcactttcctgcgagcttctgctgggttctcagtgcccaccagcagctcctttgctctccctgagcccttgaggtcactctgccttgggaatggggagggtttgggtctcagcctcacgctcacggtcctggcttggattttaggcctcagtggcactctgggagcgcttgtgctcttcatggttgccactgggattttccaggaggctctgtggcatttgctgttgctctctttttctgtggaagctctgccttgcttttttttttttcccttttttctgctctgtaggtgcttgagggcggagttgcagatccagcagagactcgatggcactctctcactggatctgatgcgacttgagagcgatggggagacaggatgtgccgcagagtcctcggtgctgcagggtgcacagctgatcgccgtggcctcctcggaccccgcggcggcgggcgtggatgggtcgccactccagggcagcgacatccaggttcagtacgtgcagctggcgccagtgagtgaccacacggccggggcacagacggccgaagccctgcagcccacgctacagccggagatgcagctcgagcacggggccatccagattcagtgagcggtgcccatggcaccaggagcccctcgccggctccgcctacggcccggcccccacgcgccctgctctcacggcctcggcacaggcagcggctgcacgtgttctgctgaagtgcgtctgaaggccgctgcctccgcggggaacagcatcctatcaactgaaagagcagccgccgccgcccccagccggagacccctttcgtttgagtcctgctgttggtgtcggagcacgaggggaggcacggtgcggagagcgtcgcatatgcgcgggaaatcaagaactatgatatttttctgtttaaacagctttttttaatttgctatggtgtttataacaaaaaagaaaatttgaaaaaaaaaatcccaggggagtagcaggagccctttgctgtgtgctctgtccagtgtcatgagacgggagccctttgctgtgtgctctgtccagtgtcatgagacgggagccctttgctgtgtgctctgtccagtgtcatgagacgggagccctttgctgtgtgctctgtccagtgtcatgagacgggagccctttggatggggccggtgtcagcaaaggaggca

SEQ ID NO: 316239 - DNA, 753 bp, Artificial Sequence
  derived and/or modified sequence
atgggcagccccgagcccacccagggccccagactgagccccatcctgatcccctacagcggcagaagatacaaggtgggcagagccagcggcgccctgtgccaccaggacagcctgccccccatcctggagctgggcctgaccttcctgagagccagcgccggcttcagcgtgcccaccagcagcagcttcgccctgcccgagcccctgagaagcctgtgcctgggcaacggcgagggcctgggcctgagcctgaccctgaccgtgctggcctggatcctgggcctgagcggcaccctgggcgccctggtgctgttcatggtggccaccggcatcttccaggaggccctgtggcacctgctgctgctgagcttcagcgtggaggccctgccctgcttcttcttcttccccttcttcctgctgtgcagatgcctgagagccgagctgcagatccagcagagactggacggcaccctgagcctggacctgatgagactggagagcgacggcgagaccggctgcgccgccgagagcagcgtgctgcagggcgcccagctgatcgccgtggccagcagcgaccccgccgccgccggcgtggacggcagccccctgcagggcagcgacatccaggtgcagtacgtgcagctggcccccgtgagcgaccacaccgccggcgcccagaccgccgaggccctgcagcccaccctgcagcccgagatgcagctggagcacggcgccatccagatccagtag

SEQ ID NO: 316240 - protein, 292 aa, Artificial Sequence
  derived and/or modified sequence
MMFYWLLSIVGRQRASPGWQNWSSARNSASAAEARSMALPTQAQVVVCGGGITGTSVAHHQSKMGWKDIVLLEQGRLAAGSTRFCAGILSTARHLTIEQKMADYSNKLYHQLEQETGIRTGYTRTGSIFLAQTQDRLISLKRINAGLNVIGIPSEIISPKKVAELHHLLNVHDLVGAMHVPEDAVVSSADVALALASAASQNGVQIYDRTSVLQVMGKKGQVTGVETDKGQIECQYFVNCAGQLLWMLMEEFIFGTGRVASCLGALRRTQNQFSLRARTSWRFRIYRGLGSL

SEQ ID NO: 316241 - DNA, 879 bp, Artificial Sequence
  derived and/or modified sequence
atgatgttctactggctgctgagcatcgtgggcagacagagagccagccccggctggcagaactggagcagcgccagaaacagcgccagcgccgccgaggccagaagcatggccctgcccacccaggcccaggtggtggtgtgcggcggcggcatcaccggcaccagcgtggcccaccaccagagcaagatgggctggaaggacatcgtgctgctggagcagggcagactggccgccggcagcaccagattctgcgccggcatcctgagcaccgccagacacctgaccatcgagcagaagatggccgactacagcaacaagctgtaccaccagctggagcaggagaccggcatcagaaccggctacaccagaaccggcagcatcttcctggcccagacccaggacagactgatcagcctgaagagaatcaacgccggcctgaacgtgatcggcatccccagcgagatcatcagccccaagaaggtggccgagctgcaccacctgctgaacgtgcacgacctggtgggcgccatgcacgtgcccgaggacgccgtggtgagcagcgccgacgtggccctggccctggccagcgccgccagccagaacggcgtgcagatctacgacagaaccagcgtgctgcaggtgatgggcaagaagggccaggtgaccggcgtggagaccgacaagggccagatcgagtgccagtacttcgtgaactgcgccggccagctgctgtggatgctgatggaggagttcatcttcggcaccggcagagtggccagctgcctgggcgccctgagaagaacccagaaccagttcagcctgagagccagaaccagctggagattcagaatctacagaggcctgggcagcctgtag

SEQ ID NO: 316242 - DNA, 879 bp, Artificial Sequence
  derived and/or modified sequence
atgatgttctactggttgctctctatcgtcggccggcagcgcgccagccctggctggcagaattggtcaagcgctcggaacagcgcgtccgccgccgaggcaaggtcaatggccctccctacacaagcccaagttgtggtttgcggcggtggcatcacgggcacatctgtggcccatcaccagtctaaaatgggctggaaagacattgtgcttcttgaacagggacgcctggccgctgggagcacgcggttctgcgcaggcattttgtctacagcaagacaccttacaattgaacagaaaatggccgattattcaaataaactgtaccaccagctggaacaggagaccggtatacgcaccggttataccaggacagggagtatcttcctggctcaaacacaggaccgcctgatttcacttaagagaatcaatgcaggactgaatgtgatcggaatcccatccgaaatcattagcccgaagaaagttgctgagttacaccacctcctcaacgtgcacgacctcgtgggagccatgcacgtccccgaagacgctgtggtgtcgtcggcggacgtcgccctggcactggcgagcgcggcctcacaaaacggggtgcaaatctatgaccgaacatccgtactgcaggtgatgggaaagaaggggcaagtcaccggcgtagagaccgacaaggggcagatcgagtgtcaatattttgttaattgcgctggacagttattatggatgctgatggaagaatttattttcggcacaggaagagtagcaagctgcttaggggccctgaggcggacgcagaaccagtttagtctacgggccaggacttcgtggaggttccggatttaccgtgggctcggaagtttgtag

SEQ ID NO: 316243 - DNA, 879 bp, Artificial Sequence
  derived and/or modified sequence
atgatgttctactggctgctgagcatcgtgggccggcagagggccagccctggctggcagaactggagcagcgccaggaacagcgccagcgctgctgaggcccgctccatggccctgcccacccaggcccaggtggtggtgtgtggcggcggcatcaccggcacctctgtggcccaccaccagagcaagatgggctggaaggacatcgtgctgctggagcagggccgcctggccgccggcagcacccgcttctgtgccggcatcctgagcacagcccggcacctgaccatcgagcagaagatggctgactacagcaacaagctgtaccaccagctggagcaggagaccggcatcagaacaggctacaccaggacaggcagcatcttcctggcccagacccaggacaggctcatcagcctgaagaggatcaatgccggcctgaatgtcatcggcatccccagcgagatcatcagccccaagaaggtggccgagctgcaccacctgctgaatgtgcatgacctggtgggcgccatgcacgtgcctgaagatgctgtggtgagcagcgcagatgtggccctggccctggccagcgctgccagccagaatggagtgcagatctatgacaggacctctgtgctgcaggtgatgggcaagaagggccaggtgactggagtggagacagacaagggccagatcgagtgccagtactttgtgaactgtgccggccagctgctgtggatgctgatggaggagttcatcttcggcaccggccgggtggccagctgcctgggcgccctgcggaggacccagaaccagttcagcctgcgggcccggacctcctggaggttccgcatctaccggggcctgggcagcctgtag

SEQ ID NO: 316244 - DNA, 879 bp, Artificial Sequence
  derived and/or modified sequence
atgatgttctactggctgctgagcatcgtgggccggcagcgggccagcccaggctggcagaattggagcagcgcacgcaatagtgcctccgccgctgaggccagatccatggctctccccacccaagctcaggtggttgtgtgcgggggcggcataaccgggacatcagtcgctcaccatcagtcgaagatgggctggaaggatatcgtcttactggaacaaggccgactagccgcaggctccacgcggttctgtgcgggtattctctcaacagctcggcatttgaccatcgaacaaaagatggcagactacagcaataaactctatcatcagctggaacaagagactggcatccggaccggctacaccagaactggctccattttcttagcgcaaacccaggacagactgattagcttgaagagaatcaacgcaggcttaaacgtgatcgggattccctccgaaatcatctctccaaaaaaagttgccgaactgcatcaccttcttaatgtgcatgatctggtcggggccatgcacgtgccagaagatgcagtggtcagtagtgctgatgtagctctggcactggcatcagcagcctctcaaaatggagtccagatttatgacagaacttctgtgctacaggtgatgggcaaaaagggccaagtcacaggagtcgagacagataaaggccagatcgaatgtcagtattttgtcaattgtgcgggacagctgctgtggatgctgatggaggagtttatattcggtactggtagagtggcctcatgtctaggggcactgagacggacccagaatcagttcagcctcagggctcggacttcttggaggttccgaatatacagaggcctgggatcgctgtag

SEQ ID NO: 316245 - DNA, 879 bp, Artificial Sequence
  derived and/or modified sequence
atgatgttttactggcttctttcgatagtggggagacagcgtgcatctccaggatggcagaattggtcttcagcgcgaaattcagccagtgccgcagaggctcggtctatggcgctgcctacccaggctcaggtggtggtctgcggaggcggtatcaccggcacgtctgtggcacatcatcagtcaaagatgggatggaaggacatagttctgctggagcagggccgactggctgctggctcgacaagattttgcgctggaatactcagcactgccagacatctgacaatagaacagaaaatggcagactattccaacaagttataccaccagctggagcaggaaactggtatccgcaccggctatacccgtaccgggtccatctttctggcccaaacgcaagatagactgatctctctcaaaaggataaatgccggactgaacgttatcggcatccccagtgagataatctcccccaagaaagtagcggagctgcaccacctcctgaacgtgcacgatctggtgggagcgatgcatgtacctgaagacgcagtggtgtcatccgctgatgttgccttggccctggcatccgctgcctcgcaaaacggcgtacagatctacgaccggacaagcgtgctccaggtgatgggaaaaaagggacaggtgacgggtgtggaaacagataaggggcagattgagtgccaatatttcgtaaactgtgctggacagctgctttggatgctcatggaagaatttatatttggcacaggaagagtagcctcatgcctgggcgctttgaggcgcacccagaaccaattcagcctgcgcgcacggactagctggcggtttagaatctaccggggattaggttccctgtag

SEQ ID NO: 316246 - DNA, 1161 bp, Artificial Sequence
  derived and/or modified sequence
atgaacagcctgatgccctgctgcgccttcatcctgtacctggtgcccccctgggacagaagcatgggcggcaccctggacctgtacagcatcgacgagcacttccagcccaagcagatcgtgaagagcctgatccccagctggaacaagctggtgttcttcgaggtgagccccgtgagcttccaccaggtgagcgaggtgctgagcgaggagaagagcagactgagcatcagcggctggttccacggccccagcctgaccagaccccccaactacttcgagccccccatccccagaagcccccacatcccccaggaccacgagatcctgtacgactggatcaaccccacctacctggacatggactaccaggtgcagatccaggaggagttcgaggagagcagcgagatcctgctgaaggagttcctgaagcccgagaagttcaccaaggtgtgcgaggccctggagcacggccacgtggagtggagcagcagaggcccccccaacaagagattctacgagaaggccgaggagagcaagctgcccgagatcctgaaggagtgcatgaagctgttcagaagcgaggccctgttcctgctgctgagcaacttcaccggcctgaagctgcacttcctggcccccagcgaggaggacgagatgaacgacaagaaggaggccgagaccaccgacatcaccgaggagggcaccagccacagcccccccgagcccgagaacaaccagatggccatcagcaacaacagccagcagagcaacgagcagaccgaccccgagcccgaggagaacgagaccaagaaggagagcagcgtgcccatgtgccagggcgagctgagacactggaagaccggccactacaccctgatccacgaccacagcaaggccgagttcgccctggacctgatcctgtactgcggctgcgagggctgggagcccgagtacggcggcttcaccagctacatcgccaagggcgaggacgaggagctgctgaccgtgaaccccgagagcaacagcctggccctggtgtacagagacagagagaccctgaagttcgtgaagcacatcaaccacagaagcctggagcagaagaagaccttccccaacagaaccggcttctgggacttcagcttcatctactacgagtag

SEQ ID NO: 316247 - DNA, 1161 bp, Artificial Sequence
  derived and/or modified sequence
atgaatagcctgatgccttgctgcgcctttatcctgtacctcgtgccgccttgggaccgctcaatgggcggaacactcgatttatatagcatagacgagcattttcagccaaagcaaattgtgaagtcgcttattcccagttggaacaaactggtcttcttcgaggtgagtcctgtctcctttcaccaagtgtccgaagtcctctccgaggagaagtctaggctgtcaatcagtggctggtttcatggtccttcccttacaagacctcccaactatttcgaaccaccgatacctagatctccacacatcccacaggatcacgagattctgtatgactggattaatcctacctatcttgacatggactatcaggttcagattcaggaggaatttgaggagtcatccgagattctgttgaaagaattcctcaagccggaaaagtttacaaaggtgtgtgaggccctggagcatggacatgtggaatggtcttcccgcggcccgcctaataagagattctacgagaaggccgaggaaagtaaactcccagagattctgaaggagtgcatgaagctttttcgatctgaggcgctgttcttactcttgtccaattttacagggttaaagttgcacttcctggctccttccgaagaggacgagatgaatgataagaaagaagccgaaactacagacatcacggaagaaggcaccagccactcaccacccgagccagaaaacaatcaaatggccatttcaaataattctcagcaatctaatgagcagacggatcccgagccagaggagaacgaaaccaagaaagagtcaagtgttccaatgtgtcaaggcgaactcaggcattggaaaacagggcactacactctgatccacgatcactccaaagctgaattcgccctagacctcatcctgtattgcgggtgtgagggatgggagcccgagtacggaggtttcacttcgtacatcgccaagggggaggacgaagaactcttgaccgttaacccagagagcaattcgttggctctggtgtacagggacagagagacattgaaatttgtgaaacacattaatcataggtcactagagcagaaaaaaacttttccaaaccgtacgggcttttgggatttctcatttatctattacgagtag

SEQ ID NO: 316248 - DNA, 1161 bp, Artificial Sequence
  derived and/or modified sequence
atgaacagcctgatgccctgctgtgccttcatcctgtacctggtgcccccctgggaccgctccatgggcggcaccctggacctgtacagcattgatgagcacttccagcccaagcagatcgtgaagagcctcatccccagctggaacaagctggtgttctttgaggtgtcccctgtgtccttccaccaggtgtctgaggtgctgtctgaggagaagagccggctgagcatcagcggctggttccacggccccagcctgaccaggcctcccaactactttgagccccccatccccaggagcccccacatcccccaggaccacgagatcctgtatgactggatcaaccccacctacctggacatggactaccaggtgcagatccaggaggagtttgaggagagcagcgagatcctgctgaaggagttcctgaagccagagaagttcaccaaggtgtgtgaggccctggagcacggccacgtggagtggagcagccggggcccccccaacaagcgcttctatgagaaggccgaggagagcaagctgcctgagatcctgaaggagtgcatgaagctgttccgctctgaggccctcttcctgctgctgagcaacttcaccggcctgaagctgcacttcctggcccccagtgaagaagatgagatgaatgacaagaaggaggccgagaccacagacatcacagaggagggcaccagccacagccccccagagcctgagaacaaccagatggccatcagcaacaacagccagcagagcaatgagcagacagatcctgagccagaagaaaatgagaccaagaaggagagctctgtgcccatgtgccagggcgagctgcggcactggaagacaggccactacaccctcatccatgaccacagcaaggccgagtttgccctggacctgatcctgtactgcggctgtgagggctgggagccagaatatggaggcttcaccagctacatcgccaagggggaggatgaggagctgctgactgtgaaccctgagagcaacagcctggccctggtgtacagagaccgggagaccctgaagtttgtgaagcacatcaaccacaggagcctggagcagaagaagaccttccccaacagaacaggcttctgggacttctccttcatctactatgaatag

SEQ ID NO: 316249 - DNA, 1161 bp, Artificial Sequence
  derived and/or modified sequence
atgaacagcctgatgccctgctgcgccttcatcctgtacctggtgcccccctgggaccggtccatgggaggcactctggacctgtattccattgacgagcattttcagcccaaacaaattgtgaagagcctgataccttcctggaacaagctcgtcttctttgaggtttcaccggtttcattccatcaggtgagcgaggtcctgtcggaggaaaaaagtaggctatctatctcagggtggttccacggacctagtctgactcggcccccaaattattttgaaccccctatccctagatctccacatatcccacaggaccacgaaatcctgtatgactggattaacccaacttacctggacatggactatcaggttcagatccaggaggaatttgaagagtctagtgagatactcctgaaagagttcctgaagcctgagaaattcactaaggtctgcgaagctcttgagcacgggcatgttgaatggagctcaagaggacctcccaacaagaggttttatgagaaagccgaagagtccaagctgcccgaaatcctcaaggagtgcatgaagctcttcaggtcagaggccctttttctgcttttgagcaactttaccggactcaaactgcatttcttggcaccaagcgaggaggatgagatgaatgataagaaggaagctgagacaaccgacatcacagaggagggcacttctcactcacctcccgagcctgagaacaaccagatggccatttcgaacaatagtcaacaaagcaatgagcagacggatccggagccagaggaaaatgaaaccaaaaaggagagttcggttccaatgtgtcagggagagcttcgtcactggaaaaccggtcactataccttaattcacgaccattctaaagccgagtttgcattagacctgattctctactgcggttgcgaaggttgggagcctgagtatggcgggttcacttcttatatcgctaagggggaggacgaagagcttctcacagtaaatcccgagtccaactccctggccctggtgtacagggaccgcgaaacactaaaatttgtgaaacatatcaatcaccgcagcctggagcagaaaaaaacatttcccaatcggaccggattttgggactttagtttcatttactatgagtag

SEQ ID NO: 316250 - DNA, 1161 bp, Artificial Sequence
  derived and/or modified sequence
atgaacagcctcatgccatgctgcgcgttcatcctatatctggtgcccccttgggatcgcagtatgggagggaccctggacctatactccatagatgagcatttccagcccaagcagattgttaagtccctcatcccttcctggaacaagctggtctttttcgaagtgtctcctgtctcgttccaccaggtttccgaagtgctcagtgaagaaaagtcacggctcagcatatctggctggttccacgggccaagcctcacccggccaccaaattacttcgagcctcccatcccgagaagtccccatattccccaagaccacgagattttgtacgattggataaacccaacttacctggacatggactatcaggtgcaaattcaggaagagtttgaagagtcctctgagattctcctcaaggagttccttaagccggaaaaattcacaaaagtctgtgaggcactagagcatggtcatgtcgaatggtctagcagaggccctccaaacaaacgattttatgaaaaagccgaagagagtaaactgcctgagatactcaaagaatgtatgaagctgtttcggtcagaggcactgtttctgctactcagtaactttacagggctcaagcttcatttcctggctcccagtgaggaagacgagatgaacgataagaaagaggccgagactactgacatcaccgaggagggtacatcccattctccccctgagccagagaataaccaaatggcaatctcaaataattctcaacagtccaatgaacagaccgatccggaaccggaagaaaacgaaactaaaaaggagtcaagtgtgccgatgtgtcaaggagagcttcggcattggaaaacaggacattacacccttatccacgatcacagcaaggctgagtttgctcttgacttgattttgtactgcggatgcgagggctgggaaccagagtatggaggatttaccagctacatagccaaaggcgaagacgaggaactcttgactgtgaaccccgagtccaacagcttggccctggtgtaccgtgaccgcgagacattgaagtttgtcaaacacatcaaccaccggtcattggagcagaagaagacctttccaaatagaacgggattttgggatttttctttcatatattatgaatag

SEQ ID NO: 316251 - protein, 1139 aa, Artificial Sequence
  derived and/or modified sequence
MPSGGDQSPPPPPPPPAAAASDEEEEDDGEAEDAAPPAESPTPQIQQRFDELCSRLNMDEAARAEAWDSYRSMSESYTLEGNDLHWLACALYVACRKSVPTVSKGTVEGNYVSLTRILKCSEQSLIEFFNKMKKWEDMANLPPHFRERTERLERNFTVSAVIFKKYEPIFQDIFKYPQEEQPRQQRGRKQRRQPCTVSEIFHFCWVLFIYAKGNFPMISDDLVNSYHLLLCALDLVYGNALQCSNRKELVNPNFKGLSEDFHAKDSKPSSDPPCIIEKLCSLHDGLVLEAKGIKEHFWKPYIRKLYEKKLLKGKEENLTGFLEPGNFGESFKAINKAYEEYVLSVGNLDERIFLGEDAEEEIGTLSRCLNAGSGTETAERVQMKNILQQHFDKSKALRISTPLTGVRYIKENSPCVTPVSTATHSLSRLHTMLTGLRNAPSEKLEQILRTCSRDPTQAIANRLKEMFEIYSQHFQPDEDFSNCAKEIASKHFRFAEMLYYKVLESVIEQEQKRLGDMDLSGILEQDAFHRSLLACCLEVVTFSYKPPGNFPFITEIFDVPLYHFYKVIEVFIRAEDGLCREVVKHLNQIEEQILDHLAWKPESPLWEKIRDNENRVPTCEEVMPPQNLERADEICIAGSPLTPRRVTEVRADTGGLGRSITSPTTLYDRYSSPPASTTRRRLFVENDSPSDGGTPGRMPPQPLVNAVPVQNVSGETVSVTPVPGQTLVTMATATVTANNGQTVTIPVQGIANENGGITFFPVQVNVGGQAQAVTGSIQPLSAQALAGSLSSQQVTGTTLQVPGQVAIQQISPGGQQQKQGQSVTSSSNRPRKTSSLSLFFRKVYHLAAVRLRDLCAKLDISDELRKKIWTCFEFSIIQCPELMMDRHLDQLLMCAIYVMAKVTKEDKSFQNIMRCYRTQPQARSQVYRSVLIKGKRKRRNSGSSDSRSHQNSPTELNKDRTSRDSSPVMRSSSTLPVPQPSSAPPTPTRLTGANSDMEEEERGDLIQFYNNIYIKQIKTFAMKYSQANMDAPPLSPYPFVRTGSPRRIQLSQNHPVYISPHKNETMLSPREKIFYYFSNSPSKRLREINSMIRTGETPTKKRGILLEDGSESPAKRICPENHSALLRRLQDVANDRGSH

SEQ ID NO: 316252 - DNA, 4903 bp, Artificial Sequence
  derived and/or modified sequence
gtcgtttgcggcggcgcaggcgcggtgcgggcggcggacgggcgggcgcttcgccgtttgaatggctgcgggcccgggccctcacctcacctgaggtccggccgcccaggggtgcgctatgccgtcgggaggtgaccagtcgccaccgcccccgcctccccctccggcggcggcagcctcggatgaggaggaggaggacgacggcgaggcggaagacgccgcgccgcctgccgagtcgcccacccctcagatccagcagcggttcgacgagctgtgcagccgcctcaacatggacgaggcggcgcgggccgaggcctgggacagctaccgcagcatgagcgaaagctacacgctggagggaaatgatcttcattggttagcatgtgccttatatgtggcttgcagaaaatctgttccaactgtaagcaaagggacagtggaaggaaactatgtatctttaactagaatcctgaaatgttcagagcagagcttaatcgaattttttaataagatgaagaagtgggaagacatggcaaatctacccccacatttcagagaacgtactgagagattagaaagaaacttcactgtttctgctgtaatttttaagaaatatgaacccatttttcaggacatctttaaataccctcaagaggagcaacctcgtcagcagcgaggaaggaaacagcggcgacagccctgtactgtgtctgaaattttccatttttgttgggtgctttttatatatgcaaaaggtaatttccccatgattagtgatgatttggtcaattcttatcacctgctgctgtgtgctttggacttagtttatggaaatgcacttcagtgttctaatcgtaaagaacttgtgaaccctaattttaaaggcttatctgaagattttcatgctaaagattctaaaccttcctctgaccccccttgtatcattgagaaactgtgttccttacatgatggcctagttttggaagcaaaggggataaaggaacatttctggaaaccctatattaggaaactttatgaaaaaaagctccttaagggaaaagaagaaaatctcactgggtttctagaacctgggaactttggagagagttttaaagccatcaataaggcctatgaggagtatgttttatctgttgggaatttagatgagcggatatttcttggagaggatgctgaggaggaaattgggactctctcaaggtgtctgaacgctggttcaggaacagagactgctgaaagggtgcagatgaaaaacatcttacagcagcattttgacaagtccaaagcacttagaatctccacaccactaactggtgttaggtacattaaggagaatagcccttgtgtgactccagtttctacagctacgcatagcttgagtcgtcttcacaccatgctgacaggcctcaggaatgcaccaagtgagaaactggaacagattctcaggacatgttccagagatccaacccaggctattgctaacagactgaaagaaatgtttgaaatatattctcagcatttccagccagacgaggatttcagtaattgtgctaaagaaattgccagcaaacattttcgttttgcggagatgctttactataaagtattagaatctgttattgagcaggaacaaaaaagactaggagacatggatttatctggtattctggaacaagatgcgttccacagatctctcttggcctgctgccttgaggtcgtcactttttcttataagcctcctgggaattttccatttattactgaaatatttgatgtgcctctttatcatttttataaggtgatagaagtattcattagagcagaagatggcctttgtagagaggtggtaaaacaccttaatcagattgaagaacagatcttagatcatttggcatggaaaccagagtctccactctgggaaaaaattagagacaatgaaaacagagttcctacatgtgaagaggtcatgccacctcagaacctggaaagggcagatgaaatttgcattgctggctcccctttgactcccagaagggtgactgaagttcgtgctgatactggaggacttggaaggagcataacatctccaaccacattatacgataggtacagctccccaccagccagcactaccagaaggcggctatttgttgagaatgatagcccctctgatggagggacgcctgggcgcatgcccccacagcccctagtcaatgctgtccctgtgcagaatgtatctggggagactgtttctgtcacaccagttcctggacagactttggtcaccatggcaaccgccactgtcacagccaacaatgggcaaacggtaaccattcctgtgcaaggtattgccaatgaaaatggagggataacattcttccctgtccaagtcaatgttggggggcaggcacaagctgtgacaggctccatccagcccctcagtgctcaggccctggctggaagtctgagctctcaacaggtgacaggaacaactttgcaagtccctggtcaagtggccattcaacagatttccccaggtggccaacagcagaagcaaggccagtctgtaaccagcagtagtaatagacccaggaagaccagctctttatcgcttttctttagaaaggtataccatttagcagctgtccgccttcgggatctctgtgccaaactagatatttcagatgaattgaggaaaaaaatctggacctgctttgaattctccataattcagtgtcctgaacttatgatggacagacatctggaccagttattaatgtgtgccatttatgtgatggcaaaggtcacaaaagaagataagtccttccagaacattatgcgttgttataggactcagccgcaggcccggagccaggtgtatagaagtgttttgataaaagggaaaagaaaaagaagaaattctggcagcagtgatagcagaagccatcagaattctccaacagaactaaacaaagatagaaccagtagagactccagtccagttatgaggtcaagcagcaccttgccagttccacagcccagcagtgctcctcccacacctactcgcctcacaggtgccaacagtgacatggaagaagaggagaggggagacctcattcagttctacaacaacatctacatcaaacagattaagacatttgccatgaagtactcacaggcaaatatggatgctcctccactctctccctatccatttgtaagaacaggctcccctcgccgaatacagttgtctcaaaatcatcctgtctacatttccccacataaaaatgaaacaatgctttctcctcgagaaaagattttctattacttcagcaacagtccttcaaagagactgagagaaattaatagtatgatacgcacaggagaaactcctactaaaaagagaggaattcttttggaagatggaagtgaatcacctgcaaaaagaatttgcccagaaaatcattctgccttattacgccgtctccaagatgtagctaatgaccgtggttcccactgaggttagtctcttgtattaaactcttcacaaaatctgtttagcagcagcctttaatgcatctagattatggagcttttttccttaatccagctgatgagttacagcctgttagtaacatgaggggacattttggtgagaaatgggacttaactccttccagtgtccttagaacattttaattcatcccaactgtctttttttccctaccattcagtgattactgtcaaggctgcttagaatccaaacttggatttttgactctggcaaagcttttagaaatactgcaagaaaatgatgtgtacccaaacgtgagcataggaggcttctgttgacgtactccaacagaagaactgtgtttcaagttcaatcctacctgttttgtggtcagctgtagtcctcataaaaagcaaaacaaaaattaggtattttgtcctaaaacacctggtaggagtgtgtgattttttgcattcctgacaaaggagagcacacccaggtttggaggtcctaggtcattagccctcgtctcccgttccctttgtgcacatcttccctctccccattcggtgtggtgcagtgtgaaaagtccttgattgttcgggtgtgcaatgtctgagtgaacctgtataagtggaggcactttagggctgtaaaatgcatgattttgtaacccagattttgctgtatatttgtgatagcactttctacaatgtgaactttattaaatacaaaacttccaggctaaacatccaatattttctttaatgcttttatatttttttaaaatgttaaaacccctatagccaccttttgggaatgttttaaattctccagttttttgttatatagggatcaaccagctaagaaaagattttaatcaagttgaattgaggggattaatatgaaaacttatgacctcttcctttaggagggagttatctaaaagaaatgtctattaaggtgatatatttaaaaatatttttgggtgttcctggcagtttaaaaaaattggttggagaatttaggtttttattagtaccatagtaccatttatacaaattagaaaatgttatttaacagctgaattatctatacatatctttattaatcactattgttccagcagttttcaagtcaaattaataatcttattagggagaaaattcaattgtaaattgaatcagtataaacaaagttactaggtaacttcatattgctgagagaaatatggaacttacattgttcaattagaatagtgttctgcaaaaatatttataaaacttctcaagatactgctactgtaattttatatgaagataagtgtatttttcaataaagcatttataaattaaaaaaaaaaaaaaaaaa

SEQ ID NO: 316253 - DNA, 3420 bp, Artificial Sequence
  derived and/or modified sequence
atgcccagcggcggcgaccagagcccccccccccccccccccccccccgccgccgccgccagcgacgaggaggaggaggacgacggcgaggccgaggacgccgccccccccgccgagagccccaccccccagatccagcagagattcgacgagctgtgcagcagactgaacatggacgaggccgccagagccgaggcctgggacagctacagaagcatgagcgagagctacaccctggagggcaacgacctgcactggctggcctgcgccctgtacgtggcctgcagaaagagcgtgcccaccgtgagcaagggcaccgtggagggcaactacgtgagcctgaccagaatcctgaagtgcagcgagcagagcctgatcgagttcttcaacaagatgaagaagtgggaggacatggccaacctgcccccccacttcagagagagaaccgagagactggagagaaacttcaccgtgagcgccgtgatcttcaagaagtacgagcccatcttccaggacatcttcaagtacccccaggaggagcagcccagacagcagagaggcagaaagcagagaagacagccctgcaccgtgagcgagatcttccacttctgctgggtgctgttcatctacgccaagggcaacttccccatgatcagcgacgacctggtgaacagctaccacctgctgctgtgcgccctggacctggtgtacggcaacgccctgcagtgcagcaacagaaaggagctggtgaaccccaacttcaagggcctgagcgaggacttccacgccaaggacagcaagcccagcagcgaccccccctgcatcatcgagaagctgtgcagcctgcacgacggcctggtgctggaggccaagggcatcaaggagcacttctggaagccctacatcagaaagctgtacgagaagaagctgctgaagggcaaggaggagaacctgaccggcttcctggagcccggcaacttcggcgagagcttcaaggccatcaacaaggcctacgaggagtacgtgctgagcgtgggcaacctggacgagagaatcttcctgggcgaggacgccgaggaggagatcggcaccctgagcagatgcctgaacgccggcagcggcaccgagaccgccgagagagtgcagatgaagaacatcctgcagcagcacttcgacaagagcaaggccctgagaatcagcacccccctgaccggcgtgagatacatcaaggagaacagcccctgcgtgacccccgtgagcaccgccacccacagcctgagcagactgcacaccatgctgaccggcctgagaaacgcccccagcgagaagctggagcagatcctgagaacctgcagcagagaccccacccaggccatcgccaacagactgaaggagatgttcgagatctacagccagcacttccagcccgacgaggacttcagcaactgcgccaaggagatcgccagcaagcacttcagattcgccgagatgctgtactacaaggtgctggagagcgtgatcgagcaggagcagaagagactgggcgacatggacctgagcggcatcctggagcaggacgccttccacagaagcctgctggcctgctgcctggaggtggtgaccttcagctacaagccccccggcaacttccccttcatcaccgagatcttcgacgtgcccctgtaccacttctacaaggtgatcgaggtgttcatcagagccgaggacggcctgtgcagagaggtggtgaagcacctgaaccagatcgaggagcagatcctggaccacctggcctggaagcccgagagccccctgtgggagaagatcagagacaacgagaacagagtgcccacctgcgaggaggtgatgcccccccagaacctggagagagccgacgagatctgcatcgccggcagccccctgacccccagaagagtgaccgaggtgagagccgacaccggcggcctgggcagaagcatcaccagccccaccaccctgtacgacagatacagcagcccccccgccagcaccaccagaagaagactgttcgtggagaacgacagccccagcgacggcggcacccccggcagaatgcccccccagcccctggtgaacgccgtgcccgtgcagaacgtgagcggcgagaccgtgagcgtgacccccgtgcccggccagaccctggtgaccatggccaccgccaccgtgaccgccaacaacggccagaccgtgaccatccccgtgcagggcatcgccaacgagaacggcggcatcaccttcttccccgtgcaggtgaacgtgggcggccaggcccaggccgtgaccggcagcatccagcccctgagcgcccaggccctggccggcagcctgagcagccagcaggtgaccggcaccaccctgcaggtgcccggccaggtggccatccagcagatcagccccggcggccagcagcagaagcagggccagagcgtgaccagcagcagcaacagacccagaaagaccagcagcctgagcctgttcttcagaaaggtgtaccacctggccgccgtgagactgagagacctgtgcgccaagctggacatcagcgacgagctgagaaagaagatctggacctgcttcgagttcagcatcatccagtgccccgagctgatgatggacagacacctggaccagctgctgatgtgcgccatctacgtgatggccaaggtgaccaaggaggacaagagcttccagaacatcatgagatgctacagaacccagccccaggccagaagccaggtgtacagaagcgtgctgatcaagggcaagagaaagagaagaaacagcggcagcagcgacagcagaagccaccagaacagccccaccgagctgaacaaggacagaaccagcagagacagcagccccgtgatgagaagcagcagcaccctgcccgtgccccagcccagcagcgccccccccacccccaccagactgaccggcgccaacagcgacatggaggaggaggagagaggcgacctgatccagttctacaacaacatctacatcaagcagatcaagaccttcgccatgaagtacagccaggccaacatggacgccccccccctgagcccctaccccttcgtgagaaccggcagccccagaagaatccagctgagccagaaccaccccgtgtacatcagcccccacaagaacgagaccatgctgagccccagagagaagatcttctactacttcagcaacagccccagcaagagactgagagagatcaacagcatgatcagaaccggcgagacccccaccaagaagagaggcatcctgctggaggacggcagcgagagccccgccaagagaatctgccccgagaaccacagcgccctgctgagaagactgcaggacgtggccaacgacagaggcagccactag

SEQ ID NO: 316254 - DNA, 3420 bp, Artificial Sequence
  derived and/or modified sequence
atgccatccggcggcgaccagagtcccccccccccaccaccccctcctgctgctgcggcgtccgacgaggaagaagaggacgatggcgaggcagaggatgccgctccacccgctgagtcccctactcctcagattcaacaaagatttgatgagctttgttctcggctcaacatggacgaggctgcccgtgcagaagcctgggattcctatcgttctatgagcgagagctatacgctcgaggggaacgatctgcattggcttgcatgcgcgttgtatgtggcatgccgaaaaagcgttcccacagtatcaaagggtactgtcgagggtaactatgtaagccttactagaattctgaaatgtagcgagcagtccctgatagagtttttcaacaaaatgaaaaagtgggaagacatggccaaccttcctccccactttcgagagcgcacagaacgccttgagcgcaatttcacagtgagcgctgtgatattcaaaaaatacgagcccatctttcaagacatattcaagtatccacaggaagagcagccccggcaacagagggggcgtaaacagcgccgacagccatgtacagtaagtgaaattttccatttttgttgggttcttttcatctatgcaaaaggaaacttccctatgatttccgatgaccttgtgaactcttaccatctgctcctctgtgctctggatctcgtttatggcaacgcattacagtgctcaaatcgcaaggaattagtgaaccccaattttaaaggcttgtccgaagactttcatgcgaaagacagtaagccaagcagcgacccgccctgtattatcgaaaaattgtgctccctgcatgatgggcttgttttggaggctaaaggcatcaaagagcacttctggaagccgtacataaggaagctatatgagaagaaactgttaaagggaaaggaggagaacctcaccggatttttggagccaggaaatttcggagagagcttcaaagccatcaataaagcgtacgaggagtatgtgctgagcgtgggcaacctggatgagaggatcttcctgggggaggacgcagaggaggagatcgggacactcagtcgctgtctgaatgctggaagcggcacagaaaccgcggagcgagtgcagatgaagaacatcctccagcaacacttcgataaatcaaaggccctccggatttctacaccactaactggtgtccgttacattaaagaaaactctccctgtgttacacctgttagtacagcaacacactcactgtcacgcctgcacacgatgctgacaggattgaggaatgctccatcagagaaacttgagcaaattctgcgaacatgtagcagagacccaactcaggctatagctaataggctcaaggaaatgttcgagatatatagtcaacatttccaaccagacgaggacttttctaactgtgccaaagagatcgcttctaaacactttcgatttgctgaaatgctgtactataaggttctcgaaagcgtgatcgaacaggagcaaaaacgactcggggacatggatctgagcggcatcctggagcaggatgcgtttcacaggagcctgttagcctgttgtctggaggtggtaacgttctcctacaagcccccaggcaatttccccttcattactgagatatttgatgttccactgtaccacttttataaggtcatcgaggtatttattcgcgcagaggacgggctgtgcagggaggtcgtcaaacatctgaatcagatcgaggagcaaatcctggaccaccttgcttggaaaccagagagcccattgtgggagaagatccgcgacaatgagaatcgggttcctacctgcgaggaggtaatgcctccacagaacctggaacgcgctgatgaaatttgcatcgccgggagccctctcactccccgtagagtgaccgaggtgcgcgccgacacaggaggccttggacgaagtattacctctcccaccactttatacgatagatattcttctccacccgcatctactaccaggagaaggctgttcgtcgaaaatgattccccctcggatggcgggacaccggggcgcatgcctcctcagcctctggtcaacgcggtgcctgtccagaacgtgagtggcgaaacagtttcagtgacacccgtgcccggccaaacacttgtgactatggcgacagcaaccgtgacagcaaataacggccagacggtgaccattcctgttcaaggtatagccaatgagaatggggggatcacttttttcccagtccaagtgaacgttggtggacaggcgcaggccgttacggggagtattcaaccactcagtgctcaggcactggcgggtagtttatccagtcaacaggtcactgggacaaccctccaagtaccaggccaggtagctatccagcagatctctccgggcggtcagcagcagaaacagggccagtctgtgacaagcagctcaaaccgccctagaaaaacaagctcgctttcgctgttctttcgcaaagtgtatcacctggcagcagtgcggctccgcgacctgtgtgcgaagctggacatttctgatgagctgcgcaagaaaatctggacctgctttgagttctccatcattcagtgcccagaactaatgatggacagacatctggatcaactgctgatgtgcgcaatttacgtgatggccaaggtcacaaaggaggataagagtttccaaaatattatgcggtgttaccgtactcagcctcaagccaggagccaggtttatcggtcggttttgataaagggcaagcgcaaacgaaggaattctggttccagtgatagccgctcacatcagaacagcccgactgagctgaataaagacagaacttccagggattcaagtccagtgatgcgaagctccagtactctcccggtacctcagccatcttctgccccaccaacccctacgcgcctgaccggtgcaaatagtgatatggaagaagaagaaaggggggatcttatccagttttacaacaacatttacatcaaacagatcaagacctttgccatgaagtattcacaggcaaacatggacgcccccccacttagcccttatccctttgtgcggaccggaagtcctcgtaggatacagctgtcccagaaccacccggtttacatttctccccataagaatgaaacaatgttatcgcctcgggaaaagattttctactacttctccaactccccttccaaacgcctccgagagataaatagcatgatccggaccggcgagactcctactaaaaaaaggggtattttacttgaagatgggtccgaaagtccggccaaacgcatctgcccagagaaccactcagccctcctgagaagactgcaggatgttgcaaatgaccgaggatcccactag

SEQ ID NO: 316255 - DNA, 3420 bp, Artificial Sequence
  derived and/or modified sequence
atgcccagcggcggggaccagagccccccacctcctcctcctcctcctgctgctgctgccagtgatgaggaggaggaggatgatggagaggccgaggatgctgcccccccagctgagagccccaccccccagatccagcagagatttgatgagctgtgcagccggctgaacatggatgaagctgcccgggcagaggcctgggacagctaccgctccatgtctgagagctacaccctggagggcaatgacctgcactggctggcctgtgccctgtatgtggcctgcaggaagtctgtgcccaccgtgtccaagggcaccgtggagggcaactacgtgtccctgacccgcatcctgaagtgcagcgagcagagcctcatcgagttcttcaacaagatgaagaagtgggaggacatggccaacctgcccccccacttccgggagaggacagagcggctggagaggaacttcaccgtgtctgctgtgatcttcaagaagtatgagcccatcttccaggacatcttcaagtacccccaggaggagcagccccggcagcagaggggcaggaagcagaggcggcagccctgcaccgtgtctgagatcttccacttctgctgggtgctcttcatctatgccaagggcaacttccccatgatcagtgatgacctggtgaacagctaccacctgctgctgtgtgccctggacctggtgtatggaaatgccctgcagtgcagcaacaggaaggagctggtgaaccccaacttcaagggcctgtctgaggacttccacgccaaggacagcaagcccagcagtgaccccccctgcatcatcgagaagctgtgcagcctgcatgatggcctggtgctggaggccaagggcatcaaggagcacttctggaagccctacatcaggaagctgtatgagaagaagctgctgaagggcaaggaggagaacctgaccggcttcctggagcccggcaactttggagagagcttcaaggccatcaacaaggcctatgaggagtatgtgctgtctgtgggcaacctggatgagcgcatcttcctgggggaggatgctgaggaggagatcggcaccctgagccgctgcctgaatgccggcagcggcacagaaacagctgagcgggtgcagatgaagaacatcctgcagcagcactttgacaagagcaaggccctgcgcatcagcacccccctgactggagtgcgctacatcaaggagaacagcccctgtgtgacccctgtgtccacagccacccacagcctgagccggctgcacaccatgctgaccggcctgagaaatgcccccagcgagaagctggagcagatcctgcggacctgcagccgggaccccacccaggccatcgccaaccggctgaaggagatgtttgagatctacagccagcacttccagccagatgaggacttcagcaactgtgccaaggagatcgccagcaagcacttccgctttgctgagatgctgtactacaaggtgctggagagcgtgattgagcaggagcagaagaggctgggggacatggacctgagcggcatcctggagcaggatgccttccacaggagcctgctggcctgctgcctggaggtggtgaccttctcctacaagcccccaggcaacttccccttcatcacagagatctttgatgtgcccctgtaccacttctacaaggtgattgaggtgttcatccgggcagaagatggcctgtgccgggaggtggtgaagcacctgaaccagatcgaggagcagatcctggaccacctggcctggaagccagagagccccctgtgggagaagatccgggacaatgaaaatagagtgcccacctgtgaggaggtgatgccaccccagaacctggagcgggcagatgagatctgcatcgccggcagccccctgaccccccggcgggtgacagaggtgcgggctgacacaggaggcctgggccgcagcatcaccagccccaccaccctgtatgaccgctacagcagccccccagccagcaccacccggcggcggctgtttgtggagaatgacagccccagtgatggcggcaccccaggccgcatgccaccccagcccctggtgaatgctgtgcctgtgcagaatgtgtctggagagaccgtgtctgtgacccctgtgcccggccagaccctggtgaccatggccacagccaccgtgacagccaacaacggccagacagtgaccatccctgtgcagggcatcgccaatgaaaatggaggcatcaccttcttccctgtgcaggtgaatgtgggcggccaggcccaggccgtgacaggcagcatccagcccctgagcgcccaggccctggccggcagcctgagcagccagcaggtgacaggcaccaccctgcaggtgcccggccaggtggccatccagcagatcagccctgggggccagcagcagaagcagggccagagcgtgaccagcagcagcaaccggcccaggaagaccagcagcctgagcctcttcttcaggaaggtgtaccacctggccgctgtgcggctgcgggacctgtgtgccaagctggacatcagtgatgagctgaggaagaagatctggacctgctttgagttcagcatcatccagtgcccagagctgatgatggacagacacctggaccagctgctgatgtgtgccatctacgtgatggccaaggtgaccaaggaggacaagagcttccagaacatcatgcgctgctaccgcacccagccccaggcccggagccaggtgtacagatctgtgctgatcaagggcaagaggaagagaagaaattctggcagcagtgacagccgcagccaccagaacagccccacagagctgaacaaggacaggaccagccgggacagcagccctgtgatgaggagcagcagcaccctgcctgtgccccagcccagcagcgccccacccacccccacccggctgactggagccaacagcgacatggaggaggaggagcggggggacctgatccagttctacaacaacatctacatcaagcagatcaagacctttgccatgaagtacagccaggccaacatggatgccccacccctgagcccctacccctttgtgaggacaggcagcccccggcgcatccagctgagccagaaccaccctgtgtacatcagcccccacaagaatgagaccatgctgagcccccgggagaagatcttctactacttcagcaacagccccagcaagaggctgcgggagatcaacagcatgatcagaactggagagacccccaccaagaagaggggcatcctgctggaggatggcagcgagagccctgccaagaggatctgcccagagaaccacagcgccctgctgcggcggctgcaggatgtggccaatgaccggggcagccactag

SEQ ID NO: 316256 - DNA, 3420 bp, Artificial Sequence
  derived and/or modified sequence
atgcccagcggcggcgaccagagccccccccccccccccccccccccagccgccgcagcttctgacgaggaagaggaggatgacggcgaggcagaggacgccgcccctcccgctgagtccccaacgccacagatccagcagcgattcgacgagttgtgcagccgacttaacatggatgaggccgccagggctgaagcttgggactcatatcggtctatgtccgaatcctatacactggaggggaacgatctgcactggctggcatgtgccctatacgtggcatgtcgaaagagcgtccctaccgtgtccaagggcaccgttgagggaaactacgtttccctgacgcgcatcctaaaatgctctgaacagtcgctcattgaattttttaataagatgaaaaaatgggaagacatggccaacttgcctcctcattttcgcgaaagaactgaaaggcttgagagaaatttcactgtctcggctgtgatcttcaagaaatatgagccgatttttcaggatatatttaagtacccacaagaggagcaacctcgccaacagcgcgggaggaaacaaagacgtcaaccctgcacagtgtccgaaatattccatttctgctgggtgcttttcatatatgccaagggtaattttccgatgattagcgacgatttagttaactcctatcatctgttgctgtgtgctttggatctcgtttatggaaatgctttacagtgttcaaatcgaaaggagctagtcaacccgaacttcaaaggcttgtcggaggactttcatgcgaaggacagcaagcccagtagcgacccgccatgcatcattgagaagctgtgttcactccatgacggccttgtgcttgaagccaaggggatcaaggagcacttctggaaaccatatatccgcaaactgtacgagaagaagcttctcaaaggaaaagaggaaaacctgaccgggtttctcgaacctgggaactttggggagtcgtttaaggccatcaataaagcatatgaagagtatgtactgtccgttggtaatctcgatgagcgcattttcttgggcgaagatgcagaagaagagattggcaccctttcaagatgcttaaacgctggaagcggcaccgagacggctgaacgggttcagatgaagaacatccttcagcagcacttcgacaagtcaaaagcgctacgtatcagtacccccttaaccggtgtcagatacattaaagaaaactcaccctgcgtgacacctgtgtccaccgctacccacagtctcagccgactacatactatgctgaccggtctgcggaatgccccctccgagaagttggagcagatcctgcggacctgttctagggacccgacgcaagcgatcgccaatagactcaaagagatgttcgaaatttactcgcagcactttcagccagacgaggacttcagcaactgtgctaaggagatcgcctccaagcattttcgctttgccgagatgctttactacaaagtgttggagtcagtaattgagcaggagcaaaaacgactgggagatatggatctgagcggcatcctggaacaagatgcatttcatcggagcctgctggcctgttgtttagaggtggtgaccttctcctataaaccccccggcaattttccttttattactgagatattcgatgtcccactctaccatttctataaggtcatcgaggttttcattcgtgctgaagatgggctctgcagggaggtggtcaaacacctgaaccaaatagaagaacagattctagatcatttagcttggaagccagagagccctttgtgggaaaaaatccgggataatgaaaaccgcgtacctacatgtgaggaggtgatgcccccgcaaaatttagagcgagccgatgagatctgtattgctggctctccgctgacccccagacgggtcaccgaggttagagccgataccggtggattaggtcggagtataacctctcctaccacgctgtacgaccgctactctagtccacccgcatcgaccacccggagaaggctttttgtcgagaatgactcgccttccgacggcggcacccccggcagaatgcccccacagcctctagtcaatgccgtacccgttcagaacgtgtctggtgagacagtctcggtgaccccagtaccgggccagaccttggttaccatggccaccgctacagtgactgctaacaatggccaaacagtgactattccagtccagggcattgcgaacgaaaatggggggattaccttcttcccagttcaggttaacgttggcggccaggcccaagctgtgactggaagcatccagcccctatccgcccaggcgctggccgggagcctgtcttctcagcaggttacagggaccacactccaagtccctggtcaggtggccattcagcagatctcccctggtgggcagcagcaaaaacagggacagtctgtaaccagttccagtaatagacccagaaagactagctcactgtcccttttctttcggaaagtgtatcacctagctgctgtcagattgcgggacctctgcgcaaagctggacatctccgatgaactaagaaagaagatctggacctgctttgaattcagcattatccagtgcccggaattgatgatggaccgccacctagaccagctgctgatgtgcgccatttacgtgatggccaaggtgacgaaagaagataaaagtttccaaaacatcatgagatgttaccgtacacaaccacaagcacggagccaggtataccgaagcgtcctgattaaaggcaaacgaaagcggcggaattcaggatcctcagacagcagaagccaccagaattcccccaccgaactgaataaggaccgcacctccagggactcttctccggttatgagatcctcctccacactgcccgtcccccaaccctccagtgcaccgccgacacctactagactcactggggctaatagcgatatggaagaggaggagcgcggtgatttgatacagttttataataacatttacataaaacagatcaaaacgttcgcgatgaagtattctcaggcaaacatggacgcccctcccctgtctccctatccttttgtcaggacagggtctccacgacggatacaactctcccagaaccatcccgtgtatatctctcctcataagaacgagacaatgctgagccctcgggaaaagatcttctactatttcagtaactcaccctccaaacgccttcgtgagatcaattcgatgatacgtacaggcgaaactcccacgaagaagcgcggcattctcctagaggacggctccgagtcacccgctaaaagaatttgccccgagaatcacagtgcccttctgaggagactccaggatgtggccaatgacagggggtcacattag

SEQ ID NO: 316257 - DNA, 3420 bp, Artificial Sequence
  derived and/or modified sequence
atgccgtcaggaggtgaccagagcccccctccaccaccccctcctcctgcagcggctgcttcagacgaagaagaagaggacgacggggaagctgaagatgccgctccccctgcagaatctcctactccacagatccagcagcggtttgacgagttgtgtagccgcttgaacatggatgaggcagcacgggctgaggcttgggattcctataggtctatgtctgagagctacacactagagggaaatgaccttcactggctggcgtgtgccctgtatgtggcatgccgcaagtcagtgccgaccgtaagtaagggtaccgtcgaagggaactacgtttccctgactaggattttaaagtgctccgaacagtcgctcatcgagttcttcaacaaaatgaagaagtgggaggacatggccaacttgccccctcacttccgcgaacgcacagagagattagagaggaacttcactgtgagcgccgtgatcttcaagaagtacgagcccatcttccaggacatatttaaatatccacaggaggaacaacctcggcagcagagaggcaggaagcagagaagacaaccatgcacggtgagcgagatttttcacttttgttgggtcctgtttatatacgccaagggcaactttcctatgatctccgatgacctggtaaattcttaccatctgcttctgtgtgctctcgatctggtgtacggtaacgcactccaatgcagcaacaggaaggaactggtaaaccccaattttaagggcttaagtgaggattttcacgcgaaggacagtaaacccagctcagaccctccgtgcatcattgagaaactctgctccctccatgatggactggtgctggaggccaagggcattaaagagcacttttggaaaccctacataagaaagctttacgaaaagaaactgctaaaaggaaaagaagagaatctgaccggcttcctggagcctgggaattttggagaatccttcaaagctatcaataaagcttatgaggaatatgtgctttctgtgggaaacttagatgagcgtatcttcctgggagaggatgcagaggaggaaatcggtacgctatctcgttgcctgaacgcaggtagtggcactgagacagcggagcgggttcagatgaagaatatcctgcagcagcacttcgataagagcaaggctcttaggatctccacccccctgacaggggtgcggtacatcaaggaaaacagcccatgtgtgacgcctgtgtccaccgccactcattccttatcccggctacacacaatgctgaccgggctcaggaatgccccaagtgagaagctcgagcagatcctaagaacttgcagccgggaccctactcaggccatcgcaaaccggctcaaggagatgttcgaaatttacagtcagcattttcaacccgacgaagacttttcgaactgtgcaaaggagattgcatccaagcactttagatttgcagagatgctctattacaaagtcctcgaaagtgttatcgagcaggaacagaaacggcttggggatatggacttgtccggaattctcgagcaagatgcttttcatcgttccttactagcgtgctgcttggaagtcgtcaccttttcatacaaaccacccggaaacttcccctttataacagaaatctttgacgtacctctttatcacttttataaagtgattgaagtgtttattcgtgctgaagacggcctttgccgtgaagttgtgaagcacctcaaccagatagaggagcagatacttgatcatttggcatggaaacccgaaagccctctgtgggagaagatacgcgacaatgagaacagagtgccaacatgtgaggaggtgatgcccccacaaaatctggagcgagcagacgaaatttgcatagcgggttcccccctgacccctaggcgggtgactgaggttagagccgataccggagggctgggccgaagtattacatcacctactacactgtatgacaggtatagctcaccaccagcatcgactacgcgcaggcggctgttcgtagagaatgacagccccagtgatggaggaacgcctggtcgcatgccaccccaaccattggttaacgccgtcccagtccaaaacgtcagcggagaaaccgtctccgtgaccccagtgccaggacagacattggtgactatggcgactgcgacagttactgccaacaatgggcagactgttacaatcccggtccagggcatagccaacgagaatgggggaatcacattttttcccgtccaggtgaacgtggggggacaggctcaggccgtgaccggatcgatccaaccactgtcagctcaggcgctggctggctctctgtcctcccagcaggtgacaggaactacactgcaggtccccggacaggttgccatccagcaaatcagccccggaggccagcagcagaagcagggccagagcgttacctccagcagcaaccggccacggaaaacaagcagcctgagtctgttcttccgcaaggtgtatcacctagcagcagtgcggttaagggacctgtgcgccaagctggatattagcgatgagctgaggaaaaaaatctggacgtgctttgaattttctattattcagtgtcccgaactaatgatggacagacatctggaccagctcctgatgtgtgcaatttacgtgatggcaaaggttaccaaagaagacaagtcatttcagaatataatgagatgttataggacgcagccccaggctaggtcccaggtctatcggtcagtcttgattaagggaaagcgtaaaaggcggaacagtggaagtagcgactcaaggagtcatcaaaactcccccacagagctgaacaaggataggacctcccgtgactcttcgccagtgatgaggtccagttccacactccccgtgccacagcctagctccgcccctccaactcccacccgcctgacaggggcaaattccgatatggaagaggaggagcggggtgaccttatccaattttacaataacatatacatcaagcaaatcaaaacctttgcaatgaagtattcgcaagcaaacatggacgcacctcccctttccccatacccctttgtccggactggctctcctcgtagaatccagcttagccagaaccatccagtgtatatttccccccataaaaatgaaacgatgcttagcccacgagagaagattttctactatttcagcaatagcccaagcaaacggctcagagagataaacagcatgataagaacaggggagacacccacaaagaagcgagggatactgttggaggatggcagcgaatcacccgctaagagaatttgtcctgagaatcactcagctcttctgagacggctccaggacgtcgccaatgacagaggttcccactag

SEQ ID NO: 316258 - DNA, 4876 bp, Artificial Sequence
  derived and/or modified sequence
gcggcgcaggcgcggtgcgggcggcggacgggcgggcgcttcgccgtttgaatggctgcgggcccgggccctcacctcacctgaggtccggccgcccaggggtgcgctatgccgtcgggaggtgaccagtcgccaccgcccccgcctccccctccggcggcggcagcctcggatgaggaggaggaggacgacggcgaggcggaagacgccgcgccgcctgccgagtcgcccacccctcagatccagcagcggttcgacgagctgtgcagccgcctcaacatggacgaggcggcgcgggccgaggcctgggacagctaccgcagcatgagcgaaagctacacgctggagggaaatgatcttcattggttagcatgtgccttatatgtggcttgcagaaaatctgttccaactgtaagcaaagggacagtggaaggaaactatgtatctttaactagaatcctgaaatgttcagagcagagcttaatcgaattttttaataagatgaagaagtgggaagacatggcaaatctacccccacatttcagagaacgtactgagagattagaaagaaacttcactgtttctgctgtaatttttaagaaatatgaacccatttttcaggacatctttaaataccctcaagaggagcaacctcgtcagcagcgaggaaggaaacagcggcgacagccctgtactgtgtctgaaattttccatttttgttgggtgctttttatatatgcaaaaggtaatttccccatgattagtgatgatttggtcaattcttatcacctgctgctgtgtgctttggacttagtttatggaaatgcacttcagtgttctaatcgtaaagaacttgtgaaccctaattttaaaggcttatctgaagattttcatgctaaagattctaaaccttcctctgaccccccttgtatcattgagaaactgtgttccttacatgatggcctagttttggaagcaaaggggataaaggaacatttctggaaaccctatattaggaaactttatgaaaaaaagctccttaagggaaaagaagaaaatctcactgggtttctagaacctgggaactttggagagagttttaaagccatcaataaggcctatgaggagtatgttttatctgttgggaatttagatgagcggatatttcttggagaggatgctgaggaggaaattgggactctctcaaggtgtctgaacgctggttcaggaacagagactgctgaaagggtgcagatgaaaaacatcttacagcagcattttgacaagtccaaagcacttagaatctccacaccactaactggtgttaggtacattaaggagaatagcccttgtgtgactccagtttctacagctacgcatagcttgagtcgtcttcacaccatgctgacaggcctcaggaatgcaccaagtgagaaactggaacagattctcaggacatgttccagagatccaacccaggctattgctaacagactgaaagaaatgtttgaaatatattctcagcatttccagccagacgaggatttcagtaattgtgctaaagaaattgccagcaaacattttcgttttgcggagatgctttactataaagtattagaatctgttattgagcaggaacaaaaaagactaggagacatggatttatctggtattctggaacaagatgcgttccacagatctctcttggcctgctgccttgaggtcgtcactttttcttataagcctcctgggaattttccatttattactgaaatatttgatgtgcctctttatcatttttataaggtgatagaagtattcattagagcagaagatggcctttgtagagaggtggtaaaacaccttaatcagattgaagaacagatcttagatcatttggcatggaaaccagagtctccactctgggaaaaaattagagacaatgaaaacagagttcctacatgtgaagaggtcatgccacctcagaacctggaaagggcagatgaaatttgcattgctggctcccctttgactcccagaagggtgactgaagttcgtgctgatactggaggacttggaaggagcataacatctccaaccacattatacgataggtacagctccccaccagccagcactaccagaaggcggctatttgttgagaatgatagcccctctgatggagggacgcctgggcgcatgcccccacagcccctagtcaatgctgtccctgtgcagaatgtatctggggagactgtttctgtcacaccagttcctggacagactttggtcaccatggcaaccgccactgtcacagccaacaatgggcaaacggtaaccattcctgtgcaaggtattgccaatgaaaatggagggataacattcttccctgtccaagtcaatgttggggggcaggcacaagctgtgacaggctccatccagcccctcagtgctcaggccctggctggaagtctgagctctcaacaggtgacaggaacaactttgcaagtccctggtcaagtggccattcaacagatttccccaggtggccaacagcagaagcaaggccagtctgtaaccagcagtagtaatagacccaggaagaccagctctttatcgcttttctttagaaaggtataccatttagcagctgtccgccttcgggatctctgtgccaaactagatatttcagatgaattgaggaaaaaaatctggacctgctttgaattctccataattcagtgtcctgaacttatgatggacagacatctggaccagttattaatgtgtgccatttatgtgatggcaaaggtcacaaaagaagataagtccttccagaacattatgcgttgttataggactcagccgcaggcccggagccaggtgtatagaagtgttttgataaaagggaaaagaaaaagaagaaattctggcagcagtgatagcagaagccatcagaattctccaacagaactaaacaaagatagaaccagtagagactccagtccagttatgaggtcaagcagcaccttgccagttccacagcccagcagtgctcctcccacacctactcgcctcacaggtgccaacagtgacatggaagaagaggagaggggagacctcattcagttctacaacaacatctacatcaaacagattaagacatttgccatgaagtactcacaggcaaatatggatgctcctccactctctccctatccatttgtaagaacaggctcccctcgccgaatacagttgtctcaaaatcatcctgtctacatttccccacataaaaatgaaacaatgctttctcctcgagaaaagattttctattacttcagcaacagtccttcaaagagactgagagaaattaatagtatgatacgcacaggagaaactcctactaaaaagagaggaattcttttggaagatggaagtgaatcacctgcaaaaagaatttgcccagaaaatcattctgccttattacgccgtctccaagatgtagctaatgaccgtggttcccactgaggttagtctcttgtattaaactcttcacaaaatctgtttagcagcagcctttaatgcatctagattatggagcttttttccttaatccagctgatgagttacagcctgttagtaacatgaggggacattttggtgagaaatgggacttaactccttccagtgtccttagaacattttaattcatcccaactgtctttttttccctaccattcagtgattactgtcaaggctgcttagaatccaaacttggatttttgactctggcaaagcttttagaaatactgcaagaaaatgatgtgtacccaaacgtgagcataggaggcttctgttgacgtactccaacagaagaactgtgtttcaagttcaatcctacctgttttgtggtcagctgtagtcctcataaaaagcaaaacaaaaattaggtattttgtcctaaaacacctggtaggagtgtgtgattttttgcattcctgacaaaggagagcacacccaggtttggaggtcctaggtcattagccctcgtctcccgttccctttgtgcacatcttccctctccccattcggtgtggtgcagtgtgaaaagtccttgattgttcgggtgtgcaatgtctgagtgaacctgtataagtggaggcactttagggctgtaaaatgcatgattttgtaacccagattttgctgtatatttgtgatagcactttctacaatgtgaactttattaaatacaaaacttccaggctaaacatccaatattttctttaatgcttttatatttttttaaaatgttaaaacccctatagccaccttttgggaatgttttaaattctccagttttttgttatatagggatcaaccagctaagaaaagattttaatcaagttgaattgaggggattaatatgaaaacttatgacctcttcctttaggagggagttatctaaaagaaatgtctattaaggtgatatatttaaaaatatttttgggtgttcctggcagtttaaaaaaattggttggagaatttaggtttttattagtaccatagtaccatttatacaaattagaaaatgttatttaacagctgaattatctatacatatctttattaatcactattgttccagcagttttcaagtcaaattaataatcttattagggagaaaattcaattgtaaattgaatcagtataaacaaagttactaggtaacttcatattgctgagagaaatatggaacttacattgttcaattagaatagtgttctgcaaaaatatttataaaacttctcaagatactgctactgtaattttatatgaagataagtgtatttttcaataaagcatttataaatta

SEQ ID NO: 316259 - protein, 849 aa, Artificial Sequence
  derived and/or modified sequence
MESRCVAQAGMQWHDLGSLQPLPPRFKRFFCLSLLSSCEYSKAINKAYEEYVLSVGNLDERIFLGEDAEEEIGTLSRCLNAGSGTETAERVQMKNILQQHFDKSKALRISTPLTGVRYIKENSPCVTPVSTATHSLSRLHTMLTGLRNAPSEKLEQILRTCSRDPTQAIANRLKEMFEIYSQHFQPDEDFSNCAKEIASKHFRFAEMLYYKVLESVIEQEQKRLGDMDLSGILEQDAFHRSLLACCLEVVTFSYKPPGNFPFITEIFDVPLYHFYKVIEVFIRAEDGLCREVVKHLNQIEEQILDHLAWKPESPLWEKIRDNENRVPTCEEVMPPQNLERADEICIAGSPLTPRRVTEVRADTGGLGRSITSPTTLYDRYSSPPASTTRRRLFVENDSPSDGGTPGRMPPQPLVNAVPVQNVSGETVSVTPVPGQTLVTMATATVTANNGQTVTIPVQGIANENGGITFFPVQVNVGGQAQAVTGSIQPLSAQALAGSLSSQQVTGTTLQVPGQVAIQQISPGGQQQKQGQSVTSSSNRPRKTSSLSLFFRKVYHLAAVRLRDLCAKLDISDELRKKIWTCFEFSIIQCPELMMDRHLDQLLMCAIYVMAKVTKEDKSFQNIMRCYRTQPQARSQVYRSVLIKGKRKRRNSGSSDSRSHQNSPTELNKDRTSRDSSPVMRSSSTLPVPQPSSAPPTPTRLTGANSDMEEEERGDLIQFYNNIYIKQIKTFAMKYSQANMDAPPLSPYPFVRTGSPRRIQLSQNHPVYISPHKNETMLSPREKIFYYFSNSPSKRLREINSMIRTGETPTKKRGILLEDGSESPAKRICPENHSALLRRLQDVANDRGSH

SEQ ID NO: 316260 - protein, 518 aa, Artificial Sequence
  derived and/or modified sequence
MISDDLVNSYHLLLCALDLVYGNALQCSNRKELVNPNFKGLSEDFHAKDSKPSSDPPCIIEKLCSLHDGLVLEAKGIKEHFWKPYIRKLYEKKLLKGKEENLTGFLEPGNFGESFKAINKAYEEYVLSVGNLDERIFLGEDAEEEIGTLSRCLNAGSGTETAERVQMKNILQQHFDKSKALRISTPLTGVRYIKENSPCVTPVSTATHSLSRLHTMLTGLRNAPSEKLEQILRTCSRDPTQAIANRLKEMFEIYSQHFQPDEDFSNCAKEIASKHFRFAEMLYYKVLESVIEQEQKRLGDMDLSGILEQDAFHRSLLACCLEVVTFSYKPPGNFPFITEIFDVPLYHFYKVIEVFIRAEDGLCREVVKHLNQIEEQILDHLAWKPESPLWEKIRDNENRVPTCEEVMPPQNLERADEICIAGSPRRIQLSQNHPVYISPHKNETMLSPREKIFYYFSNSPSKRLREINSMIRTGETPTKKRGILLEDGSESPAKRICPENHSALLRRLQDVANDRGSH

SEQ ID NO: 316261 - DNA, 2550 bp, Artificial Sequence
  derived and/or modified sequence
atggagagcagatgcgtggcccaggccggcatgcagtggcacgacctgggcagcctgcagcccctgccccccagattcaagagattcttctgcctgagcctgctgagcagctgcgagtacagcaaggccatcaacaaggcctacgaggagtacgtgctgagcgtgggcaacctggacgagagaatcttcctgggcgaggacgccgaggaggagatcggcaccctgagcagatgcctgaacgccggcagcggcaccgagaccgccgagagagtgcagatgaagaacatcctgcagcagcacttcgacaagagcaaggccctgagaatcagcacccccctgaccggcgtgagatacatcaaggagaacagcccctgcgtgacccccgtgagcaccgccacccacagcctgagcagactgcacaccatgctgaccggcctgagaaacgcccccagcgagaagctggagcagatcctgagaacctgcagcagagaccccacccaggccatcgccaacagactgaaggagatgttcgagatctacagccagcacttccagcccgacgaggacttcagcaactgcgccaaggagatcgccagcaagcacttcagattcgccgagatgctgtactacaaggtgctggagagcgtgatcgagcaggagcagaagagactgggcgacatggacctgagcggcatcctggagcaggacgccttccacagaagcctgctggcctgctgcctggaggtggtgaccttcagctacaagccccccggcaacttccccttcatcaccgagatcttcgacgtgcccctgtaccacttctacaaggtgatcgaggtgttcatcagagccgaggacggcctgtgcagagaggtggtgaagcacctgaaccagatcgaggagcagatcctggaccacctggcctggaagcccgagagccccctgtgggagaagatcagagacaacgagaacagagtgcccacctgcgaggaggtgatgcccccccagaacctggagagagccgacgagatctgcatcgccggcagccccctgacccccagaagagtgaccgaggtgagagccgacaccggcggcctgggcagaagcatcaccagccccaccaccctgtacgacagatacagcagcccccccgccagcaccaccagaagaagactgttcgtggagaacgacagccccagcgacggcggcacccccggcagaatgcccccccagcccctggtgaacgccgtgcccgtgcagaacgtgagcggcgagaccgtgagcgtgacccccgtgcccggccagaccctggtgaccatggccaccgccaccgtgaccgccaacaacggccagaccgtgaccatccccgtgcagggcatcgccaacgagaacggcggcatcaccttcttccccgtgcaggtgaacgtgggcggccaggcccaggccgtgaccggcagcatccagcccctgagcgcccaggccctggccggcagcctgagcagccagcaggtgaccggcaccaccctgcaggtgcccggccaggtggccatccagcagatcagccccggcggccagcagcagaagcagggccagagcgtgaccagcagcagcaacagacccagaaagaccagcagcctgagcctgttcttcagaaaggtgtaccacctggccgccgtgagactgagagacctgtgcgccaagctggacatcagcgacgagctgagaaagaagatctggacctgcttcgagttcagcatcatccagtgccccgagctgatgatggacagacacctggaccagctgctgatgtgcgccatctacgtgatggccaaggtgaccaaggaggacaagagcttccagaacatcatgagatgctacagaacccagccccaggccagaagccaggtgtacagaagcgtgctgatcaagggcaagagaaagagaagaaacagcggcagcagcgacagcagaagccaccagaacagccccaccgagctgaacaaggacagaaccagcagagacagcagccccgtgatgagaagcagcagcaccctgcccgtgccccagcccagcagcgccccccccacccccaccagactgaccggcgccaacagcgacatggaggaggaggagagaggcgacctgatccagttctacaacaacatctacatcaagcagatcaagaccttcgccatgaagtacagccaggccaacatggacgccccccccctgagcccctaccccttcgtgagaaccggcagccccagaagaatccagctgagccagaaccaccccgtgtacatcagcccccacaagaacgagaccatgctgagccccagagagaagatcttctactacttcagcaacagccccagcaagagactgagagagatcaacagcatgatcagaaccggcgagacccccaccaagaagagaggcatcctgctggaggacggcagcgagagccccgccaagagaatctgccccgagaaccacagcgccctgctgagaagactgcaggacgtggccaacgacagaggcagccactag

SEQ ID NO: 316262 - DNA, 1557 bp, Artificial Sequence
  derived and/or modified sequence
atgatcagcgacgacctggtgaacagctaccacctgctgctgtgcgccctggacctggtgtacggcaacgccctgcagtgcagcaacagaaaggagctggtgaaccccaacttcaagggcctgagcgaggacttccacgccaaggacagcaagcccagcagcgaccccccctgcatcatcgagaagctgtgcagcctgcacgacggcctggtgctggaggccaagggcatcaaggagcacttctggaagccctacatcagaaagctgtacgagaagaagctgctgaagggcaaggaggagaacctgaccggcttcctggagcccggcaacttcggcgagagcttcaaggccatcaacaaggcctacgaggagtacgtgctgagcgtgggcaacctggacgagagaatcttcctgggcgaggacgccgaggaggagatcggcaccctgagcagatgcctgaacgccggcagcggcaccgagaccgccgagagagtgcagatgaagaacatcctgcagcagcacttcgacaagagcaaggccctgagaatcagcacccccctgaccggcgtgagatacatcaaggagaacagcccctgcgtgacccccgtgagcaccgccacccacagcctgagcagactgcacaccatgctgaccggcctgagaaacgcccccagcgagaagctggagcagatcctgagaacctgcagcagagaccccacccaggccatcgccaacagactgaaggagatgttcgagatctacagccagcacttccagcccgacgaggacttcagcaactgcgccaaggagatcgccagcaagcacttcagattcgccgagatgctgtactacaaggtgctggagagcgtgatcgagcaggagcagaagagactgggcgacatggacctgagcggcatcctggagcaggacgccttccacagaagcctgctggcctgctgcctggaggtggtgaccttcagctacaagccccccggcaacttccccttcatcaccgagatcttcgacgtgcccctgtaccacttctacaaggtgatcgaggtgttcatcagagccgaggacggcctgtgcagagaggtggtgaagcacctgaaccagatcgaggagcagatcctggaccacctggcctggaagcccgagagccccctgtgggagaagatcagagacaacgagaacagagtgcccacctgcgaggaggtgatgcccccccagaacctggagagagccgacgagatctgcatcgccggcagccccagaagaatccagctgagccagaaccaccccgtgtacatcagcccccacaagaacgagaccatgctgagccccagagagaagatcttctactacttcagcaacagccccagcaagagactgagagagatcaacagcatgatcagaaccggcgagacccccaccaagaagagaggcatcctgctggaggacggcagcgagagccccgccaagagaatctgccccgagaaccacagcgccctgctgagaagactgcaggacgtggccaacgacagaggcagccactag

SEQ ID NO: 316263 - DNA, 2550 bp, Artificial Sequence
  derived and/or modified sequence
atggaaagcagatgcgtggcgcaggctggaatgcagtggcacgacttgggctctctgcagccgctgcccccacggttcaagaggtttttctgcctttcattactcagctcttgtgaatacagcaaggccattaacaaagcctacgaggagtatgtcctctctgtggggaacctggacgaacggatcttcctgggtgaggacgctgaagaggaaatcgggacactgtctagatgtttgaatgcaggcagcgggaccgagaccgcggaaagagtccaaatgaagaatatccttcagcagcactttgacaaaagcaaagcattgcgcataagtacccctctcacgggagtaagatacatcaaggaaaactctccatgtgtgactcctgtttcaacagcaactcattcactgagcagattgcacacgatgctcacaggactgcggaatgcacccagtgagaagctagaacagatcctgcggacctgctccagggacccaacacaggctatcgcaaatcgcctgaaggagatgtttgaaatttacagtcagcacttccaacccgatgaggacttttcaaattgcgccaaggagattgcctccaaacactttaggttcgctgagatgctctactataaggtgctggaaagcgtgatagagcaggagcagaagcgcctcggtgatatggacctgtccggcatcctggaacaggatgcttttcacaggtcactgcttgcctgctgtcttgaggtggtgactttctcgtataaaccccctggcaacttccccttcattactgagattttcgatgtgccgctgtaccacttttacaaggtaattgaggtgttcatccgagccgaagatggtttatgtagggaggtagtaaaacacctaaaccagatagaagagcagattctggatcacttagcctggaaacctgaaagccccttgtgggagaaaatcagggacaatgagaaccgggtgccaacctgtgaagaggtgatgcccccccagaacctggaacgggcggatgaaatttgcatcgctggaagtccactgacgcccaggcgtgtcacagaggtgagagccgacacgggaggtctgggtaggagcatcacctccccaactaccctctacgaccgatatagttcgcctcccgcctctacaaccagaagaagactgttcgtagagaacgattcccccagtgacggcgggacaccaggacgcatgccaccacagccgttggtaaacgcagtgcctgtgcagaacgtcagtggcgagacagtctctgtcactcctgtgcctggccagaccctcgtaacaatggccacagccacagtgacggccaacaatggccagacagtaaccatccctgtccaggggatagccaacgagaacggagggattacatttttccctgtccaagtgaatgtggggggccaagcccaagctgtgaccggtagcatacagccgctcagcgctcaggccttagccgggtcgctttcatcccagcaggtgacaggcacaactctgcaagtgcccggtcaggtcgctattcagcagatttctcctgggggccagcagcaaaagcaaggccagtctgtgacaagttccagcaaccgccctcggaaaacctcctctctgagtctgttcttccgaaaagtgtaccatctcgcggccgtcaggctgagggacctgtgcgccaaactggacatttcagacgagctgagaaagaaaatttggacttgctttgagttctcaatcatacagtgtcccgaactgatgatggatcggcatctcgatcaactgctcatgtgcgcgatctacgtgatggccaaagtgactaaagaggacaagagttttcagaatattatgcggtgctatcgcacacaaccacaggcacgtagccaggtctatagaagcgtgctgatcaaaggaaaacgtaagcgaagaaatagtggctcatcggatagccgctcacatcaaaatagcccgaccgaattgaacaaggacaggaccagtagggactcttcccccgtcatgcggagctcctctaccctgcctgtgccccaaccgtcttccgcccctccgacaccaacacggttgacgggagccaattcagacatggaggaggaggagcgcggggatctaatccaattttacaataatatttacattaagcaaatcaagaccttcgccatgaaatatagtcaggccaacatggacgccccaccactaagcccttatccttttgttagaacaggctcacccagacgaattcagctgtcccagaatcatcctgtgtatatatcaccgcacaagaacgagacaatgctgagccccagagagaaaatcttctactacttctctaactcgccatccaagcgactcagggagattaactccatgataagaacgggcgaaactcccaccaagaagcgcggaatcctgctggaagacgggagtgaaagtccagctaaacggatatgcccggagaaccattctgcactgttgcgacggctgcaggatgtagccaatgaccgggggtcccactag

SEQ ID NO: 316264 - DNA, 1557 bp, Artificial Sequence
  derived and/or modified sequence
atgatctctgacgacctcgtaaattcctaccaccttctgctgtgcgcgttggatctggtgtatggaaacgcactgcagtgctcaaaccggaaagaactggtcaatccaaacttcaaggggctctcggaggattttcacgctaaggactcaaaacccagcagtgaccctccatgtataatcgaaaaattatgttccctccatgatggtttagtcctggaggccaaggggatcaaagagcatttttggaagccttatattcgcaaactctacgaaaaaaagctccttaagggaaaggaggagaatctcaccggcttcctggagcctgggaactttggagagagcttcaaggctattaataaagcctatgaagagtacgtgttgagcgtgggcaacctcgatgagaggatttttctcggagaggatgctgaggaggaaattggcacattgagcaggtgcttgaacgctggaagtggcactgaaacggctgaacgcgtacagatgaaaaacattcttcagcagcactttgataaatccaaggcactcagaatttccacaccactcacaggcgtgcgctacattaaggagaattccccgtgtgtcacacccgtgtccacagcaactcacagcttaagcagattacataccatgctaaccgggctccggaacgcaccgtccgaaaaactggaacagatcttacgtacctgcagcagagaccctacccaggcaatagccaacagactcaaggagatgttcgagatctattcacagcacttccagccagatgaggattttagtaattgtgccaaggaaatcgccagcaagcactttcgctttgccgagatgctatactataaagtgctggagagcgtcatcgaacaggagcaaaaaaggctgggggatatggatctttcagggatcctggaacaggacgcgttccacagatccctccttgcctgttgtctggaagttgtcaccttttcatataagcctcccgggaacttcccttttataaccgagatcttcgacgttccattgtatcacttttacaaggtgatagaagtgtttatccgtgcagaggatggactgtgcagggaagttgtgaagcacctaaatcagatcgaggagcagattttggaccatctggcctggaaaccggagtcgcccctatgggagaaaatccgggataatgaaaatcgtgtaccaacatgcgaagaggtaatgccccctcagaatttggaacgagctgatgagatctgtatcgccggctccccacgtaggatccaactgtcacagaaccaccccgtttacatttcaccccacaagaatgagaccatgctgtcaccgagagaaaaaatattttactacttctcgaattcgcccagtaaacgcctgcgcgagattaacagcatgatcaggactggcgagacacccacaaaaaaacgcgggatcttactcgaagacgggagtgaaagcccagccaagaggatctgccccgaaaatcattccgcgctgctcagaagactccaagacgtcgcaaatgaccgcggcagccactag

SEQ ID NO: 316265 - DNA, 2550 bp, Artificial Sequence
  derived and/or modified sequence
atggagagccgctgtgtggcccaggccggcatgcagtggcatgacctgggcagcctgcagcccctgcccccacgcttcaagcgcttcttctgcctgagcctgctgagcagctgtgagtacagcaaggccatcaacaaggcctatgaggagtatgtgctgtctgtgggcaacctggatgagcgcatcttcctgggggaggatgctgaggaggagatcggcaccctgagccgctgcctgaatgccggcagcggcacagaaacagctgagcgggtgcagatgaagaacatcctgcagcagcactttgacaagagcaaggccctgcgcatcagcacccccctgactggagtgcgctacatcaaggagaacagcccctgtgtgacccctgtgtccacagccacccacagcctgagccggctgcacaccatgctgaccggcctgagaaatgcccccagcgagaagctggagcagatcctgcggacctgcagccgggaccccacccaggccatcgccaaccggctgaaggagatgtttgagatctacagccagcacttccagccagatgaggacttcagcaactgtgccaaggagatcgccagcaagcacttccgctttgctgagatgctgtactacaaggtgctggagagcgtgattgagcaggagcagaagaggctgggggacatggacctgagcggcatcctggagcaggatgccttccacaggagcctgctggcctgctgcctggaggtggtgaccttctcctacaagcccccaggcaacttccccttcatcacagagatctttgatgtgcccctgtaccacttctacaaggtgattgaggtgttcatccgggcagaagatggcctgtgccgggaggtggtgaagcacctgaaccagatcgaggagcagatcctggaccacctggcctggaagccagagagccccctgtgggagaagatccgggacaatgaaaatagagtgcccacctgtgaggaggtgatgccaccccagaacctggagcgggcagatgagatctgcatcgccggcagccccctgaccccccggcgggtgacagaggtgcgggctgacacaggaggcctgggccgcagcatcaccagccccaccaccctgtatgaccgctacagcagccccccagccagcaccacccggcggcggctgtttgtggagaatgacagccccagtgatggcggcaccccaggccgcatgccaccccagcccctggtgaatgctgtgcctgtgcagaatgtgtctggagagaccgtgtctgtgacccctgtgcccggccagaccctggtgaccatggccacagccaccgtgacagccaacaacggccagacagtgaccatccctgtgcagggcatcgccaatgaaaatggaggcatcaccttcttccctgtgcaggtgaatgtgggcggccaggcccaggccgtgacaggcagcatccagcccctgagcgcccaggccctggccggcagcctgagcagccagcaggtgacaggcaccaccctgcaggtgcccggccaggtggccatccagcagatcagccctgggggccagcagcagaagcagggccagagcgtgaccagcagcagcaaccggcccaggaagaccagcagcctgagcctcttcttcaggaaggtgtaccacctggccgctgtgcggctgcgggacctgtgtgccaagctggacatcagtgatgagctgaggaagaagatctggacctgctttgagttcagcatcatccagtgcccagagctgatgatggacagacacctggaccagctgctgatgtgtgccatctacgtgatggccaaggtgaccaaggaggacaagagcttccagaacatcatgcgctgctaccgcacccagccccaggcccggagccaggtgtacagatctgtgctgatcaagggcaagaggaagagaagaaattctggcagcagtgacagccgcagccaccagaacagccccacagagctgaacaaggacaggaccagccgggacagcagccctgtgatgaggagcagcagcaccctgcctgtgccccagcccagcagcgccccacccacccccacccggctgactggagccaacagcgacatggaggaggaggagcggggggacctgatccagttctacaacaacatctacatcaagcagatcaagacctttgccatgaagtacagccaggccaacatggatgccccacccctgagcccctacccctttgtgaggacaggcagcccccggcgcatccagctgagccagaaccaccctgtgtacatcagcccccacaagaatgagaccatgctgagcccccgggagaagatcttctactacttcagcaacagccccagcaagaggctgcgggagatcaacagcatgatcagaactggagagacccccaccaagaagaggggcatcctgctggaggatggcagcgagagccctgccaagaggatctgcccagagaaccacagcgccctgctgcggcggctgcaggatgtggccaatgaccggggcagccactag

SEQ ID NO: 316266 - DNA, 1557 bp, Artificial Sequence
  derived and/or modified sequence
atgatcagtgatgacctggtgaacagctaccacctgctgctgtgtgccctggacctggtgtatggaaatgccctgcagtgcagcaacaggaaggagctggtgaaccccaacttcaagggcctgtctgaggacttccacgccaaggacagcaagcccagcagtgaccccccctgcatcatcgagaagctgtgcagcctgcatgatggcctggtgctggaggccaagggcatcaaggagcacttctggaagccctacatcaggaagctgtatgagaagaagctgctgaagggcaaggaggagaacctgaccggcttcctggagcccggcaactttggagagagcttcaaggccatcaacaaggcctatgaggagtatgtgctgtctgtgggcaacctggatgagcgcatcttcctgggggaggatgctgaggaggagatcggcaccctgagccgctgcctgaatgccggcagcggcacagaaacagctgagcgggtgcagatgaagaacatcctgcagcagcactttgacaagagcaaggccctgcgcatcagcacccccctgactggagtgcgctacatcaaggagaacagcccctgtgtgacccctgtgtccacagccacccacagcctgagccggctgcacaccatgctgaccggcctgagaaatgcccccagcgagaagctggagcagatcctgcggacctgcagccgggaccccacccaggccatcgccaaccggctgaaggagatgtttgagatctacagccagcacttccagccagatgaggacttcagcaactgtgccaaggagatcgccagcaagcacttccgctttgctgagatgctgtactacaaggtgctggagagcgtgattgagcaggagcagaagaggctgggggacatggacctgagcggcatcctggagcaggatgccttccacaggagcctgctggcctgctgcctggaggtggtgaccttctcctacaagcccccaggcaacttccccttcatcacagagatctttgatgtgcccctgtaccacttctacaaggtgattgaggtgttcatccgggcagaagatggcctgtgccgggaggtggtgaagcacctgaaccagatcgaggagcagatcctggaccacctggcctggaagccagagagccccctgtgggagaagatccgggacaatgaaaatagagtgcccacctgtgaggaggtgatgccaccccagaacctggagcgggcagatgagatctgcatcgccggcagcccccggcgcatccagctgagccagaaccaccctgtgtacatcagcccccacaagaatgagaccatgctgagcccccgggagaagatcttctactacttcagcaacagccccagcaagaggctgcgggagatcaacagcatgatcagaactggagagacccccaccaagaagaggggcatcctgctggaggatggcagcgagagccctgccaagaggatctgcccagagaaccacagcgccctgctgcggcggctgcaggatgtggccaatgaccggggcagccactag

SEQ ID NO: 316267 - DNA, 2550 bp, Artificial Sequence
  derived and/or modified sequence
atggagagccggtgcgtggcccaggccggcatgcagtggcacgacctgggcagcctgcagcccctaccgccgaggtttaagaggtttttttgtctctcactcctgagctcctgtgaatacagcaaggcgataaataaagcttatgaggagtatgtgttgagcgttggcaacctggatgagcgaatatttctaggtgaagatgccgaggaggagataggtacactatcgaggtgcctgaatgcaggaagtggcactgagaccgctgagcgagttcagatgaagaacattcttcagcagcactttgacaaaagcaaagctttgcgaatctccacacccctgaccggagtgcggtacatcaaagagaactctccctgcgttacacccgtgagcaccgcaacacattcccttagcaggctgcacactatgctgacagggctcaggaacgctcctagcgagaagttagaacagatcctgcggacttgctcccgcgatcccacgcaggccattgcaaaccgactgaaggaaatgttcgagatttatagccaacacttccagccagacgaggacttttcgaattgtgctaaggagatagcaagcaagcatttccgctttgccgaaatgctgtactacaaggtgttagaatctgtgattgaacaagaacagaagcgcctgggcgacatggatctgtctgggatcctggaacaggacgcctttcatagatccttgctggcatgttgtcttgaggtggtgacgttttcctacaagcctcccgggaatttccctttcatcacagagatatttgacgtccctctgtaccacttctataaagtcatcgaggtgttcatcagggccgaggacggactatgccgcgaagtagtcaaacatctgaaccagatcgaagaacaaatcctcgaccacctggcctggaagcctgaaagcccattgtgggaaaagatccgcgacaatgagaatagggtgcctacttgcgaggaggtcatgcctccacagaacctggagagggccgatgaaatctgtatagccggatctccgctcacgccccgccgggtgactgaggtcagagccgacactggagggctgggccggtcaattactagtccaactaccctgtatgatcgatactcctcgccaccagctagtactacacgcaggcggctgtttgtggagaacgacagcccgtctgatggggggacaccagggagaatgcccccacagccgctggtgaacgcagttcccgtgcagaatgtttccggagagaccgtgagcgtcacaccggtgcccggccaaactctggtgacgatggccaccgcaacggtaaccgccaataacggacagaccgtcacaatcccagtgcagggcatcgctaacgagaatggggggataaccttctttcctgtccaggtcaatgtcgggggtcaggcgcaggccgtgaccggctctatccagccactttctgcccaggctctagcaggtagcctcagttcccaacaggtcactggtaccacactccaggtgcccggccaggtggcgattcagcagatctcccccggcggacagcagcagaagcaggggcagagtgtgaccagttcatctaaccggcccaggaaaaccagctcactttccctcttcttcagaaaggtgtatcatctggccgctgttcgcttaagggatctctgtgctaaactcgatatctcagatgagctacgcaaaaaaatttggacatgcttcgaattctcaataattcagtgtccagagctgatgatggatcgccacctagaccagctactgatgtgtgctatctacgttatggcaaaagtgaccaaagaagacaaatctttccagaatatcatgcggtgttataggacccagccccaggcaagatcacaagtgtaccggtctgtgctgataaaagggaagaggaagaggaggaactcaggctcatccgactctcggagccaccagaatagtcctacggaactcaacaaagacagaacctcccgtgacagttcccctgtgatgcgctcgtcctccacactgcctgtcccgcagccatctagtgcacctccaacccctactagactcacgggcgctaatagtgacatggaggaggaagagcgcggcgacctaatccagttttataacaacatctacataaaacagattaagaccttcgcaatgaagtattcacaggccaacatggacgctcctccgctttcaccttatcctttcgtcaggaccgggagtcccagaaggattcaacttagccaaaaccacccagtctacatctcccctcataagaacgagaccatgttgtcccctagggagaagattttctattacttcagtaatagcccgagtaagcgccttcgcgaaatcaactctatgattcggaccggcgagacccctacaaagaagcggggaatcctgctggaggacggctccgagagccccgccaagcgtatctgtcctgaaaatcactcagctcttctccggcgtctgcaggacgtggctaatgaccgcggttcacattag

SEQ ID NO: 316268 - DNA, 1557 bp, Artificial Sequence
  derived and/or modified sequence
atgatcagcgacgacctggtgaacagctaccacctgctgctgtgcgccctggatctagtctatgggaacgctcttcagtgttctaaccgcaaggaacttgttaacccaaacttcaaagggctgtcagaggatttccacgctaaagactcgaaaccaagcagcgaccctccgtgcatcatcgagaaactgtgcagcctgcacgacggccttgtgctggaggcaaaagggattaaggagcacttctggaagccctatatcagaaagttatacgagaagaagctgctgaaaggaaaggaggaaaatctgactggctttctggagccgggcaactttggggagagttttaaggctatcaataaggcttacgaagaatacgtactgtctgtggggaacctcgacgagcgcatatttcttggagaggatgctgaggaggaaattgggaccttgagtcgctgcctgaatgccggaagtggtaccgagacagcggagagagtccagatgaagaatattctacaacagcacttcgacaaatccaaggccctgcgaatctctacccccctgaccggggtgagatatatcaaggagaactctccctgcgttacacccgtaagtacggctacccacagtctgagtcggctccatacaatgttgaccggcctgcgaaacgcgccaagtgaaaagttggagcaaattctgcggacatgctctagggaccctacccaggctattgcgaatcgccttaaggaaatgttcgagatctacagccagcacttccagcccgacgaggacttctctaattgtgccaaagaaatcgcctcaaaacacttcaggtttgccgagatgctctattacaaagtgctggagtccgtcatcgagcaagaacagaagcgcctgggcgatatggatcttagcggcattctcgagcaggatgccttccacaggagcctgctggcgtgttgtctggaagtcgtgactttctcatacaaacctcccgggaatttcccatttatcactgagatttttgacgtgccgttgtatcatttctataaggtgatagaagtctttattcgcgccgaggacggcctctgtcgggaggtggtaaagcacctcaatcagatcgaggagcagatacttgaccacctagcttggaagcccgagtcacccctctgggagaagattcgcgataacgaaaatagggttccaacatgcgaggaggtcatgccacctcaaaatttggaacgcgccgatgagatttgtatcgccgggtctccaagaagaatacaactgagccagaaccacccagtgtatatctctccacacaagaatgagacaatgctgtcaccccgtgagaagattttttactacttcagcaattctccgtctaagagactccgggaaattaactctatgatccgtaccggcgaaacaccaactaagaaaaggggaatcttgctggaagacggcagtgaaagtcccgctaagaggatctgccccgagaaccacagcgcactcctacggagattgcaggacgtcgctaacgacagaggttcacactag

SEQ ID NO: 316269 - DNA, 2550 bp, Artificial Sequence
  derived and/or modified sequence
atggaatccagatgtgttgcccaggccggtatgcagtggcatgacctcggaagcttgcagcctctgcctccccgttttaagcgctttttctgcctctccctcctctcgtcatgtgagtacagcaaggcaatcaacaaagcatatgaagagtacgtcctgagcgtgggtaacttggacgagcggattttcctgggggaggacgctgaagaagagattggcacgttgtcaaggtgcctgaatgccggatcaggcacagagacagctgaaagggttcaaatgaagaacatcctgcagcagcattttgacaagtctaaggcgctccggatctctacaccgctgacaggagtcagatacattaaggagaactctccgtgtgtaactccagtgagcaccgctactcacagcctgtcacgtctgcatactatgctgacaggactcagaaacgcaccctcagagaaactcgaacaaatccttagaacatgtagcagggaccccactcaggccatcgcaaacaggctgaaggagatgttcgaaatctactctcagcactttcagcccgacgaagatttctccaattgtgccaaggagatcgcttccaaacacttccggtttgcggaaatgctgtactacaaggtgctggagagcgtgatcgaacaggagcaaaaaagactcggggacatggatttgtctgggatacttgagcaggatgctttccaccgcagcctcctagcttgttgtctggaggtggtgacctttagctataaaccccctggcaacttcccgtttattaccgagattttcgatgtgccactctatcacttttataaagttatcgaggtgttcatacgagcagaggacggcctctgcagagaagtggtcaaacacttgaatcagattgaggagcagatcctagaccaccttgcatggaagcctgagtctcccctctgggaaaaaatcagggataacgaaaatcgggttcccacgtgtgaagaggtcatgccccctcagaaccttgaacgagctgacgagatctgcatagccggatcccctcttaccccacggagggttaccgaagtacgggctgatacagggggactcggcaggtctataacttctcccaccaccctgtatgaccggtactcaagcccacctgcctccactactcggagaaggcttttcgttgaaaacgacagcccatccgatgggggaactcccggtcggatgcccccacagccgctcgtcaatgcagtacccgtccagaatgtatccggggaaacggtctctgtgactccagtaccaggccagaccctggttactatggcgacggcaacagtgacggcgaacaatgggcagaccgtgacgataccagtccaggggattgctaatgagaatggaggcatcactttcttccctgtgcaagttaacgtgggaggccaggcacaggcggtcaccggtagcatccaacctctgtccgcacaggccttagccggatctctcagttcccaacaagtgactggaaccacactccaggtacctggtcaagtagctatccaacagataagccccggaggccagcagcagaaacagggccaaagcgtcacgagtagcagcaatagacccaggaaaaccagttccctgtccctttttttccgtaaagtgtaccacctggccgcagtgcgccttagagacctgtgcgccaagttggacatctctgatgagcttaggaagaagatctggacttgtttcgagttctccatcattcaatgcccggagctgatgatggacaggcatctggatcagttgctcatgtgcgcaatatatgtgatggccaaggtcaccaaggaggataagtctttccagaatataatgcgctgctaccggacacagccccaggcccgatcccaagtatacagatccgttctgattaaaggcaaaaggaagagacgcaattccggcagctctgattcgagatctcatcagaatagtcccaccgaactgaacaaagaccgcacaagtcgggacagttctcccgtgatgcggagcagttccacactacccgtcccccaaccctcatccgcaccgccaacccctacccggttaacaggcgcaaactcagatatggaggaagaggagcgcggagacctcatacagttttacaataatatttacatcaagcagattaaaacatttgctatgaagtactcccaggctaatatggacgcccctccgctgagtccgtaccccttcgtgcgtaccgggtcacctcgaaggattcagctatcacagaaccatcccgtgtacatcagtcctcacaaaaacgaaacaatgctgtccccccgtgagaaaatattctactatttctccaatagcccttccaaacgcttgagggagatcaacagcatgatccggaccggagagacacccacaaagaagcggggaattctgctggaggatgggtccgagagcccagctaaacggatatgccccgagaaccacagcgctctgctccgtaggctccaggatgtggctaatgatagaggctcacactag

SEQ ID NO: 316270 - DNA, 1557 bp, Artificial Sequence
  derived and/or modified sequence
atgatttctgacgacctggtcaactcataccacctcctgctgtgtgccctggacctagtttatggcaacgccttgcagtgctctaaccgcaaggagctggtgaatcctaattttaaagggctgtccgaggattttcatgccaaagatagtaaaccaagctcagaccccccttgcataatcgagaaactgtgtagtcttcatgatgggctggtcctagaggctaagggcataaaggagcatttttggaagccctacattaggaagctatacgagaagaagctcctcaaaggaaaggaggaaaacttgactggatttctggagcccggaaattttggggagagtttcaaagctattaataaagcttacgaggagtatgtcctttccgtaggcaatctcgacgaaagaatatttctgggcgaggatgccgaagaggaaatcggcactctgtccagatgcctgaacgcaggctccgggactgagactgcggagcgcgttcaaatgaagaacatcctgcagcagcatttcgataaatcaaaggcacttcgcatctccaccccgctgaccggtgtgcggtatataaaagaaaattccccctgcgtcaccccagttagtacggccactcattctctctctcgcctccataccatgctcaccgggctccggaacgctccatccgagaaactcgagcagatactcaggacttgcagccgcgatcctacccaggcgattgcgaaccgactgaaggaaatgtttgaaatctactcgcagcattttcagcctgacgaggacttctctaattgtgcaaaagagattgcaagcaaacacttcagatttgctgaaatgctgtactacaaagtgctggagtctgtgatcgaacaagagcaaaagcgcttaggcgacatggatctttcaggtatcctagaacaagatgcatttcaccgcagcctcttagcatgttgcctggaggtggtcactttctcctacaagcctcccggaaattttccattcatcacagagatttttgacgttccactctaccacttctacaaggtcattgaagtgttcatacgcgcagaggatggcctgtgcagagaagtggttaagcacttgaatcaaatcgaagaacagattcttgatcacttggcgtggaaacccgaatcaccgctgtgggaaaaaatccgggataacgagaacagggtgccgacatgcgaggaagtgatgccgccacagaacctcgaacgcgctgacgagatctgcatcgcaggcagccccaggcggatccagctgagccagaatcaccccgtgtatatcagtccccacaaaaacgaaaccatgctttcaccaagagagaagatattctattacttttcgaacagcccctctaagcgactccgggagatcaatagtatgatccgaaccggcgagaccccaaccaagaagcggggaattttgctggaggatggaagtgaaagcccagcaaaaagaatttgtcccgaaaatcattctgctctcctcagaaggcttcaggacgtggccaatgataggggtagccactag

SEQ ID NO: 316271 - DNA, 4465 bp, Artificial Sequence
  derived and/or modified sequence
gagagcttacagtacagtcagcgagatgaggcaggtatgaagattccagtgcatgcaatgcagtgtgttataaaagtcccatgactaccagagggaatacagatgtaaaacttaggaggaaaagaaatcactctggatgagccagtcaggcgacagccctgtactgtgtctgaaattttccatttttgttgggtgctttttatatatgcaaaaggtaatttccccatgattagtgatgatttggtcaattcttatcacctgctgctgtgtgctttggacttagtttatggaaatgcacttcagtgttctaatcgtaaagaacttgtgaaccctaattttaaaggcttatctgaagattttcatgctaaagattctaaaccttcctctgaccccccttgtatcattgagaaactgtgttccttacatgatggcctagttttggaagcaaaggggataaaggaacatttctggaaaccctatattaggaaactttatgaaaaaaagctccttaagggaaaagaagaaaatctcactgggtttctagaacctgggaactttggagagagtttatggagtctcgctgtgtcgcccaggctggaatgcagtggcatgatctcggctcactgcaacctctgcctcccaggttcaagcgattcttctgcctcagcctcctgagtagctgtgaatacagtaaagccatcaataaggcctatgaggagtatgttttatctgttgggaatttagatgagcggatatttcttggagaggatgctgaggaggaaattgggactctctcaaggtgtctgaacgctggttcaggaacagagactgctgaaagggtgcagatgaaaaacatcttacagcagcattttgacaagtccaaagcacttagaatctccacaccactaactggtgttaggtacattaaggagaatagcccttgtgtgactccagtttctacagctacgcatagcttgagtcgtcttcacaccatgctgacaggcctcaggaatgcaccaagtgagaaactggaacagattctcaggacatgttccagagatccaacccaggctattgctaacagactgaaagaaatgtttgaaatatattctcagcatttccagccagacgaggatttcagtaattgtgctaaagaaattgccagcaaacattttcgttttgcggagatgctttactataaagtattagaatctgttattgagcaggaacaaaaaagactaggagacatggatttatctggtattctggaacaagatgcgttccacagatctctcttggcctgctgccttgaggtcgtcactttttcttataagcctcctgggaattttccatttattactgaaatatttgatgtgcctctttatcatttttataaggtgatagaagtattcattagagcagaagatggcctttgtagagaggtggtaaaacaccttaatcagattgaagaacagatcttagatcatttggcatggaaaccagagtctccactctgggaaaaaattagagacaatgaaaacagagttcctacatgtgaagaggtcatgccacctcagaacctggaaagggcagatgaaatttgcattgctggctcccctttgactcccagaagggtgactgaagttcgtgctgatactggaggacttggaaggagcataacatctccaaccacattatacgataggtacagctccccaccagccagcactaccagaaggcggctatttgttgagaatgatagcccctctgatggagggacgcctgggcgcatgcccccacagcccctagtcaatgctgtccctgtgcagaatgtatctggggagactgtttctgtcacaccagttcctggacagactttggtcaccatggcaaccgccactgtcacagccaacaatgggcaaacggtaaccattcctgtgcaaggtattgccaatgaaaatggagggataacattcttccctgtccaagtcaatgttggggggcaggcacaagctgtgacaggctccatccagcccctcagtgctcaggccctggctggaagtctgagctctcaacaggtgacaggaacaactttgcaagtccctggtcaagtggccattcaacagatttccccaggtggccaacagcagaagcaaggccagtctgtaaccagcagtagtaatagacccaggaagaccagctctttatcgcttttctttagaaaggtataccatttagcagctgtccgccttcgggatctctgtgccaaactagatatttcagatgaattgaggaaaaaaatctggacctgctttgaattctccataattcagtgtcctgaacttatgatggacagacatctggaccagttattaatgtgtgccatttatgtgatggcaaaggtcacaaaagaagataagtccttccagaacattatgcgttgttataggactcagccgcaggcccggagccaggtgtatagaagtgttttgataaaagggaaaagaaaaagaagaaattctggcagcagtgatagcagaagccatcagaattctccaacagaactaaacaaagatagaaccagtagagactccagtccagttatgaggtcaagcagcaccttgccagttccacagcccagcagtgctcctcccacacctactcgcctcacaggtgccaacagtgacatggaagaagaggagaggggagacctcattcagttctacaacaacatctacatcaaacagattaagacatttgccatgaagtactcacaggcaaatatggatgctcctccactctctccctatccatttgtaagaacaggctcccctcgccgaatacagttgtctcaaaatcatcctgtctacatttccccacataaaaatgaaacaatgctttctcctcgagaaaagattttctattacttcagcaacagtccttcaaagagactgagagaaattaatagtatgatacgcacaggagaaactcctactaaaaagagaggaattcttttggaagatggaagtgaatcacctgcaaaaagaatttgcccagaaaatcattctgccttattacgccgtctccaagatgtagctaatgaccgtggttcccactgaggttagtctcttgtattaaactcttcacaaaatctgtttagcagcagcctttaatgcatctagattatggagcttttttccttaatccagctgatgagttacagcctgttagtaacatgaggggacattttggtgagaaatgggacttaactccttccagtgtccttagaacattttaattcatcccaactgtctttttttccctaccattcagtgattactgtcaaggctgcttagaatccaaacttggatttttgactctggcaaagcttttagaaatactgcaagaaaatgatgtgtacccaaacgtgagcataggaggcttctgttgacgtactccaacagaagaactgtgtttcaagttcaatcctacctgttttgtggtcagctgtagtcctcataaaaagcaaaacaaaaattaggtattttgtcctaaaacacctggtaggagtgtgtgattttttgcattcctgacaaaggagagcacacccaggtttggaggtcctaggtcattagccctcgtctcccgttccctttgtgcacatcttccctctccccattcggtgtggtgcagtgtgaaaagtccttgattgttcgggtgtgcaatgtctgagtgaacctgtataagtggaggcactttagggctgtaaaatgcatgattttgtaacccagattttgctgtatatttgtgatagcactttctacaatgtgaactttattaaatacaaaacttccaggctaaacatccaatattttctttaatgcttttatatttttttaaaatgttaaaacccctatagccaccttttgggaatgttttaaattctccagttttttgttatatagggatcaaccagctaagaaaagattttaatcaagttgaattgaggggattaatatgaaaacttatgacctcttcctttaggagggagttatctaaaagaaatgtctattaaggtgatatatttaaaaatatttttgggtgttcctggcagtttaaaaaaattggttggagaatttaggtttttattagtaccatagtaccatttatacaaattagaaaatgttatttaacagctgaattatctatacatatctttattaatcactattgttccagcagttttcaagtcaaattaataatcttattagggagaaaattcaattgtaaattgaatcagtataaacaaagttactaggtaacttcatattgctgagagaaatatggaacttacattgttcaattagaatagtgttctgcaaaaatatttataaaacttctcaagatactgctactgtaattttatatgaagataagtgtatttttcaataaagcatttataaat

SEQ ID NO: 316272 - protein, 1324 aa, Artificial Sequence
  derived and/or modified sequence
MSRRKQAKPQHFQSDPEVASLPRRDGDTEKGQPSRPTKSKDAHVCGRCCAEFFELSDLLLHKKNCTKNQLVLIVNENPASPPETFSPSPPPDNPDEQMNDTVNKTDQVDCSDLSEHNGLDREESMEVEAPVANKSGSGTSSGSHSSTAPSSSSSSSSSSGGGGSSSTGTSAITTSLPQLGDLTTLGNFSVINSNVIIENLQSTKVAVAQFSQEARCGGASGGKLAVPALMEQLLALQQQQIHQLQLIEQIRHQILLLASQNADLPTSSSPSQGTLRTSANPLSTLSSHLSQQLAAAAGLAQSLASQSASISGVKQLPPIQLPQSSSGNTIIPSNSGSSPNMNILAAAVTTPSSEKVASSAGASHVSNPAVSSSSSPAFAISSLLSPASNPLLPQQASANSVFPSPLPNIGTTAEDLNSLSALAQQRKSKPPNVTAFEAKSTSDEAFFKHKCRFCAKVFGSDSALQIHLRSHTGERPFKCNICGNRFSTKGNLKVHFQRHKEKYPHIQMNPYPVPEHLDNIPTSTGIPYGMSIPPEKPVTSWLDTKPVLPTLTTSVGLPLPPTLPSLIPFIKTEEPAPIPISHSATSPPGSVKSDSGGPESATRNLGGLPEEAEGSTLPPSGGKSEESGMVTNSVPTASSSVLSSPAADCGPAGSATTFTNPLLPLMSEQFKAKFPFGGLLDSAQASETSKLQQLVENIDKKATDPNECIICHRVLSCQSALKMHYRTHTGERPFKCKICGRAFTTKGNLKTHYSVHRAMPPLRVQHSCPICQKKFTNAVVLQQHIRMHMGGQIPNTPVPDSYSESMESDTGSFDEKNFDDLDNFSDENMEDCPEGSIPDTPKSADASQDSLSSSPLPLEMSSIAALENQMKMINAGLAEQLQASLKSVENGSIEGDVLTNDSSSVGGDMESQSAGSPAISESTSSMQALSPSNSTQEFHKSPSIEEKPQRAVPSEFANGLSPTPVNGGALDLTSSHAEKIIKEDSLGILFPFRDRGKFKNTACDICGKTFACQSALDIHYRSHTKERPFICTVCNRGFSTKGNLKQHMLTHQMRDLPSQLFEPSSNLGPNQNSAVIPANSLSSLIKTEVNGFVHVSPQDSKDTPTSHVPSGPLSSSATSPVLLPALPRRTPKQHYCNTCGKTFSSSSALQIHERTHTGEKPFACTICGRAFTTKGNLKVHMGTHMWNSTPARRGRRLSVDGPMTFLGGNPVKFPEMFQKDLAARSGSGDPSSFWNQYAAALSNGLAMKANEISVIQNGGIPPIPGSLGSGNSSPVSGLTGNLERLQNSEPNAPLAGLEKMASSENGTNFRFTRFVEDSKEIVTS

SEQ ID NO: 316273 - DNA, 5143 bp, Artificial Sequence
  derived and/or modified sequence
ttattctgccccagctgatgtttgagccagcatgtcgcggaggaagcaagcgaagcctcaacatttccaatccgaccccgaagtggcctcgctcccccggcgagatggagacacagaaaagggtcaaccgagtcgccctactaagagcaaggatgcccacgtctgtggccggtgctgtgccgagttctttgaattatcagatcttctgctccacaagaagaactgtactaaaaatcaattagttttaatcgtaaatgaaaatccagcctccccacccgaaaccttctcccccagcccccctcctgataatcctgatgaacaaatgaatgacacagttaacaaaacagatcaagtggactgcagcgacctttcagaacacaacggacttgacagggaagagtccatggaggtggaggccccggttgctaacaaaagcggcagcggcacttccagcggcagccacagcagtaccgccccaagcagcagcagcagcagcagcagcagcagcggcggcggcggcagctcctccacaggtacctcagcgatcacaacctctctacctcaactcggggacctgacaacactgggcaacttctccgtaatcaacagcaacgtcatcatcgagaacctccagagcaccaaggtggcggtggcccagttctcccaggaagcgaggtgcggcggggcctctgggggcaagctggccgtcccagccctcatggaacaactcctagctctgcagcagcagcagatccaccagctgcaattgatcgaacagattcgtcaccaaatattgctgttggcttctcagaatgcagacttgccaacatcttctagtccttctcaaggtactttacgaacatctgccaaccccttgtccacgctaagttcccatttatctcagcagctggcagcagcagctggattggcacagagcctcgccagccaatctgccagcattagtggtgtgaaacagctacccccaatccagctacctcagagcagttctggcaacaccatcattccatccaacagcggctcttctcccaatatgaacatattggcagcggcagttaccaccccgtcctctgaaaaagtggcttcaagtgctggggcctcccatgtcagcaacccagcggtctcatcatcgtcctcaccagcttttgcaataagcagtttattaagtcctgcgtctaatccacttctacctcagcaagcctccgctaactcggttttccccagccctttgcccaacatcggaacaactgcagaggatttaaactccttgtctgccttggcccagcaaagaaaaagcaagccaccaaatgtcactgcctttgaagcgaaaagtacttccgatgaggcattcttcaaacacaagtgcaggttctgcgcgaaggtctttgggagtgacagtgccttgcagatccacttgcgttcccataccggagagaggccattcaagtgcaacatctgcgggaacaggttctccaccaaggggaatctgaaagtccactttcagcgccacaaagagaaataccctcatatccagatgaacccctatcctgtgcctgagcatttggacaatatccccacgagtactggcatcccatatggcatgtccatccctccagagaagccagtcaccagctggctagacaccaaaccagtcctgcctactctgaccacttcagtcggcctgccgttgcccccaaccctcccaagcctcatacccttcatcaagacggaagagccagcccccatccccatcagccattctgccaccagccccccaggctcagtcaaaagtgactccgggggccctgagtcagccacaagaaacctaggtgggctcccagaggaagccgaagggtccactctgccaccctctggtggcaaaagcgaagagagtggcatggtcaccaactcagtcccgacggcgagcagtagcgtcctgagctccccagcggcagactgcggccccgcgggcagtgccaccaccttcaccaaccctttgttgccgctcatgtccgagcagttcaaggccaagtttccttttgggggactcctggactcagctcaggcatcagagacgtccaagcttcagcaactggtagaaaacattgacaagaaggccactgaccccaatgagtgcatcatctgccaccgggttctcagctgccagagcgccttgaaaatgcactacaggacacacactggggagaggccctttaagtgtaagatctgtggccgggctttcaccacgaaagggaatcttaaaacccactacagtgtccatcgtgctatgcccccgctcagagtccagcattcctgccccatctgccagaagaagttcacgaacgctgtggtcctgcagcagcacatccgaatgcatatgggaggccagatccccaacaccccagtccccgacagctactctgagtccatggagtctgacacaggttcctttgatgagaaaaattttgatgacctagacaacttctctgatgaaaacatggaagactgtcctgagggcagcatccctgatacacctaagtctgcagacgcctcccaagacagcttatcctcttcgcctttgcccctcgagatgtcgagcatcgctgctttggaaaatcagatgaagatgatcaatgctggcctggcagagcagctacaggccagcctgaagtcagtggagaatgggtccatcgagggggatgtcctgaccaatgattcatcctcagtgggtggtgacatggaaagccaaagtgctggcagcccagccatctcagagtctacctcttccatgcaggctctgtccccgtccaacagcacgcaggagttccacaagtcacccagcattgaggagaaaccacagagagcggtcccaagcgagtttgccaatggtttgtctcccaccccagtgaatggtggggctttggatttgacatctagtcacgcagagaaaatcatcaaagaagattctttggggatcctcttcccttttagagaccggggtaaatttaaaaacactgcttgtgacatttgtggcaaaacatttgcttgtcagagtgccttggacattcactatagaagtcataccaaagagagaccatttatttgcacagtttgcaatcgtggcttttccacaaagggtaatttgaagcagcacatgttgacacatcagatgcgagatctgccatcccagctctttgagcccagttccaaccttggccccaatcagaactcagcggtgattcccgccaactcgttgtcatctctcatcaagacagaggtcaacggcttcgtgcatgtttctcctcaggacagtaaggacacccccaccagtcacgtcccgtctgggcctctgtcttcctctgccacatccccagttctgctccctgctctgcccaggagaactcccaagcagcactactgcaacacatgtggcaaaaccttctcctcatcgagtgccctgcagattcacgagagaactcacactggagagaaaccctttgcttgcactatttgtggaagagctttcacgactaaaggcaatcttaaggtacacatgggcactcacatgtggaatagcacccctgcacgacggggtcggcggctctctgtggatggccccatgacatttctaggaggcaatcccgtcaagttcccagaaatgttccagaaggatttggcggcaagatcaggaagtggggatccttccagcttctggaatcagtatgcagcagcgctctccaacgggctggcgatgaaggccaacgagatctccgtcattcagaacggtggcatccctccaattcctggaagcctcggcagtgggaacagctcacctgttagtgggctgacgggaaacctggagaggctccagaactcagagcccaatgctcccctggccggcctggagaaaatggcaagcagtgagaacggaaccaacttccgcttcacccgcttcgtggaggacagcaaggagatcgtcacgagttaaagcagctcgggctggagacatagcattcattcctgttcagaatgcgacctatggtggcctcctactccttgccccccaccccgccccgccccttccttctgttccccagatctatgaactacaacattatgaagacattcttttgtaccttgttcaactttagagttctaagaaagcttatttattagcgatataaccttgctttgcaaacagaatgcaagcgttaactttggtcttctgtattttggactaaatactaattgactagagtgctgtaaacttgctgtaacatttatggcaattgcaagttgccctgctaggcagttgtaatctggcattaacttattttctatatccagtttaatatgaatctggtgttgatgcaatgcctcagtgatgcattagatctctaataaagtctgtatatacatgtacactttgatcctgctggaaaattttatcagcaaacacattgtctaatctttcaaaacagatttaaggaaaggactgaaagtacagactgaacagtgtggttctttgaaaggtttggttttttaatttttattctaaaattcaacctttttttttgtcgatttaaccatttccattttgaactgctatttgtattgtgctttttacttgagtcgtcttcaatgttaataagtttctgtacagtaataagcacgcagaattctttagagaaaaagaaaacaagcgttgttttggtagttgaaactgagacgtaacattttgccttgtaggtatattcacgatagaaaatgtgtgctggaatttcacaatgctgctaagtatagcatcttgaacaaccttcagtggagaaaatgtagatgctcttgtatatacaataagaaatatcactttcattcaaatgtacatatgttccttacaagagcaaatgcttcttcttgatcaagagagcaggtatagtgtttgtttattttgtcttaggtatggaagaaaaaaattggactgttacatgcactttcttggaaagttgaaaggaaagggggggtccaatttctttaacatttaatacttactaacaacagagatactgtaattttactcaagtaatcaaatacattttttttgcaacagataaaacaaaatactgtg

SEQ ID NO: 316274 - DNA, 3975 bp, Artificial Sequence
  derived and/or modified sequence
atgtcccggaggaaacaagccaagccccagcactttcaaagtgatccagaagtggcgtccctgcctcgtagggatggcgacaccgagaaagggcagccgtctcgccctaccaagtccaaagacgcccatgtgtgtggccggtgctgcgccgagttcttcgaactatcggatctgctcctgcataagaaaaactgtacaaagaatcaactggtgctgatagtaaatgaaaacccagctagcccacccgagaccttttcaccctccccacctcctgacaatcctgatgaacaaatgaatgacaccgtgaataaaacagaccaggtggattgcagcgatttgtctgagcacaacggcctcgatcgtgaggagtctatggaggtggaagcccccgtcgccaataagagcggatcaggcacgagcagcggctctcatagcagcacagcaccttcttcgtctagctcgtcgagcagcagttcaggcgggggtggtagcagctccaccggtacctccgcgatcaccacaagcttgccccagctcggagacctgacaacattgggaaatttttcagttattaacagtaatgtgatcatagagaatctgcagtcaaccaaggttgccgtggcccagttctcgcaggaagctaggtgtggaggcgcctcgggcggcaagctggccgttcccgctctgatggagcaactactcgctctccagcagcagcagattcatcagctgcagctgattgagcaaatccgacaccaaattttattactagcatcccagaatgctgatcttcccacgtcatccagcccttctcagggaacactgagaacaagcgcaaacccactaagtactctgagctcccacctcagccaacagcttgcagccgcagcgggcctggcccagtctcttgcgagccagtctgcctctatatcaggagtcaagcagctgccccccatccagctgcctcagtcctcgagcggcaacaccatcatccccagtaattctggatcctctccaaacatgaacatcctggctgccgccgtgaccactccatcctccgagaaggtcgcttcttccgcaggtgcctctcacgtttctaacccggccgtcagctcttcatcctcacccgccttcgccatttcatcactgctgtcccctgccagcaatcctcttttaccccaacaggcctccgctaattcggtgtttccgagtcctctccccaacattggcacaaccgctgaagatttgaattccctgtccgcattggctcagcagcgcaaatcaaaaccacctaacgttacagcttttgaggctaaatcgacgagcgatgaggctttcttcaaacacaagtgccgattctgtgctaaagtgttcggcagcgactctgcactgcaaattcacctaagatcacacactggggagcgcccgtttaaatgcaacatctgcggcaacaggttttcaacaaaagggaaccttaaagtgcactttcagcggcacaaagaaaagtatcctcacatacagatgaatccataccctgtgccagagcaccttgacaatatcccgaccagtacggggattccttatggaatgtctataccccctgagaagccagttacttcttggctagataccaaacccgtattaccgacactgacaacatctgtaggcctgcctttacctccaaccctgcctagcttgatacctttcattaaaaccgaagaaccagcgccaattcctataagtcactctgccacatccccccctgggtcagttaaatccgacagtggagggccggaaagtgccacacgtaatctggggggtctgcccgaggaagctgaaggctctactctaccaccttccggaggtaaatccgaagaatcaggcatggtgacgaattccgtcccaacggcctccagtagcgtgctgtcgagccctgccgccgactgcggaccggccggaagtgcaacaacatttaccaacccattacttcccctgatgagcgaacagtttaaggctaagtttccattcgggggcctccttgattccgcacaggcctctgaaacttcgaagcttcagcaactcgtggaaaatattgacaaaaaagctaccgatcccaacgaatgtataatatgccaccgcgtcctcagttgccagtccgcactgaagatgcattaccgcacacatactggtgagcgaccttttaagtgtaaaatttgtggtcgcgcctttactactaaaggtaacctaaaaactcattactcagtacatcgggccatgccccctctacgagtgcaacactcttgtcccatatgccaaaagaagttcactaatgctgtggttttgcagcagcacatccgaatgcacatgggagggcaaatccccaacactcctgtgccagattcttactctgagagcatggagagtgatacaggtagctttgacgagaaaaacttcgacgacctagacaatttctccgatgagaacatggaagattgtcccgagggatcaatacccgacaccccaaagagtgccgatgcatcacaggacagtctttccagctctcctctgcccctcgagatgagttccatcgctgccctcgaaaatcagatgaaaatgatcaacgctggattagcagagcagctgcaggccagccttaaaagtgtggaaaacggttcaatcgaaggtgacgttttgaccaacgactcatcctctgtgggcggcgatatggaatctcagtcagccggcagtcctgcaatttccgaaagtactagtagtatgcaggcgctgtccccatccaatagtacacaggagttccacaagtctccctctatagaagagaagccccagcgtgccgttccctctgaatttgcaaatggactatctcccaccccggtcaacggaggcgccctggatctgacttcctcacatgctgaaaaaattatcaaggaggattctctgggcattttattccctttccgcgatcgcggaaagttcaagaacaccgcctgcgacatctgtggcaagactttcgcttgtcagagtgccttggacatacactacagatctcatacaaaagagcgacctttcatctgcaccgtttgtaatcgaggttttagtactaagggaaacctgaaacagcacatgctcacccaccagatgcgggacctgcccagccagctatttgaaccttcctcgaatcttggtccaaatcaaaatagtgccgtcatccccgctaactctctatccagcctgatcaagactgaggtcaacggattcgtccacgtgtccccacaagactccaaggatactccgacaagccatgtgccttcaggccccctgtccagctctgccacttcgcccgtgctgctgcctgctctcccaaggaggacccctaagcaacattactgtaacacctgcggcaagacgttctcgagctccagcgcacttcaaatccacgaacggacgcatacaggcgagaagccctttgcttgcaccatttgtggccgggcctttactactaaaggcaatctcaaagtgcacatgggtacacacatgtggaactccacccccgctcgcaggggtcggcgtctgtcagtggatggcccaatgactttcctcggagggaaccctgtcaagttcccagagatgtttcaaaaggatctggccgcccggtctgggtcaggcgaccctagctccttctggaatcaatacgccgctgcgttgagcaacggcctggccatgaaggccaacgaaatctccgttattcagaatggcgggatcccaccgattccaggttcactcggcagcgggaactcaagccccgtgtccggactgacgggcaatctggaacgtcttcaaaactcggagcctaacgcacctctagcaggactggagaaaatggctagctccgagaacggtactaattttcggtttacccggtttgttgaggatagcaaggaaattgttacctcctag

SEQ ID NO: 316275 - DNA, 3684 bp, Artificial Sequence
  derived and/or modified sequence
atgaacgacactgtaaataaaaccgaccaggtcgactgctccgacctaagcgagcacaatggcctggatagagaggagagcatggaggtcgaggcccctgtagcaaataaaagcggcagcgggacctcatccggaagccacagctccaccgccccttcttcatcctcatcctcttcctctagctccggaggcggcggatcctccagtaccgggacttctgctatcaccacctctctccctcaactcggggacctcacaacgctgggtaactttagcgtaatcaattctaacgttatcattgaaaatctgcagtctaccaaggtcgccgttgcgcaattcagccaagaggctcgttgtggcggcgcgtcggggggaaagctggctgtacccgcgctgatggagcaacttctggcactgcagcagcagcagattcaccagctccaactgatcgaacagattcggcaccagattcttctgctggcctctcagaacgccgacctgcccactagcagcagcccatcccaggggacactgagaacttccgctaatcccctgtcaacactgtcctcacaccttagtcagcagctggccgctgccgccggccttgcacagtctttggctagccagagcgcatcaattagcggggtcaagcaacttcctccgattcagttaccgcaatcctcatcgggcaatacaatcatcccatcgaattccggatctagcccaaacatgaacattctggcagctgctgtcaccactcctagcagcgaaaaagtggccagttctgctggagcctctcacgtctccaatccagccgtctcatcgtcctcttctcccgcgttcgcgatcagctcactgctttctccggcgtcaaacccactgctgccccaacaggccagcgccaactctgtgtttcccagccctttgcctaacattggaacaacggcagaagaccttaactccttatcagcccttgcacaacagaggaagtctaagcctccaaatgtgacggccttcgaggcaaagagtacttccgacgaagcattcttcaagcacaagtgtaggttctgtgcaaaagtatttgggagtgattctgctcttcagatccacctacgcagccataccggtgaacgtcccttcaaatgcaatatctgtggcaaccgtttctcgacgaaaggaaatctgaaagtccacttccagcggcataaagaaaaatacccacacatccagatgaatccctatcctgttccagagcatctggataatatccccacatcaaccggcattccttatggaatgtcaatccctcccgagaagcctgtgacctcctggctagacacaaaaccggtcctcccaaccctcaccacgagtgttggactgcctctccctcccacattaccatctctgatacccttcatcaaaacagaggaacctgcccccattccaattagtcattctgcgacaagccctcccggcagcgttaagtccgatagtggcggtcctgaaagcgctaccagaaatctgggtggcctgccagaagaggctgagggttccacgcttccgccatcagggggcaaatcagaggagagtggaatggtgacgaacagtgtgccgaccgcatccagtagcgttttgtctagtcccgcagctgactgcgggccagccggctccgcaactacgttcaccaatcctctgctccccttgatgagtgagcagttcaaggctaaattccccttcggagggcttcttgacagcgctcaggccagcgagacttcaaaactccagcagctcgtggaaaatatcgataaaaaagcgactgacccaaacgaatgcataatctgtcacagggtgctttcctgtcagtccgccctcaagatgcactatcggacccacacaggcgagaggcctttcaaatgtaaaatctgcggacgggcattcactaccaaaggcaacctcaagacccactattcagtccatagagctatgccacctctgcgtgtgcagcattcatgccccatttgtcagaaaaagttcacgaatgctgtggtactgcaacagcacatccggatgcacatgggcggacagatcccaaatacacctgtccctgacagctattcagaaagcatggaatcagatactggatcctttgacgagaagaacttcgacgacctggacaatttttccgacgaaaacatggaagactgcccagaaggaagcattccggacacacctaaatccgccgacgccagtcaggacagtttaagcagctccccgttgcctctggaaatgtcatctatagcagccctcgagaatcagatgaaaatgatcaatgccggcctagctgaacagctgcaggcgagtcttaagtccgtagaaaacggcagtattgagggggatgtgttaaccaacgactcatcttcagtcggaggagatatggagagccaaagtgctggatcaccagctatatccgaaagtacatcctcaatgcaggctctgagtcctagcaactcgacgcaagagtttcacaagtcacctagcattgaggagaagccacagagagccgtgccttccgagttcgccaatggtctttcaccaacacctgtcaatggtggtgcactcgacttgacatccagtcacgcggagaagatcattaaagaggattcccttggcattctgttcccattcagagatcgcggaaaattcaagaacacagcttgcgatatctgtggcaagactttcgcatgccagtcggctctggacatccattacagaagtcacactaaagagagaccgtttatctgcaccgtctgtaatagagggttctccaccaagggcaacctaaagcaacacatgttaacacaccaaatgcgcgatttgccttcccaactgttcgaaccctctagtaaccttgggcccaaccaaaactccgctgtgattcctgccaatagcttgtcttcactgattaagacagaggtgaatggttttgtgcacgtgtcacctcaggattctaaggatacccccacaagtcacgtacccagtggtcctttgtcaagctccgccaccagccctgtcctgctccccgccttgcctcgcagaactcctaagcagcattactgcaacacgtgcggcaagactttttcttcctcatccgccctccagattcatgaacgtactcacaccggtgagaagccatttgcttgtacgatttgcggcagggcatttaccacaaagggtaatctcaaagtgcatatgggcactcacatgtggaactcaaccccagcacggcgcggtaggcgactctccgtggatgggccgatgacgtttcttggcgggaatcctgtgaagtttcccgagatgtttcagaaggacttagccgccagatctggcagcggagatccctcttcattctggaatcaatacgcggctgccctgtccaacggcctcgcaatgaaggcaaacgagatttccgtgatccaaaatggcggcatccccccgatccctggatccctgggatccggtaatagttctcccgtttccggactcacggggaacttggaaaggttgcaaaacagtgagccaaacgcacctctggcagggttggagaagatggcctctagcgagaacggaactaactttagatttacacggttcgttgaagactcgaaggagattgttacatcttag

SEQ ID NO: 316276 - DNA, 3867 bp, Artificial Sequence
  derived and/or modified sequence
atgtcccgaagaaagcaggccaagccacagcacttccagagtgatcccgaggtcgctagtctaccacggcgcgacggagacactgagaaaggccagcccagccggccaactaaaagcaaggatgcccatgtctgcggtaggtgctgcgccgagttttttgaactgagcgatttactcttacacaagaaaaactgcaccaagaatcagctcgtgttaatagtcaacgaaaaccccgcctccccacctgagacattcagccctagtccacctccagacaatccggacgagcagatgaatgacactgtcaacaaaacggggtctcacagctcgactgcaccgtctagctcgagctccagttctagcagctccggcggcggcggttccagctccaccggaacaagtgctatcaccacttctctacctcagctgggcgatcttaccacactaggtaacttctcagtgatcaatagtaacgtgataatcgaaaacttgcaaagcacgaaggtagcagttgcccagttttcgcaggaagctcggtgcggcggggcctccggtggcaagctggcagttcctgccctaatggagcagttgctggcactgcaacagcagcagatccaccagcttcagcttatcgagcaaattcggcaccaaatactgctcctggcttctcagaacgcagatcttcccacgtccagcagtccgtctcagggaaccttgaggacatctgcaaatccactgtccacactcagcagccatctttcacagcagttagccgccgcagcgggcctagcacagtctctggcttcacagagtgcctcaattagcggggtcaaacaattgccacccatccagctgccacagtcttcatcgggtaatacaattattccttccaacagcggatctagcccgaacatgaatatcctggctgctgccgttaccactccttcttccgaaaaggtcgccagctcagcgggggcctcccacgtgtccaacccagccgtgtcgtcgtcttccagtcctgccttcgcgatttccagcttactgagccccgcctctaaccccctgctgccacagcaggctagcgcaaatagcgtgttcccatcccctttgcctaatatcggaaccaccgccgaggacctcaactccctgagcgccttagctcagcagcgcaaatctaaaccccctaatgttaccgcttttgaggcaaagagcacaagcgatgaagccttcttcaagcacaaatgcaggttctgcgccaaagtgttcggctctgacagtgctctccagatccatttgaggtcccacacaggagagagaccttttaaatgtaatatttgcggcaatcggtttagcactaagggcaacctaaaggtgcatttccaaagacataaggagaagtatccccacatccaaatgaacccttatccagttcctgaacatctcgataatattcctactagcacaggcattccatatggaatgagtatacctcctgagaagccagtgacctcttggctggataccaagcctgttctgcctacgctaacgacatcggtcggccttcctctgccaccaacacttccttctcttatcccctttataaaaaccgaagagccagcccctatcccaatatctcactccgctactagcccgcccggctcggtgaaatcagacagtggcggcccagaatccgcgacccgcaatctgggcggtctgcctgaggaggctgagggaagcacgctgcccccttccggcggtaaaagtgaagagagtggtatggtcactaactctgtgcctactgcgtcaagcagtgttctctcctcgccagccgccgattgcgggcctgctggatccgcaaccactttcactaacccgcttttaccgctaatgtctgaacaattcaaagccaagtttccgtttggggggctgctcgactctgcgcaagcttcagagaccagtaaacttcagcagctggtagagaacatcgataaaaaggccactgatcctaacgagtgtattatctgccatcgggtattgagctgtcagagcgctctgaagatgcactaccgcacgcacaccggcgagagaccctttaaatgcaagatttgtggtcgggcattcaccaccaaaggtaatctcaagacacattattctgtccatagagctatgcctcccctgcgcgtgcagcactcttgtcccatatgccaaaagaagttcactaatgcagtagtccttcaacagcacatacggatgcacatgggtggacagattcccaacactcctgtgcctgattcctattccgagtcaatggagtcagacactggcagctttgatgaaaagaatttcgatgacctggataatttctcagacgaaaacatggaggattgcccggaagggagcatccctgatactcctaagtcagcggatgcttctcaagattcgcttagctccagtcccctgcctcttgagatgtcctcaattgccgcacttgagaatcagatgaaaatgatcaacgccggattagctgagcagttgcaggcatccctaaaaagcgtggagaacgggagcattgagggagacgtcctgactaacgacagctctagtgtcggcggcgatatggaaagccagtcagccggttccccagctattagtgagtctacatctagcatgcaggctctgtcaccaagtaacagcacacaggaattccacaagtcaccctctatcgaggaaaagcctcaaagagcagtgccatcagagtttgctaacggattgtctcctacccccgtgaatggaggcgccctcgacctgactagctcccacgccgagaaaattatcaaggaagacagcctcgggattctgtttcccttcagggaccggggaaaattcaaaaacactgcttgcgacatctgcggaaagaccttcgcttgtcagagtgcgctcgacatccattatcgatcccatactaaggaaaggccattcatatgtacagtctgtaacaggggatttagtacaaagggtaatctaaagcagcacatgcttacccatcagatgagggacctgccttcccagctgtttgaacccagcagtaacctaggacctaaccagaacagtgccgtaatcccggccaacagcctgtcatctctgatcaaaaccgaagtgaatgggtttgtccatgtgtcaccccaggactctaaagacacacccacatctcacgtaccgagcggcccgctcagttcctcagccacttcccctgtgctgcttcctgccctccctcggagaactccaaaacagcattactgcaacacatgcggcaagacattttccagttccagtgctttacagatccacgaaagaacacataccggtgaaaagcccttcgcctgtactatctgtgggagagctttcaccacaaaggggaatttaaaggtgcacatgggtacgcacatgtggaactccactccagccaggcgaggacgtaggctcagcgtcgacggccctatgactttcctcggtggcaatcctgttaagtttcctgagatgttccaaaaagacctcgcggcacgctctggttccggtgacccctcctcattctggaatcagtatgcggccgccctaagcaatggcctggcaatgaaggcaaatgagatcagtgtgattcaaaatggcggaattccacccattccgggaagcctgggaagtggtaattcaagtcccgtcagcggcctgaccgggaacctggaaaggcttcaaaattcagagcctaatgcccccctggcgggcctggagaagatggcctcctctgaaaatgggactaactttcgcttcacaaggtttgtcgaggattccaaagaaatcgttacaagctag

SEQ ID NO: 316277 - DNA, 3975 bp, Artificial Sequence
  derived and/or modified sequence
atgagcaggaggaagcaggccaagccccagcacttccagagcgaccctgaggtggccagcctgcccaggagagatggagacacagagaagggccagcccagccggcccaccaagagcaaggatgcccacgtgtgtggccgctgctgtgccgagttctttgagctgagtgacctgctgctgcacaagaagaactgcaccaagaaccagctggtgctgattgtgaatgaaaatcctgccagccccccagagaccttcagccccagccccccaccagacaacccagatgagcagatgaatgacacagtgaacaagacagaccaggtggactgcagcgacctgtctgagcacaacggcctggaccgggaggagagcatggaggtggaggcccctgtggccaacaagagcggcagcggcaccagcagcggcagccacagcagcacagcccccagcagcagcagcagcagcagcagcagcagcggcggcggcggcagcagcagcacaggcaccagcgccatcaccaccagcctgccccagctgggggacctgaccaccctgggcaacttcagcgtcatcaacagcaatgtcatcatcgagaacctgcagagcaccaaggtggccgtggcccagttcagccaggaggcccgctgtggcggggccagcggcggcaagctggccgtgcctgccctgatggagcagctgctggccctgcagcagcagcagatccaccagctgcagctgattgagcagatccgccaccagatcctgctgctggccagccagaatgctgacctgcccaccagcagcagccccagccagggcaccctgcggaccagcgccaaccccctgagcaccctgagcagccacctgagccagcagctggccgctgctgctggcctggcccagagcctggccagccagagcgccagcatctctggagtgaagcagctgccccccatccagctgccccagagcagcagcggcaacaccatcatccccagcaacagcggcagcagccccaacatgaacatcctggccgctgctgtgaccacccccagcagcgagaaggtggccagcagcgctggggccagccacgtgagcaacccagctgtgagcagcagcagcagccctgcctttgccatcagcagcctgctgagccctgccagcaaccccctgctgccccagcaggccagcgccaacagcgtcttccccagccccctgcccaacatcggcaccacagctgaggacctgaacagcctgagcgccctggcccagcagaggaagagcaagccacccaacgtgacagcctttgaggccaagagcaccagtgatgaggccttcttcaagcacaagtgccgcttctgtgccaaggtgtttggaagtgacagcgccctgcagatccacctgcggagccacactggagagcggcccttcaagtgcaacatctgtggcaaccgcttcagcaccaagggcaacctgaaggtgcacttccagaggcacaaggagaagtacccccacatccagatgaacccctaccctgtgcctgagcacctggacaacatccccaccagcacaggcatcccctacggcatgagcatccccccagagaagcctgtgacctcctggctggacaccaagcctgtgctgcccaccctgaccacctctgtgggcctgcccctgccccccaccctgcccagcctcatccccttcatcaagacagaggagcccgcccccatccccatcagccacagcgccaccagccccccaggctctgtgaagagtgacagcggcggccctgagagcgccaccaggaacctgggcggcctgcctgaggaggccgagggcagcaccctgccccccagcggcggcaagtctgaggagagcggcatggtgaccaacagcgtgcccacagccagcagctctgtgctgagcagccctgctgctgactgtggccctgctggcagcgccaccaccttcaccaaccccctgctgcccctgatgtctgagcagttcaaggccaagttcccctttggaggcctgctggacagcgcccaggccagcgagaccagcaagctgcagcagctggtggagaacatcgacaagaaggccacagaccccaatgaatgcatcatctgccaccgggtgctgagctgccagagcgccctgaagatgcactaccgcacccacactggagagcggcccttcaagtgcaagatctgtggccgggccttcaccaccaagggcaacctgaagacccactacagcgtgcaccgggccatgccacccctgcgggtgcagcacagctgccccatctgccagaagaagttcaccaatgctgtggtgctgcagcagcacatccgcatgcacatgggcggccagatccccaacacccctgtgcctgacagctacagcgagagcatggagagtgacaccggcagctttgatgagaagaactttgatgacctggacaacttcagtgatgagaacatggaggactgcccagagggcagcatcccagacacccccaagtctgcagatgccagccaggacagcctgagcagcagccccctgcccctggagatgagcagcattgctgccctggagaaccagatgaagatgatcaatgccggcctggccgagcagctgcaggccagcctgaagtctgtggagaatggcagcattgaaggagatgtgctgaccaatgacagcagctctgtgggcggggacatggagagccagagcgctggcagccctgccatcagcgagagcaccagctccatgcaggccctgagccccagcaacagcacccaggagttccacaagagccccagcattgaggagaagccccagagagctgtgcccagcgagtttgccaacggcctgagccccacccctgtgaatggaggagccctggacctgaccagcagccatgctgagaagatcatcaaggaggacagcctgggcatcctcttccccttccgggaccggggcaagttcaagaacacagcctgtgacatctgtgggaagacctttgcctgccagagcgccctggacatccactaccgcagccacaccaaggagcggcccttcatctgcaccgtgtgcaacagaggcttcagcaccaagggcaacctgaagcagcacatgctgacccaccagatgagggacctgcccagccagctgtttgagcccagcagcaacctgggccccaaccagaacagcgctgtgatcccagccaacagcctgagcagcctcatcaagacagaggtgaatggatttgtgcacgtgagcccccaggacagcaaggacacccccaccagccacgtgcccagcggccccctgagcagcagcgccaccagccctgtgctgctgcctgccctgcccaggaggacccccaagcagcactactgcaacacctgtgggaagaccttcagcagcagcagcgccctgcagatccacgagaggacccacactggagagaagccctttgcctgcaccatctgtggccgggccttcaccaccaagggcaacctgaaggtgcacatgggcacccacatgtggaacagcaccccagcccggcggggccgccgcctgtctgtggatggccccatgaccttcctgggcggcaaccctgtgaagtttcctgagatgttccagaaggacctggccgcccggagcggcagcggggaccccagcagcttctggaaccagtatgctgctgccctgagcaatggcctggccatgaaggccaatgagatcagcgtcatccagaatggaggcatcccccccatccctggcagcctgggcagcggcaacagcagccctgtgtctggcctgactggaaacctggagcggctgcagaacagcgagcccaatgcccccctggccggcctggagaagatggccagcagtgaaaatggcaccaacttccgcttcaccaggtttgtggaggacagcaaggagatcgtgaccagctag

SEQ ID NO: 316278 - DNA, 3684 bp, Artificial Sequence
  derived and/or modified sequence
atgaatgacacagtgaacaagacagaccaggtggactgcagcgacctgtctgagcacaacggcctggaccgggaggagagcatggaggtggaggcccctgtggccaacaagagcggcagcggcaccagcagcggcagccacagcagcacagcccccagcagcagcagcagcagcagcagcagcagcggcggcggcggcagcagcagcacaggcaccagcgccatcaccaccagcctgccccagctgggggacctgaccaccctgggcaacttcagcgtcatcaacagcaatgtcatcatcgagaacctgcagagcaccaaggtggccgtggcccagttcagccaggaggcccgctgtggcggggccagcggcggcaagctggccgtgcctgccctgatggagcagctgctggccctgcagcagcagcagatccaccagctgcagctgattgagcagatccgccaccagatcctgctgctggccagccagaatgctgacctgcccaccagcagcagccccagccagggcaccctgcggaccagcgccaaccccctgagcaccctgagcagccacctgagccagcagctggccgctgctgctggcctggcccagagcctggccagccagagcgccagcatcagcggcgtgaagcagctgccccccatccagctgccccagagcagcagcggcaacaccatcatccccagcaacagcggcagcagccccaacatgaacatcctggccgctgctgtgaccacccccagcagcgagaaggtggccagcagcgctggggccagccacgtgagcaacccagctgtgagcagcagcagcagccctgcctttgccatcagcagcctgctgagccctgccagcaaccccctgctgccccagcaggccagcgccaacagcgtcttccccagccccctgcccaacatcggcaccacagctgaggacctgaacagcctgagcgccctggcccagcagaggaagagcaagcccccaaatgtgacagcctttgaggccaagagcaccagtgatgaggccttcttcaagcacaagtgccgcttctgtgccaaggtgtttggaagtgacagcgccctgcagatccacctgcggagccacactggagagcggcccttcaagtgcaacatctgtggcaaccgcttcagcaccaagggcaacctgaaggtgcacttccagaggcacaaggagaagtacccccacatccagatgaacccctaccctgtgcctgagcacctggacaacatccccaccagcacaggcatcccctacggcatgagcatccccccagagaagcctgtgacctcctggctggacaccaagcctgtgctgcccaccctgaccacctctgtgggcctgcccctgccccccaccctgcccagcctcatccccttcatcaagacagaggagcccgcccccatccccatcagccacagcgccaccagccccccaggctctgtgaagagtgacagcggcggccctgagagcgccaccaggaacctgggcggcctgcctgaggaggccgagggcagcaccctgcccccatctgggggcaagtctgaggagagcggcatggtgaccaacagcgtgcccacagccagcagctctgtgctgagcagccctgctgctgactgtggccctgctggcagcgccaccaccttcaccaaccccctgctgcccctgatgtctgagcagttcaaggccaagttcccctttggaggcctgctggacagcgcccaggccagcgagaccagcaagctgcagcagctggtggagaacatcgacaagaaggccacagaccccaatgaatgcatcatctgccaccgggtgctgagctgccagagcgccctgaagatgcactaccgcacccacactggagagcggcccttcaagtgcaagatctgtggccgggccttcaccaccaagggcaacctgaagacccactacagcgtgcaccgggccatgccacccctgcgggtgcagcacagctgccccatctgccagaagaagttcaccaatgctgtggtgctgcagcagcacatccgcatgcacatgggcggccagatccccaacacccctgtgcctgacagctacagcgagagcatggagagtgacaccggcagctttgatgagaagaactttgatgacctggacaacttcagtgatgagaacatggaggactgcccagagggcagcatcccagacacccccaagtctgcagatgccagccaggacagcctgagcagcagccccctgcccctggagatgagcagcattgctgccctggagaaccagatgaagatgatcaatgccggcctggccgagcagctgcaggccagcctgaagtctgtggagaatggcagcattgaaggagatgtgctgaccaatgacagcagctctgtgggcggggacatggagagccagagcgctggcagccctgccatcagcgagagcaccagctccatgcaggccctgagccccagcaacagcacccaggagttccacaagagccccagcattgaggagaagccccagagagctgtgcccagcgagtttgccaacggcctgagccccacccctgtgaatggaggagccctggacctgaccagcagccacgccgagaagatcatcaaggaggacagcctgggcatcctcttccccttccgggaccggggcaagttcaagaacacagcctgtgacatctgtgggaagacctttgcctgccagagcgccctggacatccactaccgcagccacaccaaggagcggcccttcatctgcaccgtgtgcaacagaggcttcagcaccaagggcaacctgaagcagcacatgctgacccaccagatgagggacctgcccagccagctgtttgagcccagcagcaacctgggccccaaccagaacagcgctgtgatcccagccaacagcctgagcagcctcatcaagacagaggtgaatggatttgtgcacgtgagcccccaggacagcaaggacacccccaccagccacgtgcccagcggccccctgagcagcagcgccaccagccctgtgctgctgcctgccctgcccaggaggacccccaagcagcactactgcaacacctgtgggaagaccttcagcagcagcagcgccctgcagatccacgagaggacccacactggagagaagccctttgcctgcaccatctgtggccgggccttcaccaccaagggcaacctgaaggtgcacatgggcacccacatgtggaacagcaccccagcccggcggggccggcggctgtctgtggatggccccatgaccttcctgggcggcaaccctgtgaagtttcctgagatgttccagaaggacctggccgcccggagcggcagcggggaccccagcagcttctggaaccagtatgctgctgccctgagcaatggcctggccatgaaggccaatgagatcagcgtcatccagaatggaggcatcccccccatccctggcagcctgggcagcggcaacagcagccctgtgtctggcctgaccggcaacctggagcggctgcagaacagcgagcccaatgcccccctggccggcctggagaagatggccagcagtgaaaatggcaccaacttccgcttcaccaggtttgtggaggacagcaaggagatcgtgaccagctag

SEQ ID NO: 316279 - DNA, 3867 bp, Artificial Sequence
  derived and/or modified sequence
atgagcaggaggaagcaggccaagccccagcacttccagagcgaccctgaggtggccagcctgcccaggagagatggagacacagagaagggccagcccagccggcccaccaagagcaaggatgcccacgtgtgtggccgctgctgtgccgagttctttgagctgagtgacctgctgctgcacaagaagaactgcaccaagaaccagctggtgctgattgtgaatgaaaatcctgccagccccccagagaccttcagccccagccccccaccagacaacccagatgagcagatgaatgacacagtgaacaagacaggcagccacagcagcacagcccccagcagcagcagcagcagcagcagcagcagcggcggcggcggcagcagcagcacaggcaccagcgccatcaccaccagcctgccccagctgggggacctgaccaccctgggcaacttcagcgtcatcaacagcaatgtcatcatcgagaacctgcagagcaccaaggtggccgtggcccagttcagccaggaggcccgctgtggcggggccagcggcggcaagctggccgtgcctgccctgatggagcagctgctggccctgcagcagcagcagatccaccagctgcagctgattgagcagatccgccaccagatcctgctgctggccagccagaatgctgacctgcccaccagcagcagccccagccagggcaccctgcggaccagcgccaaccccctgagcaccctgagcagccacctgagccagcagctggccgctgctgctggcctggcccagagcctggccagccagagcgccagcatctctggagtgaagcagctgccccccatccagctgccccagagcagcagcggcaacaccatcatccccagcaacagcggcagcagccccaacatgaacatcctggccgctgctgtgaccacccccagcagcgagaaggtggccagcagcgctggggccagccacgtgagcaacccagctgtgagcagcagcagcagccctgcctttgccatcagcagcctgctgagccctgccagcaaccccctgctgccccagcaggccagcgccaacagcgtcttccccagccccctgcccaacatcggcaccacagctgaggacctgaacagcctgagcgccctggcccagcagaggaagagcaagccacccaacgtgacagcctttgaggccaagagcaccagtgatgaggccttcttcaagcacaagtgccgcttctgtgccaaggtgtttggaagtgacagcgccctgcagatccacctgcggagccacactggagagcggcccttcaagtgcaacatctgtggcaaccgcttcagcaccaagggcaacctgaaggtgcacttccagaggcacaaggagaagtacccccacatccagatgaacccctaccctgtgcctgagcacctggacaacatccccaccagcacaggcatcccctacggcatgagcatccccccagagaagcctgtgacctcctggctggacaccaagcctgtgctgcccaccctgaccacctctgtgggcctgcccctgccccccaccctgcccagcctcatccccttcatcaagacagaggagcccgcccccatccccatcagccacagcgccaccagccccccaggctctgtgaagagtgacagcggcggccctgagagcgccaccaggaacctgggcggcctgcctgaggaggccgagggcagcaccctgccccccagcggcggcaagtctgaggagagcggcatggtgaccaacagcgtgcccacagccagcagctctgtgctgagcagccctgctgctgactgtggccctgctggcagcgccaccaccttcaccaaccccctgctgcccctgatgtctgagcagttcaaggccaagttcccctttggaggcctgctggacagcgcccaggccagcgagaccagcaagctgcagcagctggtggagaacatcgacaagaaggccacagaccccaatgaatgcatcatctgccaccgggtgctgagctgccagagcgccctgaagatgcactaccgcacccacactggagagcggcccttcaagtgcaagatctgtggccgggccttcaccaccaagggcaacctgaagacccactacagcgtgcaccgggccatgccacccctgcgggtgcagcacagctgccccatctgccagaagaagttcaccaatgctgtggtgctgcagcagcacatccgcatgcacatgggcggccagatccccaacacccctgtgcctgacagctacagcgagagcatggagagtgacaccggcagctttgatgagaagaactttgatgacctggacaacttcagtgatgagaacatggaggactgcccagagggcagcatcccagacacccccaagtctgcagatgccagccaggacagcctgagcagcagccccctgcccctggagatgagcagcattgctgccctggagaaccagatgaagatgatcaatgccggcctggccgagcagctgcaggccagcctgaagtctgtggagaatggcagcattgaaggagatgtgctgaccaatgacagcagctctgtgggcggggacatggagagccagagcgctggcagccctgccatcagcgagagcaccagctccatgcaggccctgagccccagcaacagcacccaggagttccacaagagccccagcattgaggagaagccccagagagctgtgcccagcgagtttgccaacggcctgagccccacccctgtgaatggaggagccctggacctgaccagcagccatgctgagaagatcatcaaggaggacagcctgggcatcctcttccccttccgggaccggggcaagttcaagaacacagcctgtgacatctgtgggaagacctttgcctgccagagcgccctggacatccactaccgcagccacaccaaggagcggcccttcatctgcaccgtgtgcaacagaggcttcagcaccaagggcaacctgaagcagcacatgctgacccaccagatgagggacctgcccagccagctgtttgagcccagcagcaacctgggccccaaccagaacagcgctgtgatcccagccaacagcctgagcagcctcatcaagacagaggtgaatggatttgtgcacgtgagcccccaggacagcaaggacacccccaccagccacgtgcccagcggccccctgagcagcagcgccaccagccctgtgctgctgcctgccctgcccaggaggacccccaagcagcactactgcaacacctgtgggaagaccttcagcagcagcagcgccctgcagatccacgagaggacccacactggagagaagccctttgcctgcaccatctgtggccgggccttcaccaccaagggcaacctgaaggtgcacatgggcacccacatgtggaacagcaccccagcccggcggggccgccgcctgtctgtggatggccccatgaccttcctgggcggcaaccctgtgaagtttcctgagatgttccagaaggacctggccgcccggagcggcagcggggaccccagcagcttctggaaccagtatgctgctgccctgagcaatggcctggccatgaaggccaatgagatcagcgtcatccagaatggaggcatcccccccatccctggcagcctgggcagcggcaacagcagccctgtgtctggcctgactggaaacctggagcggctgcagaacagcgagcccaatgcccccctggccggcctggagaagatggccagcagtgaaaatggcaccaacttccgcttcaccaggtttgtggaggacagcaaggagatcgtgaccagctag

SEQ ID NO: 316280 - DNA, 3975 bp, Artificial Sequence
  derived and/or modified sequence
atgagccggcggaagcaggccaagccccagcacttccagagcgacccggaagtggcaagcctccctagaagggatggggacacggaaaaggggcaacccagcagaccgactaagagcaaggacgcacatgtgtgcggtcgctgctgtgccgagttctttgaattaagtgacctgctgttacacaagaaaaattgtactaagaaccaattggtgctgatcgtcaatgaaaacccggcgagtccacccgagacgttcagcccttcacctccccccgacaacccagacgaacagatgaatgacaccgtcaacaaaactgatcaggtagactgttcggatttgagcgaacacaacggtttagaccgcgaagagagcatggaggtcgaggcgcccgtggctaacaagtctggctccggaacctcaagcggttctcattcgtccacggctccgtcatccagcagcagcagcagttccagctccggcgggggcggcagtagctctaccggaaccagcgcaataacaacatccttgccccaactgggagacttaacgacactaggaaacttctccgtgataaactccaacgtgattattgagaatctccagagtacgaaggtcgcagtcgctcagtttagccaggaagctcgttgtggaggtgctagcgggggaaagctggcagtgcctgcactcatggagcaactgctggccctgcagcagcagcagattcatcagctccagctgatagaacaaattaggcatcagattttactgctggccagccaaaatgcagacctccccacgagctcctcaccaagccaggggaccctccgcacctctgcaaaccccctgagtacgctgtcttctcacctgagccagcagctggctgccgccgccggacttgcccagtctcttgcatcgcagtcggcatctatttccggggtgaagcaactgccccctattcagctcccccagtctagttccgggaatacaattatcccctccaactccggtagttcccctaacatgaatatcctcgccgctgctgtgactacgccgtcaagcgagaaggtggcctcctcagctggagcttctcatgtgagcaatcctgctgtcagcagctcaagcagccccgcatttgcaatttctagtctgcttagccccgcctcgaaccccctcctaccccagcaagcctctgcaaattctgtgtttccttcaccactgcctaacatagggactacagcagaagacttgaactctctcagcgctctggcccagcagcgtaaaagcaagccccctaacgtgactgctttcgaggctaaatccacaagcgacgaggctttcttcaaacacaaatgccggttttgtgcaaaggtattcggatccgactccgccctacagatccaccttcggtcccatactggtgagcgcccctttaagtgtaacatctgcggcaatcgcttcagcactaaagggaacttaaaagttcattttcagagacataaagaaaaatatccgcacatccaaatgaacccttatccggtccctgaacacctcgacaatatcccaacatctacaggcatcccctacggcatgagtattccacctgagaaacccgtgacatcttggctggacaccaaacctgtgttgccaaccttgaccacttctgtgggactccccctcccccctaccttaccatcactgatccccttcatcaaaaccgaggagccagctcctatccccatctcacactcggccacatcgcccccaggtagcgtgaaaagcgatagtgggggaccagagtcggccacacggaatctgggggggctgcccgaggaggccgagggctccaccctccccccttcagggggtaaaagcgaggagtctgggatggttactaactccgtacccacggctagcagcagcgtcctttcttccccggccgccgattgcgggcctgctggctccgccacaacatttacaaatcctctgctcccacttatgtcggaacagtttaaggcaaaatttccctttgggggactgctggactctgctcaggccagtgaaacttcgaagctccagcaactcgtggaaaatatcgataagaaagctacagatcccaacgagtgtattatttgccacagagttctgtcctgccagtccgcactgaagatgcactaccggactcacacaggggaacgcccctttaagtgtaaaatatgcggacgagctttcaccaccaagggaaaccttaaaactcattattccgtgcatagagcaatgcccccgctgcgagtccagcactcctgccctatatgtcagaaaaagtttactaatgccgtggttttgcaacagcatatacgtatgcatatgggtggccaaatacccaatactcccgttcccgatagctactccgagagcatggaatccgataccgggagctttgatgaaaaaaacttcgatgatctggataacttctctgacgagaatatggaggactgccccgagggaagcatcccagatacgccaaaaagcgctgacgccagtcaggattccctgtcctccagcccactccctctggagatgtccagtatcgccgcactagagaatcagatgaagatgattaacgcgggcctggcggagcagcttcaggcttcccttaaatctgttgaaaacggaagcattgaaggcgacgtgttgaccaacgatagcagttccgtgggaggagacatggagtcacagagcgccggttctccagcaatctctgagtccacatcttcaatgcaggctttgagccctagcaacagcacccaggagtttcataaatcaccatccattgaagaaaagccacagagagcagttccatccgagttcgccaatgggctgagcccaacaccggtgaacgggggagcccttgacctaacgtcttctcacgccgaaaaaataatcaaggaagactcgctggggattctgtttcccttcagagatagaggaaaatttaagaatacggcctgtgatatctgtgggaagacttttgcttgtcagagcgcgctcgacattcattacagatcgcataccaaagaacgacctttcatctgtaccgtgtgcaaccggggttttagcaccaagggaaacttgaagcaacatatgctgacgcaccagatgagggacctgccaagccaattgtttgaaccatcgtcaaacttggggcccaaccagaactccgccgtcatccctgctaactctctgtcctctttaatcaagaccgaggtcaatggcttcgtgcacgtttcacctcaagactcaaaagatacccccacctcacatgttccatctggtcccctgagctcctcagcgacaagcccggtgctgcttcccgctttaccgaggaggacccctaaacagcattactgtaacacctgcgggaagactttttcttctagcagcgcactacagatccatgagaggacacacactggggagaagccattcgcttgtactatctgcggaagggcatttactactaaaggaaatctgaaagtccatatgggtactcatatgtggaactccacacccgccaggcgaggacgcaggctttctgtcgacggcccaatgacctttctgggcgggaatcctgtcaaatttccggagatgttccagaaagacctcgccgcacgatcggggtccggtgatccatcctctttttggaatcagtacgctgcagcactgagcaacggactagcaatgaaagctaatgagatttccgtaattcagaatggtgggattccccccattcccgggagtctgggttcagggaattcctcacctgtgagcggcctgactggaaacctggagagactgcagaacagcgaacccaatgcacccctggcaggccttgagaagatggctagtagcgaaaacggaactaacttccggttcacccgttttgtggaggactctaaggagatagttacaagttag

SEQ ID NO: 316281 - DNA, 3684 bp, Artificial Sequence
  derived and/or modified sequence
atgaacgacaccgtgaacaagaccgaccaggtggactgcagcgacctgagcgaacataacggcctggatcgggaggaatcgatggaggtcgaggctcccgtcgcgaataagtcaggcagcgggacaagctctggcagccatagctccacagcccccagcagtagtagtagtagttcttctagcagcggcggcgggggttcaagttccacagggacgtctgctatcacaacgagcctgcctcagctgggagatttgacaaccctcggtaactttagtgtgatcaactctaacgtgattatcgaaaatcttcagagcacaaaagttgccgtggcgcagttcagtcaggaagctcgatgtggcggggcgtctgggggcaaattagccgtgcccgccctaatggagcagctgctcgccttacagcagcaacaaatccaccaactgcagttaattgagcaaataagacaccagatcctgctgctggcctctcagaacgctgatctcccaacatcaagctctcctagccagggcacactgcggacgagcgccaaccctctgagcaccctaagctctcacctttcccaacagcttgctgctgcggccggtcttgctcagagtctggcttctcaaagcgcctccattagcggtgttaaacagctgcctcccatccagcttccgcagtcatcttcaggcaacacaatcatccccagcaattccgggtcaagccctaatatgaacattctggcagccgccgtcactaccccttccagcgagaaagttgcttcgagtgctggggcgagccacgtgagtaatccagctgtgagttcctcatctagcccagcctttgccatctcatcgctgctgtccccagcctctaaccccttgttgcctcagcaggcttcagccaacagtgtattcccttcccctttgcccaatatcgggaccacagcagaggacctcaacagcctgagcgccctggcccagcagaggaaatcaaaaccgcccaatgtcacggcgttcgaggctaagagcacctccgacgaggccttcttcaaacataaatgcaggttttgtgccaaggtctttggatcggacagtgccctccagattcacctgaggtctcacaccggggaaagaccctttaagtgtaacatttgtggtaaccggtttagtacgaaaggaaatctgaaggtgcacttccagcgccacaaagagaaatatcctcatattcagatgaacccataccccgtgccggagcatttagacaacatccctactagtaccggaattccatatggaatgtccattcccccggagaagcccgtgacctcctggcttgatactaaaccagtgctgcccaccctcaccacctcagttgggttaccactcccacctaccctgccaagtctcatcccctttatcaaaaccgaggaacctgcccccatccctatctcgcacagcgccactagccccccaggctcagtgaagtcagatagcggagggcccgagtccgccacacgtaacctcgggggcctcccagaagaagctgagggctctactttacctcctagtgggggaaaatccgaagaatccggcatggtgactaactcagtcccgacagcctcgtcctctgtactttcaagcccggcggctgactgcggtccagccgggagtgccaccactttcactaacccccttctgccactgatgagcgaacagttcaaagcgaagttcccatttggaggtctgcttgattctgcacaagcctccgagacctcgaagttgcagcagctggtagagaatattgataagaaggccacggatccaaacgaatgtattatatgtcatagggtgttgagttgtcagtctgctttaaaaatgcattacaggacccataccggggagcgcccatttaaatgtaagatctgtggccgcgcctttacaacaaaaggtaatcttaaaacacactacagcgtgcaccgtgctatgcccccgttacgtgtgcagcattcttgccctatctgccaaaaaaagttcacaaatgccgtggtcttacagcagcatatcaggatgcatatgggcgggcagattcccaacacacccgttcctgacagctatagcgaatctatggaaagcgacacaggctctttcgacgagaagaatttcgacgacctagacaattttagcgacgaaaacatggaagactgccctgagggttctattccagataccccaaagtctgccgatgcttcacaagattccttgagttcatccccactgcccctggagatgtccagcatcgcggctctcgaaaatcaaatgaagatgattaacgcagggttggcggagcaactgcaagcaagcctaaagtccgtggagaacggcagtattgagggagatgtattaaccaatgatagctcaagtgttggcggcgatatggagagtcagtctgccggatctcctgcgattagtgagtccactagtagtatgcaggctctgagtcctagcaattctacacaggaatttcataaaagcccctcaattgaagagaaacctcaacgcgcggttccctctgaattcgccaacggcctgagcccgacccccgtgaatggcggggccctggatctcacttcctcccatgcagaaaagattattaaggaagattctctggggattttattcccattccgggacagaggaaagtttaagaacaccgcgtgtgacatctgcggcaaaacttttgcctgtcagtcggccctggatatccactacagatctcacacgaaggaacgccctttcatctgcacagtgtgtaaccggggattctctacgaaaggaaatcttaagcaacacatgttaacacatcagatgagggacttaccctctcagctcttcgaaccctcatccaaccttggacctaaccagaattcagctgtgatccctgcaaatagtctgtcatcactgatcaaaaccgaggtgaatggatttgtgcatgtgtccccgcaagactcaaaagacacgccgacctctcacgtgcctagcggtccactgtcgtcctcagccacttcccctgttctgcttcctgctctacccagaaggacgccaaaacaacattattgtaatacatgcgggaagaccttcagcagttcttcagccctgcagatacatgagcgcactcacaccggtgagaagccatttgcttgtacgatctgtggtagggctttcacaactaaagggaaccttaaagttcatatgggcacgcatatgtggaactccaccccagcccgcagaggccgcagactttcagtcgacggtcccatgaccttcctcggaggaaatcccgtcaagttcccagagatgtttcaaaaggaccttgcagctaggagcggcagcggcgatccgtcatcattttggaatcaatacgccgccgccttgagcaacgggcttgccatgaaggcaaatgagataagcgtcattcagaatggggggatcccacccataccagggtctttgggctcgggaaactcctctccggtgtctggcctcaccggcaacctcgagaggttgcagaatagtgaacctaacgcaccgttagccggactagagaagatggcctcgtccgagaacgggaccaattttaggttcacacgttttgtcgaggatagtaaggagattgtgacctcatag

SEQ ID NO: 316282 - DNA, 3867 bp, Artificial Sequence
  derived and/or modified sequence
atgagccggcggaagcaggccaagccccagcacttccagagcgaccccgaagtagcctcattaccgcgacgagatggcgataccgaaaagggtcagccaagtaggcccactaagtccaaggacgcacacgtatgtggacgatgttgcgccgaatttttcgagctttctgatcttctcttgcacaagaaaaactgtacaaaaaaccaactcgtcctaatcgtgaacgagaatcctgcgtcgccccccgagacctttagccccagccctcctcctgacaaccccgacgaacagatgaatgatacagtgaacaagaccggtagtcacagcagcactgcaccctcgtccagctcctcatcctcctcttctagtggtggcggtggatcgagttccacggggacaagcgcgataacaacgtctctcccacaactgggtgatctaaccaccctggggaatttttctgtgataaacagcaatgtaataatagagaacctacagagcactaaagtggccgttgcacagttctcccaggaggccaggtgtggcggcgcctctggcggcaagctggccgtgcccgctctaatggagcagcttttagctctgcagcagcagcagattcaccagttgcaactgatagaacagatccgtcaccagatcttgctgcttgcctcccaaaatgccgatttgcctaccagtagtagcccgtctcaaggtacactcaggactagcgcaaatccactgagtaccctgagttcgcatctgagtcagcagcttgctgcggccgcagggttagcccagtcccttgcatcccagtctgcttcaatatctggagttaagcagttaccaccaatccagctgccgcagtcatcctcaggcaataccattatcccatctaatagcggttcaagccctaacatgaatattcttgcagcagctgttaccactccttctagcgaaaaagtggcaagctctgcaggagcatcacatgtcagcaaccctgcagtttcttccagcagctcccctgccttcgccatttcctcactcctgagtccagcaagcaatcccctgcttccccagcaggcctccgctaatagcgtgtttccgagcccactacccaacattgggacaactgcagaggatctgaattccctttcagccctcgcgcagcagagaaaaagtaaaccgcccaacgttaccgccttcgaagcaaaaagcacatcggatgaagctttcttcaagcacaagtgcagattttgcgcaaaagtgttcgggagcgattcagcactgcaaatccacctcaggtctcacacgggggagagaccattcaagtgcaacatctgcgggaatcgtttcagcactaaaggtaatcttaaagtgcatttccagagacacaaggagaagtatcctcatattcagatgaacccctacccagtacccgagcacctggataatatccccacctccaccgggatcccttacggtatgagcatacctccggagaagccagtgacctcatggctcgacactaagccagttctgcccaccctcactacatccgtgggccttccacttcccccaacactcccatccctgattccattcatcaagaccgaggagccagcacctattccaattagtcacagtgccactagtccacctgggtctgtgaaatctgattcagggggcccagagtctgctaccagaaatctaggaggcttacccgaggaggccgaagggagtaccctgccaccatccgggggaaaatctgaagagagcggcatggtcaccaacagcgtgcctacagccagcagcagcgtgctgtccagccccgccgcagattgcgggcctgctggctccgccacgacgtttacaaaccctcttctgccgcttatgagcgaacaattcaaggccaagttccccttcggcggactgcttgatagtgcacaagcttcagaaacgtctaagttgcagcaactcgttgagaacattgacaaaaaggccaccgatcccaatgagtgcatcatctgccatagggtcctttcttgccagtccgccctaaagatgcactacagaacccacaccggcgaaaggccctttaaatgtaaaatatgtgggcgcgcttttacaaccaagggcaatctgaaaacacactattcagtgcacagagccatgccgccgcttcgcgtgcaacattcgtgccccatatgccaaaagaaattcacaaatgccgtcgttctgcagcagcacatccgcatgcacatgggtggacaaattcctaacacacctgttcccgacagttattcagaatctatggagagcgatacaggcagctttgatgaaaaaaacttcgacgacttggacaactttagcgatgaaaacatggaagactgccctgagggcagtatacctgacacccccaaatcagccgacgcttcacaggattcgctttcctcctcaccgctgcctctggagatgtcgtccattgccgctctggagaaccaaatgaagatgattaacgccggccttgcagagcaacttcaggcctcactgaagagcgttgagaacggctcaatcgagggcgacgtactgaccaatgacagttcaagcgtggggggcgatatggagtcccagtcagcaggctcgcctgccatctctgagagcacatcctccatgcaagctctgtccccgagcaatagcacacaggaatttcacaaaagtccctccatcgaggagaaacctcagcgcgccgtgccgtcagaattcgcgaacggacttagcccaacccctgtcaatggaggcgccctggacctgaccagtagccacgctgagaagatcatcaaggaagattcactgggtatcctcttcccttttcgggatcggggcaaattcaagaacaccgcctgcgatatctgcggcaaaacttttgcttgtcagtccgccttggacatccattatcgctcccatactaaagagcggccattcatatgcaccgtgtgcaaccgcgggtttagcacaaagggtaatttgaaacaacatatgttgactcaccagatgcgggacctgccttcccagctttttgagccttccagcaatctcggacccaaccagaattctgcagtcatacccgcaaattcactgagttcgctcattaagactgaggtgaacggatttgtccacgtatccccacaggattccaaagacacaccaacctcacacgtcccaagcggacccctgtcatcctcagctactagcccagtactactgccagcccttcctcgccgcaccccaaagcagcactactgcaatacgtgcggaaagactttttcctcgagtagcgccttgcagattcacgagaggacccacacaggtgaaaagcctttcgcctgcaccatctgtgggagagcctttaccaccaagggaaatctgaaggtgcacatgggaacccacatgtggaactccacacctgcacgacggggtaggcgtctcagtgttgatggtccaatgaccttcctgggcggcaatccggtgaaattccctgaaatgtttcaaaaggatctggccgcacgttctggcagtggcgacccaagctcgttttggaaccagtacgccgctgcattgtcaaacggcctcgccatgaaggccaatgagatttcagtcatccagaacggggggatcccccctattccagggtctctgggctccggtaatagctctccagtgagcggccttactgggaatcttgaacggttgcagaatagcgaacccaatgcaccgttggcgggactggagaaaatggcctcaagcgagaatgggactaattttcgtttcaccagatttgttgaggattcaaaggagattgtgaccagctag

SEQ ID NO: 316283 - DNA, 3975 bp, Artificial Sequence
  derived and/or modified sequence
atgtccagacggaagcaggcaaaacctcagcacttccagagcgatcctgaggtggcttctctgcccagaagagacggggacacggaaaaagggcagccgtccaggccgacaaagagcaaggacgctcacgtgtgtggccgttgttgcgccgaattttttgagctctcagatctcctcctgcataagaaaaactgtacgaagaatcagctcgttctgatcgttaacgagaacccagcatcaccaccagagaccttctctccatctcccccaccggataaccctgacgagcaaatgaatgacacagttaacaagaccgaccaggtggattgttctgatctgagcgagcataacgggctggatcgcgaggaatctatggaagtggaggctccggtggctaacaagagcggctccggcactagttcagggtctcactcctccaccgcgccaagtagttcctcaagctcttctagctcatccgggggaggtgggtctagctcaaccggaacttctgccatcactacatcactgccacagctgggcgacttaaccactctggggaacttctccgtcataaactctaacgtaatcattgagaacttacagagcacgaaggtggcagttgcccagtttagtcaggaggcccgttgcggcggagcctcggggggtaagctcgctgtccctgcgctgatggagcagcttctggcgctgcaacagcaacagattcatcagctgcaactcatcgagcagattcgacaccaaatcttactattggcttctcagaatgccgatctccccacgtccagttctccctcccagggtacactccgtacctctgccaatcctctgtccacgctgagttcccacctttcccaacagttggcagctgcagccggattagcgcagtcattagcatcccaatctgcctcaatatcaggggttaaacagctgcccccaattcagctcccccagagtagcagcggtaatacgatcatcccatcaaactccggttccagtccgaacatgaacattctcgccgcagcagtaactactccttcctctgaaaaagttgcatctagcgcgggtgcttctcacgttagcaatcctgctgtttcctcctcctcgtcgcctgcatttgccatatcaagtcttcttagccccgcatcaaacccgctgcttcctcagcaggcaagcgccaattctgtgttccctagtccgctgccaaatatcggtacaacagccgaggacctgaatagcctaagtgccctggcacagcagcgaaaaagtaagccacctaatgtgactgcctttgaggctaaatccacctccgatgaagccttctttaagcataagtgcaggttttgcgctaaagttttcgggagtgattcagccttgcagattcacttgaggagtcacacaggagaacgaccctttaaatgcaatatctgcggcaatcggttttctacaaagggaaacctcaaggtccacttccagcggcataaagaaaagtatccgcatattcagatgaacccctaccctgtgcctgagcacctggacaatatacccaccagcacagggataccctatggaatgtctatcccccctgagaagcctgtgacgtcttggttggacactaaaccagtgctgccaacgttgacaacatctgtaggccttcccctcccgccaaccctgccgagcttgatccccttcatcaagacagaggagcctgctcctatacctataagtcactccgccacgtctcctcctgggagcgtgaagtctgactcaggcggacctgagtccgccacacgcaacttgggtgggctacccgaagaagcagagggcagcaccctccccccaagtggagggaagagcgaagagagtggtatggtcacaaactcagtacctacagcctccagtagtgtcctgtccagcccggctgccgactgcggccctgccggttccgcaaccacctttactaatcctctgttgccacttatgtcggaacagttcaaagcgaagtttcctttcggcggactgttggatagtgcacaggcctccgaaacaagcaagctgcagcaattggtggagaatattgataaaaaagcaaccgatcctaatgagtgcattatttgccaccgtgtactgtcctgtcagtcggcactcaagatgcattaccggactcataccggcgagcggcctttcaagtgcaaaatttgcggcagagctttcacgacaaaaggaaacctcaaaacacattactctgtgcaccgcgctatgccacctctgagagtacaacactcttgtcccatttgtcagaagaagtttacaaatgccgttgtactccaacaacacatcaggatgcatatgggcggacaaatccctaatactcccgtaccggattcatattctgagagcatggagtctgacactggctcattcgacgagaagaacttcgacgatctggataactttagtgacgagaacatggaggattgccctgaggggagtatccccgacactccaaaatctgccgacgcttctcaggactccctgtcttcaagccctttacctctggagatgtcctctatcgccgcacttgaaaatcagatgaagatgattaacgccggtcttgctgagcagttgcaggcaagtctgaagtccgtggaaaatggaagcatagagggggatgtactgaccaatgactcatcttccgtcggcggagatatggagtcccagtccgccggttcccctgctatatcagagtcaacttcttcgatgcaggccctatctccatccaactctacgcaggagttccacaagagtccatctatcgaggaaaagccacagcgggcagtgccaagtgagtttgctaatggcctgtcccctactccagtgaatggaggagccctcgacctaacatcctctcacgccgaaaagatcatcaaagaagacagtctgggcatcttgttcccttttcgcgatcggggtaagttcaagaacaccgcttgcgacatttgtggcaaaacgttcgcctgccagagtgccctggacattcattaccgatcgcataccaaggagagaccgttcatctgtacggtgtgcaaccgcggattctccactaagggaaatctgaaacagcacatgctgactcaccaaatgcgggatctcccatcccagctttttgagccatccagcaacctggggccaaaccaaaatagcgctgttatacctgcaaactccctcagctccctcataaagacagaggtgaacggcttcgtgcatgtttctcctcaggactccaaggacacaccaacaagtcacgtgccgagcggtccactctcttcgagcgccacttctccagtgctgctgcccgcactgccacgccgaactcctaagcaacattactgcaacacttgtgggaagaccttctccagcagctctgccctgcaaatccatgagcgtactcacaccggggagaaaccattcgcatgtaccatctgtggaagggcatttacaactaaggggaacctgaaggtacacatggggacacatatgtggaatagcacgccagccaggcggggtcggcgtctgtcagtagatgggcctatgacgtttctcgggggtaaccctgtgaaattccccgagatgtttcagaaagacctcgctgctaggagcgggtcaggtgatccgagttccttctggaaccagtatgctgccgctctgagcaacggtctcgccatgaaagcgaatgaaatctcagttattcagaatggaggaattccacctattcccggatctctgggcagcggcaacagttctcctgtctccgggctgaccgggaaccttgagcggctacagaactccgaacctaatgcaccgctggctggcttggagaaaatggcctccagtgagaacggcacaaacttcagatttactagattcgtggaagacagtaaagagatagtgaccagctag

SEQ ID NO: 316284 - DNA, 3684 bp, Artificial Sequence
  derived and/or modified sequence
atgaacgacaccgttaataaaacggaccaggtggactgcagcgacctttcagaacacaacggactggaccgagaggaaagtatggaagtggaggccccagtcgctaataaatctggctctggcacttctagtgggtcgcattctagcaccgccccttcatcgagctcctcatcctcgtcatcttctgggggaggtgggtcatccagcactgggaccagcgcaattactacaagtcttccccagctcggggatctgacaaccttgggcaacttctcagtgattaacagcaacgtgataattgagaacctgcagtccaccaaagtggctgtggcccagttcagtcaggaggctcgctgtggtggtgctagtggaggtaagctggctgtgcccgcactgatggagcagctccttgcattgcagcagcaacagattcaccaactgcaactgatcgaacaaatccgacaccagatcctgctcctggcgtcacaaaacgcagatctgccaacatccagctcaccatcccaaggaaccctaagaacttcagccaatccactgtccacgctatcctcacacctgtctcaacagcttgcggcagcagctggcctggcacagtccctggcctctcagtctgccagcattagcggtgtcaagcaattaccaccaatccagctaccccagagtagtagcggcaacacaattattccatccaacagtgggagttcaccgaacatgaatatcctggcggctgctgttacaacaccaagctccgaaaaggtggcaagtagcgcaggtgccagtcacgtgagcaatcccgctgtttctagctcctcctctcccgcattcgctatctctagccttctgagcccggcatccaacccactgctcccccagcaggcatctgctaactctgtatttccatcccccttgcccaatatagggacaaccgccgaagacctgaatagtctgagcgccctggctcagcaaaggaagtctaagcctccgaacgttactgcttttgaagcgaaaagcaccagcgatgaagcattcttcaaacacaagtgccgattttgtgctaaggtgtttggttctgatagcgccttacagattcatttgaggagccacaccggtgaacgtcccttcaagtgtaatatttgcgggaacaggttctccaccaaggggaatcttaaggtgcactttcaaagacataaagaaaaatatccacacatacaaatgaatccttaccctgttcccgagcatctggacaatatacctacctctacaggcattccttatggcatgtctattccgcctgaaaaaccggtgacatcttggctggacactaagcctgtcctaccaaccctgactacctccgtggggctgccactcccgccaacactaccgagtctgatccctttcattaaaaccgaggaaccggctccaattcccatttctcattctgctacttctcctcccggatccgtaaagagcgactccggagggcctgaatctgctaccaggaacctaggaggcctgcccgaggaagcggaaggaagtactctgcctccaagtggtggcaaaagcgaggaatctggaatggttacgaattctgtccccactgcaagtagctcagttctgtctagccctgctgctgattgcggaccagcgggatcagctactactttcacaaaccctctactgcctcttatgtccgagcagttcaaggccaagttcccatttggaggactgctcgacagcgcccaggcatcagaaacctccaagctgcagcagctggtagaaaatatcgacaagaaagccaccgaccctaacgagtgtatcatttgtcaccgcgtgttgagctgccagagcgccctgaagatgcactaccgaacgcacactggggagcgaccatttaaatgtaaaatctgtggaagggcattcaccactaaaggcaacttgaagacccactacagtgtgcatcgcgctatgcccccactccgggtgcagcacagctgtcctatttgtcagaaaaagttcaccaatgcagtggtccttcagcaacacataagaatgcacatgggtgggcagattccaaacaccccggttccggattcctattctgagagcatggagtccgataccggttcgttcgatgagaagaattttgacgatctggacaatttctcagacgaaaacatggaggactgcccagagggctccatccctgatacgcccaaatccgcagacgcttcacaagactcattatcctcaagtcccctccctcttgagatgtcctctattgctgctttggaaaatcagatgaaaatgatcaacgccggacttgccgaacaactgcaggcttccctgaaaagcgtggaaaacggaagtatagaaggagatgtactgactaacgacagttcttctgtcgggggagatatggaatctcagtctgccggttctccagccatttcagagagcactagcagcatgcaagcgctttctcccagtaacagcacccaggagttccacaaatctccaagcatcgaggagaagccacagcgggctgttccgtcagagttcgccaatggcctatctcctacacccgtgaatgggggagctctcgacctcacatccagtcacgctgagaaaatcattaaggaagatagtcttggaatcctttttccctttcgcgaccgaggaaaatttaaaaacactgcttgtgatatctgcggaaagacctttgcctgtcagagcgcgctagacattcactacaggagtcacaccaaagagcggccattcatttgcaccgtttgcaacagaggcttctcgacaaaaggcaacttaaagcaacatatgctcactcaccagatgagggatctaccatctcagctatttgaaccctcttccaatctaggcccaaaccagaattcagctgtgatcccagccaacagtctgtcttccttgataaagactgaagtgaacggattcgttcacgtctctccccaggatagcaaagacactccgacatcacatgtaccttccggacctctgtctagcagtgcaacatcccccgttctcctccctgcactaccgcgaagaacaccgaagcaacattactgtaacacttgtggaaagacgtttagctcgagttctgctctccagatccatgagcgcactcataccggagaaaaaccctttgcctgcacaatctgcggcagggccttcacgacaaagggaaatttgaaggtccacatgggtacccacatgtggaattccaccccagcgagacgaggacgcagactctctgtggacggtccaatgacatttctcggcggaaaccccgtaaagtttccagaaatgtttcaaaaggatctggctgcacgaagcggctccggggacccgtcgtctttctggaaccagtacgccgcagctctgtcgaacggcctggccatgaaggctaacgaaatcagtgtcatccagaatggaggaatacctcctatccctggatctctgggcagcggtaattcttcccctgttagtggactcaccggaaatctggaacggctccagaattccgaacctaacgctccgctcgcgggtttggaaaaaatggcttcctccgagaatggaaccaattttcgtttcaccaggttcgtggaggatagtaaagagatagttacttcctag

SEQ ID NO: 316285 - DNA, 3867 bp, Artificial Sequence
  derived and/or modified sequence
atgtcccggaggaagcaggcgaagccacagcacttccagagcgatccagaggtagcctcgttaccccgtagagacggagatacagagaagggacagcctagccgacctaccaagagcaaagacgctcacgtgtgcgggcgttgctgtgccgaattttttgagttatctgatctgctactgcacaaaaagaactgtacaaaaaaccagcttgtgctgattgttaatgagaaccccgcaagtccccctgagacgttctctccctccccaccccctgataatcccgatgagcagatgaatgacaccgtcaataagacgggttcccactcatctaccgcccctagcagttcctctagttcaagcagcagttccggcggtggcggaagttcctcaactgggacgtctgctatcaccacctcccttccccaacttggtgatctaacgactctgggcaacttttcagtaatcaactcgaacgtcatcattgaaaatcttcagtccactaaggtcgctgtggctcaattttcccaggaggccagatgtggaggagcctctggcggtaaactcgcagtacccgcactgatggagcagctgcttgctctacagcagcagcagatccatcagttgcagctgattgagcagatcagacaccagatcttgcttctggcaagccagaacgccgacctccccacctctagctccccctcacagggtaccctacgaacatcagctaatcccttatccaccctgtcaagccatctgagccagcagctcgcggctgccgcaggtctggcccagtctttggcatctcagtctgcctctatatctggcgttaaacagctgcccccaattcagctacctcagtcgtcctctgggaacacaatcattcctagcaatagcggtagctccccaaatatgaatattctcgcggcagctgtgactaccccgtcatctgaaaaagtcgccagtagcgccggagcaagccatgtctccaatccagcagtgtcatcttcctcaagtccagcgttcgctattagcagtttgctgagtccggcttccaacccgctgctacctcaacaggccagcgctaacagcgtgttcccttccccattgccgaacatcggcaccactgcagaagacctgaacagtctgtccgccctggcacagcagcggaagagcaaacctccaaacgtcacagcattcgaagcgaaatcgacgtctgatgaagccttcttcaagcacaaatgcagattctgtgccaaggtctttggtagcgactcagccctgcagatccacctgcgcagccacaccggcgaaaggccttttaagtgcaacatttgtggtaaccgctttagtaccaaaggcaatctcaaagtgcatttccagagacataaagaaaagtatccccacattcagatgaatccgtaccccgtacccgaacaccttgacaatatcccaacatctactgggatcccctatgggatgtctatccccccagagaagcccgtgacttcttggcttgatacgaagcccgtcctgcccaccctgaccacctctgttggactgcctctgccgccaactcttcctagcttaatcccttttataaagaccgaagagcctgcccctattcccatcagccactccgccacaagcccacccggatctgtgaaatctgattcaggaggaccagagagcgcgacacggaacctgggaggcctgcccgaagaagcagagggaagtaccctgcccccaagcggcggaaagagcgaggagtcaggtatggtgacaaacagcgtgcccaccgcatcgtcctccgtgcttagtagtcccgctgccgactgcggtccagccggtagcgctactacgttcaccaaccctctcctgcccctgatgtctgaacagttcaaggcgaagttcccattcggaggactcttggattcagctcaggcgtctgaaacctcaaagctgcagcagcttgttgagaatatagacaagaaggccacagatcctaatgagtgcatcatttgtcatagggtcctctcttgccaatccgccttgaagatgcactacagaacacataccggtgaacgcccatttaagtgcaaaatctgtggacgggcttttactaccaagggcaatctcaagactcactactccgtgcacagggcaatgccacccctcagagtgcagcatagttgtcctatctgtcagaagaaatttaccaatgctgtggtcttacaacaacacattcgaatgcatatggggggtcaaattcccaatactcccgtccccgactcctactcagaatcgatggagtccgatactgggagcttcgatgaaaagaattttgatgacctggataacttcagcgacgagaacatggaagactgtcccgagggctcaattcctgacacacccaaatctgcggacgctagtcaggatagcttgtcctcctcccccctgccactcgaaatgtcaagtatcgcagctctggagaaccaaatgaagatgattaacgctggccttgcagaacagctacaggctagcctcaagagtgtggagaacgggtccattgaaggtgatgtcctgacaaacgactcttcttccgttgggggagatatggaatctcagtccgctgggtcacccgctatcagcgaaagtaccagcagtatgcaagcactcagccctagtaacagcacgcaagagttccacaaatctccgagcattgaagagaagccccagcgcgctgtgccgagtgaattcgcaaatggcctgagcccgaccccggtgaatggtggtgccttggacctgaccagctctcatgctgagaagataatcaaagaggattcacttgggatactatttccttttagggacagaggaaaatttaagaatacagcctgcgacatctgtggaaagactttcgcgtgtcaaagcgccctggatattcactatcggtcccatactaaggagagaccttttatatgtactgtatgcaatcggggattttcgacaaaaggcaatctgaaacagcacatgctgacccatcagatgagagatctccccagtcagctgtttgaaccgagtagcaatctgggacctaatcagaatagcgcagttatccctgcaaattcactgtcctctctgatcaagaccgaagtcaatggatttgtgcatgtgtcgccccaggattccaaagatactccaacatctcacgtaccctcaggcccattgtcttcttctgcaactagccccgttctcctgccggcactaccaaggagaacacccaagcaacattactgcaacacctgcggtaaaacctttagctcctcctctgctcttcagatccacgaacgtactcacactggtgaaaagcctttcgcatgtaccatctgcggcagggcattcacaacaaaaggcaatctcaaagtgcacatgggcacgcatatgtggaatagtacccccgctaggagaggtaggagattgtctgtagacggcccaatgacgtttttgggcggaaatccagtgaaattccccgagatgtttcaaaaggacctagccgctcgaagtggctccggggacccttcatctttttggaaccaatatgctgcagccctcagtaatggcctggccatgaaggcgaatgagatctcagtcattcagaacgggggaattcctccgattcccggatctctggggtcaggtaactcctcccctgtctctggcttgactgggaatctcgaacgcctgcagaattcggagccaaacgccccactcgcaggacttgagaagatggcttcttccgagaatggaactaattttcgttttactagattcgtggaggactccaaggaaattgttacctcctag

SEQ ID NO: 316286 - DNA, 5130 bp, Artificial Sequence
  derived and/or modified sequence
gctgatgtttgagccagcatgtcgcggaggaagcaagcgaagcctcaacatttccaatccgaccccgaagtggcctcgctcccccggcgagatggagacacagaaaagggtcaaccgagtcgccctactaagagcaaggatgcccacgtctgtggccggtgctgtgccgagttctttgaattatcagatcttctgctccacaagaagaactgtactaaaaatcaattagttttaatcgtaaatgaaaatccagcctccccacccgaaaccttctcccccagcccccctcctgataatcctgatgaacaaatgaatgacacagttaacaaaacagatcaagtggactgcagcgacctttcagaacacaacggacttgacagggaagagtccatggaggtggaggccccggttgctaacaaaagcggcagcggcacttccagcggcagccacagcagtaccgccccaagcagcagcagcagcagcagcagcagcagcggcggcggcggcagctcctccacaggtacctcagcgatcacaacctctctacctcaactcggggacctgacaacactgggcaacttctccgtaatcaacagcaacgtcatcatcgagaacctccagagcaccaaggtggcggtggcccagttctcccaggaagcgaggtgcggcggggcctctgggggcaagctggccgtcccagccctcatggaacaactcctagctctgcagcagcagcagatccaccagctgcaattgatcgaacagattcgtcaccaaatattgctgttggcttctcagaatgcagacttgccaacatcttctagtccttctcaaggtactttacgaacatctgccaaccccttgtccacgctaagttcccatttatctcagcagctggcagcagcagctggattggcacagagcctcgccagccaatctgccagcattagtggtgtgaaacagctacccccaatccagctacctcagagcagttctggcaacaccatcattccatccaacagcggctcttctcccaatatgaacatattggcagcggcagttaccaccccgtcctctgaaaaagtggcttcaagtgctggggcctcccatgtcagcaacccagcggtctcatcatcgtcctcaccagcttttgcaataagcagtttattaagtcctgcgtctaatccacttctacctcagcaagcctccgctaactcggttttccccagccctttgcccaacatcggaacaactgcagaggatttaaactccttgtctgccttggcccagcaaagaaaaagcaagccaccaaatgtcactgcctttgaagcgaaaagtacttccgatgaggcattcttcaaacacaagtgcaggttctgcgcgaaggtctttgggagtgacagtgccttgcagatccacttgcgttcccataccggagagaggccattcaagtgcaacatctgcgggaacaggttctccaccaaggggaatctgaaagtccactttcagcgccacaaagagaaataccctcatatccagatgaacccctatcctgtgcctgagcatttggacaatatccccacgagtactggcatcccatatggcatgtccatccctccagagaagccagtcaccagctggctagacaccaaaccagtcctgcctactctgaccacttcagtcggcctgccgttgcccccaaccctcccaagcctcatacccttcatcaagacggaagagccagcccccatccccatcagccattctgccaccagccccccaggctcagtcaaaagtgactccgggggccctgagtcagccacaagaaacctaggtgggctcccagaggaagccgaagggtccactctgccaccctctggtggcaaaagcgaagagagtggcatggtcaccaactcagtcccgacggcgagcagtagcgtcctgagctccccagcggcagactgcggccccgcgggcagtgccaccaccttcaccaaccctttgttgccgctcatgtccgagcagttcaaggccaagtttccttttgggggactcctggactcagctcaggcatcagagacgtccaagcttcagcaactggtagaaaacattgacaagaaggccactgaccccaatgagtgcatcatctgccaccgggttctcagctgccagagcgccttgaaaatgcactacaggacacacactggggagaggccctttaagtgtaagatctgtggccgggctttcaccacgaaagggaatcttaaaacccactacagtgtccatcgtgctatgcccccgctcagagtccagcattcctgccccatctgccagaagaagttcacgaacgctgtggtcctgcagcagcacatccgaatgcatatgggaggccagatccccaacaccccagtccccgacagctactctgagtccatggagtctgacacaggttcctttgatgagaaaaattttgatgacctagacaacttctctgatgaaaacatggaagactgtcctgagggcagcatccctgatacacctaagtctgcagacgcctcccaagacagcttatcctcttcgcctttgcccctcgagatgtcgagcatcgctgctttggaaaatcagatgaagatgatcaatgctggcctggcagagcagctacaggccagcctgaagtcagtggagaatgggtccatcgagggggatgtcctgaccaatgattcatcctcagtgggtggtgacatggaaagccaaagtgctggcagcccagccatctcagagtctacctcttccatgcaggctctgtccccgtccaacagcacgcaggagttccacaagtcacccagcattgaggagaaaccacagagagcggtcccaagcgagtttgccaatggtttgtctcccaccccagtgaatggtggggctttggatttgacatctagtcacgcagagaaaatcatcaaagaagattctttggggatcctcttcccttttagagaccggggtaaatttaaaaacactgcttgtgacatttgtggcaaaacatttgcttgtcagagtgccttggacattcactatagaagtcataccaaagagagaccatttatttgcacagtttgcaatcgtggcttttccacaaagggtaatttgaagcagcacatgttgacacatcagatgcgagatctgccatcccagctctttgagcccagttccaaccttggccccaatcagaactcagcggtgattcccgccaactcgttgtcatctctcatcaagacagaggtcaacggcttcgtgcatgtttctcctcaggacagtaaggacacccccaccagtcacgtcccgtctgggcctctgtcttcctctgccacatccccagttctgctccctgctctgcccaggagaactcccaagcagcactactgcaacacatgtggcaaaaccttctcctcatcgagtgccctgcagattcacgagagaactcacactggagagaaaccctttgcttgcactatttgtggaagagctttcacgactaaaggcaatcttaaggtacacatgggcactcacatgtggaatagcacccctgcacgacggggtcggcggctctctgtggatggccccatgacatttctaggaggcaatcccgtcaagttcccagaaatgttccagaaggatttggcggcaagatcaggaagtggggatccttccagcttctggaatcagtatgcagcagcgctctccaacgggctggcgatgaaggccaacgagatctccgtcattcagaacggtggcatccctccaattcctggaagcctcggcagtgggaacagctcacctgttagtgggctgacgggaaacctggagaggctccagaactcagagcccaatgctcccctggccggcctggagaaaatggcaagcagtgagaacggaaccaacttccgcttcacccgcttcgtggaggacagcaaggagatcgtcacgagttaaagcagctcgggctggagacatagcattcattcctgttcagaatgcgacctatggtggcctcctactccttgccccccaccccgccccgccccttccttctgttccccagatctatgaactacaacattatgaagacattcttttgtaccttgttcaactttagagttctaagaaagcttatttattagcgatataaccttgctttgcaaacagaatgcaagcgttaactttggtcttctgtattttggactaaatactaattgactagagtgctgtaaacttgctgtaacatttatggcaattgcaagttgccctgctaggcagttgtaatctggcattaacttattttctatatccagtttaatatgaatctggtgttgatgcaatgcctcagtgatgcattagatctctaataaagtctgtatatacatgtacactttgatcctgctggaaaattttatcagcaaacacattgtctaatctttcaaaacagatttaaggaaaggactgaaagtacagactgaacagtgtggttctttgaaaggtttggttttttaatttttattctaaaattcaacctttttttttgtcgatttaaccatttccattttgaactgctatttgtattgtgctttttacttgagtcgtcttcaatgttaataagtttctgtacagtaataagcacgcagaattctttagagaaaaagaaaacaagcgttgttttggtagttgaaactgagacgtaacattttgccttgtaggtatattcacgatagaaaatgtgtgctggaatttcacaatgctgctaagtatagcatcttgaacaaccttcagtggagaaaatgtagatgctcttgtatatacaataagaaatatcactttcattcaaatgtacatatgttccttacaagagcaaatgcttcttcttgatcaagagagcaggtatagtgtttgtttattttgtcttaggtatggaagaaaaaaattggactgttacatgcactttcttggaaagttgaaaggaaagggggggtccaatttctttaacatttaatacttactaacaacagagatactgtaattttactcaagtaatcaaatacattttttttgcaacagataaaacaaaatactgtg

SEQ ID NO: 316287 - DNA, 5253 bp, Artificial Sequence
  derived and/or modified sequence
ctttggaggttcagagctgcaagaagatggggactggtgtcggggcgccagcgcctgacccgctggggttgcggccggggtggagagtgctgctggccgccagttgttccggagacggtgcaaacggacggggaaagtgtcggggtctggctcgcaaaatttatctccgcatctcttcccacaacacttgcaccctctgccccccaaaatctttctggagacacagaaaagggtcaaccgagtcgccctactaagagcaaggatgcccacgtctgtggccggtgctgtgccgagttctttgaattatcagatcttctgctccacaagaagaactgtactaaaaatcaattagttttaatcgtaaatgaaaatccagcctccccacccgaaaccttctcccccagcccccctcctgataatcctgatgaacaaatgaatgacacagttaacaaaacagatcaagtggactgcagcgacctttcagaacacaacggacttgacagggaagagtccatggaggtggaggccccggttgctaacaaaagcggcagcggcacttccagcggcagccacagcagtaccgccccaagcagcagcagcagcagcagcagcagcagcggcggcggcggcagctcctccacaggtacctcagcgatcacaacctctctacctcaactcggggacctgacaacactgggcaacttctccgtaatcaacagcaacgtcatcatcgagaacctccagagcaccaaggtggcggtggcccagttctcccaggaagcgaggtgcggcggggcctctgggggcaagctggccgtcccagccctcatggaacaactcctagctctgcagcagcagcagatccaccagctgcaattgatcgaacagattcgtcaccaaatattgctgttggcttctcagaatgcagacttgccaacatcttctagtccttctcaaggtactttacgaacatctgccaaccccttgtccacgctaagttcccatttatctcagcagctggcagcagcagctggattggcacagagcctcgccagccaatctgccagcattagtggtgtgaaacagctacccccaatccagctacctcagagcagttctggcaacaccatcattccatccaacagcggctcttctcccaatatgaacatattggcagcggcagttaccaccccgtcctctgaaaaagtggcttcaagtgctggggcctcccatgtcagcaacccagcggtctcatcatcgtcctcaccagcttttgcaataagcagtttattaagtcctgcgtctaatccacttctacctcagcaagcctccgctaactcggttttccccagccctttgcccaacatcggaacaactgcagaggatttaaactccttgtctgccttggcccagcaaagaaaaagcaagccaccaaatgtcactgcctttgaagcgaaaagtacttccgatgaggcattcttcaaacacaagtgcaggttctgcgcgaaggtctttgggagtgacagtgccttgcagatccacttgcgttcccataccggagagaggccattcaagtgcaacatctgcgggaacaggttctccaccaaggggaatctgaaagtccactttcagcgccacaaagagaaataccctcatatccagatgaacccctatcctgtgcctgagcatttggacaatatccccacgagtactggcatcccatatggcatgtccatccctccagagaagccagtcaccagctggctagacaccaaaccagtcctgcctactctgaccacttcagtcggcctgccgttgcccccaaccctcccaagcctcatacccttcatcaagacggaagagccagcccccatccccatcagccattctgccaccagccccccaggctcagtcaaaagtgactccgggggccctgagtcagccacaagaaacctaggtgggctcccagaggaagccgaagggtccactctgccaccctctggtggcaaaagcgaagagagtggcatggtcaccaactcagtcccgacggcgagcagtagcgtcctgagctccccagcggcagactgcggccccgcgggcagtgccaccaccttcaccaaccctttgttgccgctcatgtccgagcagttcaaggccaagtttccttttgggggactcctggactcagctcaggcatcagagacgtccaagcttcagcaactggtagaaaacattgacaagaaggccactgaccccaatgagtgcatcatctgccaccgggttctcagctgccagagcgccttgaaaatgcactacaggacacacactggggagaggccctttaagtgtaagatctgtggccgggctttcaccacgaaagggaatcttaaaacccactacagtgtccatcgtgctatgcccccgctcagagtccagcattcctgccccatctgccagaagaagttcacgaacgctgtggtcctgcagcagcacatccgaatgcatatgggaggccagatccccaacaccccagtccccgacagctactctgagtccatggagtctgacacaggttcctttgatgagaaaaattttgatgacctagacaacttctctgatgaaaacatggaagactgtcctgagggcagcatccctgatacacctaagtctgcagacgcctcccaagacagcttatcctcttcgcctttgcccctcgagatgtcgagcatcgctgctttggaaaatcagatgaagatgatcaatgctggcctggcagagcagctacaggccagcctgaagtcagtggagaatgggtccatcgagggggatgtcctgaccaatgattcatcctcagtgggtggtgacatggaaagccaaagtgctggcagcccagccatctcagagtctacctcttccatgcaggctctgtccccgtccaacagcacgcaggagttccacaagtcacccagcattgaggagaaaccacagagagcggtcccaagcgagtttgccaatggtttgtctcccaccccagtgaatggtggggctttggatttgacatctagtcacgcagagaaaatcatcaaagaagattctttggggatcctcttcccttttagagaccggggtaaatttaaaaacactgcttgtgacatttgtggcaaaacatttgcttgtcagagtgccttggacattcactatagaagtcataccaaagagagaccatttatttgcacagtttgcaatcgtggcttttccacaaagggtaatttgaagcagcacatgttgacacatcagatgcgagatctgccatcccagctctttgagcccagttccaaccttggccccaatcagaactcagcggtgattcccgccaactcgttgtcatctctcatcaagacagaggtcaacggcttcgtgcatgtttctcctcaggacagtaaggacacccccaccagtcacgtcccgtctgggcctctgtcttcctctgccacatccccagttctgctccctgctctgcccaggagaactcccaagcagcactactgcaacacatgtggcaaaaccttctcctcatcgagtgccctgcagattcacgagagaactcacactggagagaaaccctttgcttgcactatttgtggaagagctttcacgactaaaggcaatcttaaggtacacatgggcactcacatgtggaatagcacccctgcacgacggggtcggcggctctctgtggatggccccatgacatttctaggaggcaatcccgtcaagttcccagaaatgttccagaaggatttggcggcaagatcaggaagtggggatccttccagcttctggaatcagtatgcagcagcgctctccaacgggctggcgatgaaggccaacgagatctccgtcattcagaacggtggcatccctccaattcctggaagcctcggcagtgggaacagctcacctgttagtgggctgacgggaaacctggagaggctccagaactcagagcccaatgctcccctggccggcctggagaaaatggcaagcagtgagaacggaaccaacttccgcttcacccgcttcgtggaggacagcaaggagatcgtcacgagttaaagcagctcgggctggagacatagcattcattcctgttcagaatgcgacctatggtggcctcctactccttgccccccaccccgccccgccccttccttctgttccccagatctatgaactacaacattatgaagacattcttttgtaccttgttcaactttagagttctaagaaagcttatttattagcgatataaccttgctttgcaaacagaatgcaagcgttaactttggtcttctgtattttggactaaatactaattgactagagtgctgtaaacttgctgtaacatttatggcaattgcaagttgccctgctaggcagttgtaatctggcattaacttattttctatatccagtttaatatgaatctggtgttgatgcaatgcctcagtgatgcattagatctctaataaagtctgtatatacatgtacactttgatcctgctggaaaattttatcagcaaacacattgtctaatctttcaaaacagatttaaggaaaggactgaaagtacagactgaacagtgtggttctttgaaaggtttggttttttaatttttattctaaaattcaacctttttttttgtcgatttaaccatttccattttgaactgctatttgtattgtgctttttacttgagtcgtcttcaatgttaataagtttctgtacagtaataagcacgcagaattctttagagaaaaagaaaacaagcgttgttttggtagttgaaactgagacgtaacattttgccttgtaggtatattcacgatagaaaatgtgtgctggaatttcacaatgctgctaagtatagcatcttgaacaaccttcagtggagaaaatgtagatgctcttgtatatacaataagaaatatcactttcattcaaatgtacatatgttccttacaagagcaaatgcttcttcttgatcaagagagcaggtatagtgtttgtttattttgtcttaggtatggaagaaaaaaattggactgttacatgcactttcttggaaagttgaaaggaaagggggggtccaatttctttaacatttaatacttactaacaacagagatactgtaattttactcaagtaatcaaatacattttttttgcaacagataaaacaaaatactgtg

SEQ ID NO: 316288 - DNA, 4334 bp, Artificial Sequence
  derived and/or modified sequence
attctgccccagctgatgtttgagccagcatgtcgcggaggaagcaagcgaagcctcaacatttccaatccgaccccgaagtggcctcgctcccccggcgagatggagacacagaaaagggtcaaccgagtcgccctactaagagcaaggatgcccacgtctgtggccggtgctgtgccgagttctttgaattatcagatcttctgctccacaagaagaactgtactaaaaatcaattagttttaatcgtaaatgaaaatccagcctccccacccgaaaccttctcccccagcccccctcctgataatcctgatgaacaaatgaatgacacagttaacaaaaccggcagccacagcagtaccgccccaagcagcagcagcagcagcagcagcagcagcggcggcggcggcagctcctccacaggtacctcagcgatcacaacctctctacctcaactcggggacctgacaacactgggcaacttctccgtaatcaacagcaacgtcatcatcgagaacctccagagcaccaaggtggcggtggcccagttctcccaggaagcgaggtgcggcggggcctctgggggcaagctggccgtcccagccctcatggaacaactcctagctctgcagcagcagcagatccaccagctgcaattgatcgaacagattcgtcaccaaatattgctgttggcttctcagaatgcagacttgccaacatcttctagtccttctcaaggtactttacgaacatctgccaaccccttgtccacgctaagttcccatttatctcagcagctggcagcagcagctggattggcacagagcctcgccagccaatctgccagcattagtggtgtgaaacagctacccccaatccagctacctcagagcagttctggcaacaccatcattccatccaacagcggctcttctcccaatatgaacatattggcagcggcagttaccaccccgtcctctgaaaaagtggcttcaagtgctggggcctcccatgtcagcaacccagcggtctcatcatcgtcctcaccagcttttgcaataagcagtttattaagtcctgcgtctaatccacttctacctcagcaagcctccgctaactcggttttccccagccctttgcccaacatcggaacaactgcagaggatttaaactccttgtctgccttggcccagcaaagaaaaagcaagccaccaaatgtcactgcctttgaagcgaaaagtacttccgatgaggcattcttcaaacacaagtgcaggttctgcgcgaaggtctttgggagtgacagtgccttgcagatccacttgcgttcccataccggagagaggccattcaagtgcaacatctgcgggaacaggttctccaccaaggggaatctgaaagtccactttcagcgccacaaagagaaataccctcatatccagatgaacccctatcctgtgcctgagcatttggacaatatccccacgagtactggcatcccatatggcatgtccatccctccagagaagccagtcaccagctggctagacaccaaaccagtcctgcctactctgaccacttcagtcggcctgccgttgcccccaaccctcccaagcctcatacccttcatcaagacggaagagccagcccccatccccatcagccattctgccaccagccccccaggctcagtcaaaagtgactccgggggccctgagtcagccacaagaaacctaggtgggctcccagaggaagccgaagggtccactctgccaccctctggtggcaaaagcgaagagagtggcatggtcaccaactcagtcccgacggcgagcagtagcgtcctgagctccccagcggcagactgcggccccgcgggcagtgccaccaccttcaccaaccctttgttgccgctcatgtccgagcagttcaaggccaagtttccttttgggggactcctggactcagctcaggcatcagagacgtccaagcttcagcaactggtagaaaacattgacaagaaggccactgaccccaatgagtgcatcatctgccaccgggttctcagctgccagagcgccttgaaaatgcactacaggacacacactggggagaggccctttaagtgtaagatctgtggccgggctttcaccacgaaagggaatcttaaaacccactacagtgtccatcgtgctatgcccccgctcagagtccagcattcctgccccatctgccagaagaagttcacgaacgctgtggtcctgcagcagcacatccgaatgcatatgggaggccagatccccaacaccccagtccccgacagctactctgagtccatggagtctgacacaggttcctttgatgagaaaaattttgatgacctagacaacttctctgatgaaaacatggaagactgtcctgagggcagcatccctgatacacctaagtctgcagacgcctcccaagacagcttatcctcttcgcctttgcccctcgagatgtcgagcatcgctgctttggaaaatcagatgaagatgatcaatgctggcctggcagagcagctacaggccagcctgaagtcagtggagaatgggtccatcgagggggatgtcctgaccaatgattcatcctcagtgggtggtgacatggaaagccaaagtgctggcagcccagccatctcagagtctacctcttccatgcaggctctgtccccgtccaacagcacgcaggagttccacaagtcacccagcattgaggagaaaccacagagagcggtcccaagcgagtttgccaatggtttgtctcccaccccagtgaatggtggggctttggatttgacatctagtcacgcagagaaaatcatcaaagaagattctttggggatcctcttcccttttagagaccggggtaaatttaaaaacactgcttgtgacatttgtggcaaaacatttgcttgtcagagtgccttggacattcactatagaagtcataccaaagagagaccatttatttgcacagtttgcaatcgtggcttttccacaaagggtaatttgaagcagcacatgttgacacatcagatgcgagatctgccatcccagctctttgagcccagttccaaccttggccccaatcagaactcagcggtgattcccgccaactcgttgtcatctctcatcaagacagaggtcaacggcttcgtgcatgtttctcctcaggacagtaaggacacccccaccagtcacgtcccgtctgggcctctgtcttcctctgccacatccccagttctgctccctgctctgcccaggagaactcccaagcagcactactgcaacacatgtggcaaaaccttctcctcatcgagtgccctgcagattcacgagagaactcacactggagagaaaccctttgcttgcactatttgtggaagagctttcacgactaaaggcaatcttaaggtacacatgggcactcacatgtggaatagcacccctgcacgacggggtcggcggctctctgtggatggccccatgacatttctaggaggcaatcccgtcaagttcccagaaatgttccagaaggatttggcggcaagatcaggaagtggggatccttccagcttctggaatcagtatgcagcagcgctctccaacgggctggcgatgaaggccaacgagatctccgtcattcagaacggtggcatccctccaattcctggaagcctcggcagtgggaacagctcacctgttagtgggctgacgggaaacctggagaggctccagaactcagagcccaatgctcccctggccggcctggagaaaatggcaagcagtgagaacggaaccaacttccgcttcacccgcttcgtggaggacagcaaggagatcgtcacgagttaaagcagctcgggctggagacatagcattcattcctgttcagaatgcgacctatggtggcctcctactccttgccccccaccccgccccgccccttccttctgttccccagatctatgaactacaacattatgaagacattcttttgtaccttgttcaactttagagttctaagaaagcttatttattagcgatataaccttgctttgcaaacagaatgcaagcgttaactttggtcttctgtattttggactaaatactaattgactagagtgctgtaaacttgctgtaacatttatggcaattgcaagttgccctgctaggcagttgtaatctggcattaacttattttctatatccagtttaatatgaatctggtgttgatgcaatgcctcagtgatgcattagatctctaataaagtctgtatatacatgtacact

SEQ ID NO: 316289 - DNA, 3975 bp, Artificial Sequence
  derived and/or modified sequence
atgagcagaagaaagcaggccaagccccagcacttccagagcgaccccgaggtggccagcctgcccagaagagacggcgacaccgagaagggccagcccagcagacccaccaagagcaaggacgcccacgtgtgcggcagatgctgcgccgagttcttcgagctgagcgacctgctgctgcacaagaagaactgcaccaagaaccagctggtgctgatcgtgaacgagaaccccgccagcccccccgagaccttcagccccagccccccccccgacaaccccgacgagcagatgaacgacaccgtgaacaagaccgaccaggtggactgcagcgacctgagcgagcacaacggcctggacagagaggagagcatggaggtggaggcccccgtggccaacaagagcggcagcggcaccagcagcggcagccacagcagcaccgcccccagcagcagcagcagcagcagcagcagcagcggcggcggcggcagcagcagcaccggcaccagcgccatcaccaccagcctgccccagctgggcgacctgaccaccctgggcaacttcagcgtgatcaacagcaacgtgatcatcgagaacctgcagagcaccaaggtggccgtggcccagttcagccaggaggccagatgcggcggcgccagcggcggcaagctggccgtgcccgccctgatggagcagctgctggccctgcagcagcagcagatccaccagctgcagctgatcgagcagatcagacaccagatcctgctgctggccagccagaacgccgacctgcccaccagcagcagccccagccagggcaccctgagaaccagcgccaaccccctgagcaccctgagcagccacctgagccagcagctggccgccgccgccggcctggcccagagcctggccagccagagcgccagcatcagcggcgtgaagcagctgccccccatccagctgccccagagcagcagcggcaacaccatcatccccagcaacagcggcagcagccccaacatgaacatcctggccgccgccgtgaccacccccagcagcgagaaggtggccagcagcgccggcgccagccacgtgagcaaccccgccgtgagcagcagcagcagccccgccttcgccatcagcagcctgctgagccccgccagcaaccccctgctgccccagcaggccagcgccaacagcgtgttccccagccccctgcccaacatcggcaccaccgccgaggacctgaacagcctgagcgccctggcccagcagagaaagagcaagccccccaacgtgaccgccttcgaggccaagagcaccagcgacgaggccttcttcaagcacaagtgcagattctgcgccaaggtgttcggcagcgacagcgccctgcagatccacctgagaagccacaccggcgagagacccttcaagtgcaacatctgcggcaacagattcagcaccaagggcaacctgaaggtgcacttccagagacacaaggagaagtacccccacatccagatgaacccctaccccgtgcccgagcacctggacaacatccccaccagcaccggcatcccctacggcatgagcatcccccccgagaagcccgtgaccagctggctggacaccaagcccgtgctgcccaccctgaccaccagcgtgggcctgcccctgccccccaccctgcccagcctgatccccttcatcaagaccgaggagcccgcccccatccccatcagccacagcgccaccagcccccccggcagcgtgaagagcgacagcggcggccccgagagcgccaccagaaacctgggcggcctgcccgaggaggccgagggcagcaccctgccccccagcggcggcaagagcgaggagagcggcatggtgaccaacagcgtgcccaccgccagcagcagcgtgctgagcagccccgccgccgactgcggccccgccggcagcgccaccaccttcaccaaccccctgctgcccctgatgagcgagcagttcaaggccaagttccccttcggcggcctgctggacagcgcccaggccagcgagaccagcaagctgcagcagctggtggagaacatcgacaagaaggccaccgaccccaacgagtgcatcatctgccacagagtgctgagctgccagagcgccctgaagatgcactacagaacccacaccggcgagagacccttcaagtgcaagatctgcggcagagccttcaccaccaagggcaacctgaagacccactacagcgtgcacagagccatgccccccctgagagtgcagcacagctgccccatctgccagaagaagttcaccaacgccgtggtgctgcagcagcacatcagaatgcacatgggcggccagatccccaacacccccgtgcccgacagctacagcgagagcatggagagcgacaccggcagcttcgacgagaagaacttcgacgacctggacaacttcagcgacgagaacatggaggactgccccgagggcagcatccccgacacccccaagagcgccgacgccagccaggacagcctgagcagcagccccctgcccctggagatgagcagcatcgccgccctggagaaccagatgaagatgatcaacgccggcctggccgagcagctgcaggccagcctgaagagcgtggagaacggcagcatcgagggcgacgtgctgaccaacgacagcagcagcgtgggcggcgacatggagagccagagcgccggcagccccgccatcagcgagagcaccagcagcatgcaggccctgagccccagcaacagcacccaggagttccacaagagccccagcatcgaggagaagccccagagagccgtgcccagcgagttcgccaacggcctgagccccacccccgtgaacggcggcgccctggacctgaccagcagccacgccgagaagatcatcaaggaggacagcctgggcatcctgttccccttcagagacagaggcaagttcaagaacaccgcctgcgacatctgcggcaagaccttcgcctgccagagcgccctggacatccactacagaagccacaccaaggagagacccttcatctgcaccgtgtgcaacagaggcttcagcaccaagggcaacctgaagcagcacatgctgacccaccagatgagagacctgcccagccagctgttcgagcccagcagcaacctgggccccaaccagaacagcgccgtgatccccgccaacagcctgagcagcctgatcaagaccgaggtgaacggcttcgtgcacgtgagcccccaggacagcaaggacacccccaccagccacgtgcccagcggccccctgagcagcagcgccaccagccccgtgctgctgcccgccctgcccagaagaacccccaagcagcactactgcaacacctgcggcaagaccttcagcagcagcagcgccctgcagatccacgagagaacccacaccggcgagaagcccttcgcctgcaccatctgcggcagagccttcaccaccaagggcaacctgaaggtgcacatgggcacccacatgtggaacagcacccccgccagaagaggcagaagactgagcgtggacggccccatgaccttcctgggcggcaaccccgtgaagttccccgagatgttccagaaggacctggccgccagaagcggcagcggcgaccccagcagcttctggaaccagtacgccgccgccctgagcaacggcctggccatgaaggccaacgagatcagcgtgatccagaacggcggcatcccccccatccccggcagcctgggcagcggcaacagcagccccgtgagcggcctgaccggcaacctggagagactgcagaacagcgagcccaacgcccccctggccggcctggagaagatggccagcagcgagaacggcaccaacttcagattcaccagattcgtggaggacagcaaggagatcgtgaccagctag

SEQ ID NO: 316290 - DNA, 3684 bp, Artificial Sequence
  derived and/or modified sequence
atgaacgacaccgtgaacaagaccgaccaggtggactgcagcgacctgagcgagcacaacggcctggacagagaggagagcatggaggtggaggcccccgtggccaacaagagcggcagcggcaccagcagcggcagccacagcagcaccgcccccagcagcagcagcagcagcagcagcagcagcggcggcggcggcagcagcagcaccggcaccagcgccatcaccaccagcctgccccagctgggcgacctgaccaccctgggcaacttcagcgtgatcaacagcaacgtgatcatcgagaacctgcagagcaccaaggtggccgtggcccagttcagccaggaggccagatgcggcggcgccagcggcggcaagctggccgtgcccgccctgatggagcagctgctggccctgcagcagcagcagatccaccagctgcagctgatcgagcagatcagacaccagatcctgctgctggccagccagaacgccgacctgcccaccagcagcagccccagccagggcaccctgagaaccagcgccaaccccctgagcaccctgagcagccacctgagccagcagctggccgccgccgccggcctggcccagagcctggccagccagagcgccagcatcagcggcgtgaagcagctgccccccatccagctgccccagagcagcagcggcaacaccatcatccccagcaacagcggcagcagccccaacatgaacatcctggccgccgccgtgaccacccccagcagcgagaaggtggccagcagcgccggcgccagccacgtgagcaaccccgccgtgagcagcagcagcagccccgccttcgccatcagcagcctgctgagccccgccagcaaccccctgctgccccagcaggccagcgccaacagcgtgttccccagccccctgcccaacatcggcaccaccgccgaggacctgaacagcctgagcgccctggcccagcagagaaagagcaagccccccaacgtgaccgccttcgaggccaagagcaccagcgacgaggccttcttcaagcacaagtgcagattctgcgccaaggtgttcggcagcgacagcgccctgcagatccacctgagaagccacaccggcgagagacccttcaagtgcaacatctgcggcaacagattcagcaccaagggcaacctgaaggtgcacttccagagacacaaggagaagtacccccacatccagatgaacccctaccccgtgcccgagcacctggacaacatccccaccagcaccggcatcccctacggcatgagcatcccccccgagaagcccgtgaccagctggctggacaccaagcccgtgctgcccaccctgaccaccagcgtgggcctgcccctgccccccaccctgcccagcctgatccccttcatcaagaccgaggagcccgcccccatccccatcagccacagcgccaccagcccccccggcagcgtgaagagcgacagcggcggccccgagagcgccaccagaaacctgggcggcctgcccgaggaggccgagggcagcaccctgccccccagcggcggcaagagcgaggagagcggcatggtgaccaacagcgtgcccaccgccagcagcagcgtgctgagcagccccgccgccgactgcggccccgccggcagcgccaccaccttcaccaaccccctgctgcccctgatgagcgagcagttcaaggccaagttccccttcggcggcctgctggacagcgcccaggccagcgagaccagcaagctgcagcagctggtggagaacatcgacaagaaggccaccgaccccaacgagtgcatcatctgccacagagtgctgagctgccagagcgccctgaagatgcactacagaacccacaccggcgagagacccttcaagtgcaagatctgcggcagagccttcaccaccaagggcaacctgaagacccactacagcgtgcacagagccatgccccccctgagagtgcagcacagctgccccatctgccagaagaagttcaccaacgccgtggtgctgcagcagcacatcagaatgcacatgggcggccagatccccaacacccccgtgcccgacagctacagcgagagcatggagagcgacaccggcagcttcgacgagaagaacttcgacgacctggacaacttcagcgacgagaacatggaggactgccccgagggcagcatccccgacacccccaagagcgccgacgccagccaggacagcctgagcagcagccccctgcccctggagatgagcagcatcgccgccctggagaaccagatgaagatgatcaacgccggcctggccgagcagctgcaggccagcctgaagagcgtggagaacggcagcatcgagggcgacgtgctgaccaacgacagcagcagcgtgggcggcgacatggagagccagagcgccggcagccccgccatcagcgagagcaccagcagcatgcaggccctgagccccagcaacagcacccaggagttccacaagagccccagcatcgaggagaagccccagagagccgtgcccagcgagttcgccaacggcctgagccccacccccgtgaacggcggcgccctggacctgaccagcagccacgccgagaagatcatcaaggaggacagcctgggcatcctgttccccttcagagacagaggcaagttcaagaacaccgcctgcgacatctgcggcaagaccttcgcctgccagagcgccctggacatccactacagaagccacaccaaggagagacccttcatctgcaccgtgtgcaacagaggcttcagcaccaagggcaacctgaagcagcacatgctgacccaccagatgagagacctgcccagccagctgttcgagcccagcagcaacctgggccccaaccagaacagcgccgtgatccccgccaacagcctgagcagcctgatcaagaccgaggtgaacggcttcgtgcacgtgagcccccaggacagcaaggacacccccaccagccacgtgcccagcggccccctgagcagcagcgccaccagccccgtgctgctgcccgccctgcccagaagaacccccaagcagcactactgcaacacctgcggcaagaccttcagcagcagcagcgccctgcagatccacgagagaacccacaccggcgagaagcccttcgcctgcaccatctgcggcagagccttcaccaccaagggcaacctgaaggtgcacatgggcacccacatgtggaacagcacccccgccagaagaggcagaagactgagcgtggacggccccatgaccttcctgggcggcaaccccgtgaagttccccgagatgttccagaaggacctggccgccagaagcggcagcggcgaccccagcagcttctggaaccagtacgccgccgccctgagcaacggcctggccatgaaggccaacgagatcagcgtgatccagaacggcggcatcccccccatccccggcagcctgggcagcggcaacagcagccccgtgagcggcctgaccggcaacctggagagactgcagaacagcgagcccaacgcccccctggccggcctggagaagatggccagcagcgagaacggcaccaacttcagattcaccagattcgtggaggacagcaaggagatcgtgaccagctag

SEQ ID NO: 316291 - DNA, 3867 bp, Artificial Sequence
  derived and/or modified sequence
atgagcagaagaaagcaggccaagccccagcacttccagagcgaccccgaggtggccagcctgcccagaagagacggcgacaccgagaagggccagcccagcagacccaccaagagcaaggacgcccacgtgtgcggcagatgctgcgccgagttcttcgagctgagcgacctgctgctgcacaagaagaactgcaccaagaaccagctggtgctgatcgtgaacgagaaccccgccagcccccccgagaccttcagccccagccccccccccgacaaccccgacgagcagatgaacgacaccgtgaacaagaccggcagccacagcagcaccgcccccagcagcagcagcagcagcagcagcagcagcggcggcggcggcagcagcagcaccggcaccagcgccatcaccaccagcctgccccagctgggcgacctgaccaccctgggcaacttcagcgtgatcaacagcaacgtgatcatcgagaacctgcagagcaccaaggtggccgtggcccagttcagccaggaggccagatgcggcggcgccagcggcggcaagctggccgtgcccgccctgatggagcagctgctggccctgcagcagcagcagatccaccagctgcagctgatcgagcagatcagacaccagatcctgctgctggccagccagaacgccgacctgcccaccagcagcagccccagccagggcaccctgagaaccagcgccaaccccctgagcaccctgagcagccacctgagccagcagctggccgccgccgccggcctggcccagagcctggccagccagagcgccagcatcagcggcgtgaagcagctgccccccatccagctgccccagagcagcagcggcaacaccatcatccccagcaacagcggcagcagccccaacatgaacatcctggccgccgccgtgaccacccccagcagcgagaaggtggccagcagcgccggcgccagccacgtgagcaaccccgccgtgagcagcagcagcagccccgccttcgccatcagcagcctgctgagccccgccagcaaccccctgctgccccagcaggccagcgccaacagcgtgttccccagccccctgcccaacatcggcaccaccgccgaggacctgaacagcctgagcgccctggcccagcagagaaagagcaagccccccaacgtgaccgccttcgaggccaagagcaccagcgacgaggccttcttcaagcacaagtgcagattctgcgccaaggtgttcggcagcgacagcgccctgcagatccacctgagaagccacaccggcgagagacccttcaagtgcaacatctgcggcaacagattcagcaccaagggcaacctgaaggtgcacttccagagacacaaggagaagtacccccacatccagatgaacccctaccccgtgcccgagcacctggacaacatccccaccagcaccggcatcccctacggcatgagcatcccccccgagaagcccgtgaccagctggctggacaccaagcccgtgctgcccaccctgaccaccagcgtgggcctgcccctgccccccaccctgcccagcctgatccccttcatcaagaccgaggagcccgcccccatccccatcagccacagcgccaccagcccccccggcagcgtgaagagcgacagcggcggccccgagagcgccaccagaaacctgggcggcctgcccgaggaggccgagggcagcaccctgccccccagcggcggcaagagcgaggagagcggcatggtgaccaacagcgtgcccaccgccagcagcagcgtgctgagcagccccgccgccgactgcggccccgccggcagcgccaccaccttcaccaaccccctgctgcccctgatgagcgagcagttcaaggccaagttccccttcggcggcctgctggacagcgcccaggccagcgagaccagcaagctgcagcagctggtggagaacatcgacaagaaggccaccgaccccaacgagtgcatcatctgccacagagtgctgagctgccagagcgccctgaagatgcactacagaacccacaccggcgagagacccttcaagtgcaagatctgcggcagagccttcaccaccaagggcaacctgaagacccactacagcgtgcacagagccatgccccccctgagagtgcagcacagctgccccatctgccagaagaagttcaccaacgccgtggtgctgcagcagcacatcagaatgcacatgggcggccagatccccaacacccccgtgcccgacagctacagcgagagcatggagagcgacaccggcagcttcgacgagaagaacttcgacgacctggacaacttcagcgacgagaacatggaggactgccccgagggcagcatccccgacacccccaagagcgccgacgccagccaggacagcctgagcagcagccccctgcccctggagatgagcagcatcgccgccctggagaaccagatgaagatgatcaacgccggcctggccgagcagctgcaggccagcctgaagagcgtggagaacggcagcatcgagggcgacgtgctgaccaacgacagcagcagcgtgggcggcgacatggagagccagagcgccggcagccccgccatcagcgagagcaccagcagcatgcaggccctgagccccagcaacagcacccaggagttccacaagagccccagcatcgaggagaagccccagagagccgtgcccagcgagttcgccaacggcctgagccccacccccgtgaacggcggcgccctggacctgaccagcagccacgccgagaagatcatcaaggaggacagcctgggcatcctgttccccttcagagacagaggcaagttcaagaacaccgcctgcgacatctgcggcaagaccttcgcctgccagagcgccctggacatccactacagaagccacaccaaggagagacccttcatctgcaccgtgtgcaacagaggcttcagcaccaagggcaacctgaagcagcacatgctgacccaccagatgagagacctgcccagccagctgttcgagcccagcagcaacctgggccccaaccagaacagcgccgtgatccccgccaacagcctgagcagcctgatcaagaccgaggtgaacggcttcgtgcacgtgagcccccaggacagcaaggacacccccaccagccacgtgcccagcggccccctgagcagcagcgccaccagccccgtgctgctgcccgccctgcccagaagaacccccaagcagcactactgcaacacctgcggcaagaccttcagcagcagcagcgccctgcagatccacgagagaacccacaccggcgagaagcccttcgcctgcaccatctgcggcagagccttcaccaccaagggcaacctgaaggtgcacatgggcacccacatgtggaacagcacccccgccagaagaggcagaagactgagcgtggacggccccatgaccttcctgggcggcaaccccgtgaagttccccgagatgttccagaaggacctggccgccagaagcggcagcggcgaccccagcagcttctggaaccagtacgccgccgccctgagcaacggcctggccatgaaggccaacgagatcagcgtgatccagaacggcggcatcccccccatccccggcagcctgggcagcggcaacagcagccccgtgagcggcctgaccggcaacctggagagactgcagaacagcgagcccaacgcccccctggccggcctggagaagatggccagcagcgagaacggcaccaacttcagattcaccagattcgtggaggacagcaaggagatcgtgaccagctag

SEQ ID NO: 316292 - DNA, 615 bp, Artificial Sequence
  derived and/or modified sequence
gctcagagagaagtgactttgagctcacagtgtcaccgcctgctgatgggagagctgaattcaaaaccagggtgtctccctgagcagagggacctgcacacagagactccctcctgggctcctggcaccatggccccactgaagatgctggccctggtcaccctcctcctgggggcttctctgcagcacatccacgcagctcgagggaccaatgtgggccgggagtgctgcctggagtacttcaagggagccattccccttagaaagctgaagacgtggtaccagacatctgaggactgctccagggatgccatcgtttttgtaactgtgcagggcagggccatctgttcggaccccaacaacaagagagtgaagaatgcagttaaatacctgcaaagccttgagaggtcttgaagcctcctcaccccagactcctgactgtctcccgggactacctgggacctccaccgttggtgttcaccgcccccaccctgagcgcctgggtccaggggaggccttccagggacgaagaagagccacagtgagggagatcccatccccttgtctgaactggagccatgggcacaaagggcccagattaaagtctttatcctc

SEQ ID NO: 316293 - protein, 180 aa, Artificial Sequence
  derived and/or modified sequence
MWLLPPGQVFNAFFPSRLGNNYITAAGAQVLAEGLRGNTSLQFLGFWGNRVGDEGAQALAEALGDHQSLRWLSLVGNNIGSVGAQALALMLAKNVMLEELCLEENHLQDEGVCSLAEGLKKNSSLKILKLSNNCITYLGAEALLQALERNDTILEVWLRGNTFSLEEVDKLGCRDTRLLL

SEQ ID NO: 316294 - DNA, 543 bp, Artificial Sequence
  derived and/or modified sequence
atgtggctcctgccccccggtcaagtgtttaatgccttctttccgagtcgactaggcaataattatatcacagcagccggcgctcaagtgcttgctgagggtttgaggggcaatacctcacttcaatttcttgggttttggggcaacagggtgggggatgaaggagcccaagccctcgccgaggctttaggtgaccaccagtcgctccgctggctgtccctggttggtaacaacattggttctgtgggggcccaggcgctcgccctgatgcttgcaaagaacgtgatgttagaggaactctgtctggaggagaaccatctgcaggacgaaggggtgtgctcactggcagagggccttaaaaagaacagctccctaaagatcctgaagttaagcaataactgcatcacatacctgggcgctgaggctttgctccaagccctcgaaagaaatgatactatcctggaagtgtggctgcgcggaaacacgttctcacttgaagaggttgataagctgggctgtcgtgatacaagacttcttctgtag

SEQ ID NO: 316295 - DNA, 543 bp, Artificial Sequence
  derived and/or modified sequence
atgtggctgctgcccccaggccaggtgttcaatgccttcttccccagccggctgggcaacaactacatcacagctgctggggcccaggtgctggccgagggcctgcggggcaacaccagcctgcagttcctgggcttctggggcaacagagtgggagatgaaggagcccaggccctggccgaggccctgggggaccaccagagcctgcgctggctgagcctggtgggcaacaacatcggctctgtgggcgcccaggccctggccctgatgctggccaagaatgtgatgctggaggagctgtgcctggaggagaaccacctgcaggatgaaggagtgtgcagcctggccgagggcctgaagaagaacagcagcctgaagatcctgaagctgagcaacaactgcatcacctacctgggcgctgaggccctgctgcaggccctggagagaaatgacaccatcctggaggtgtggctgcggggcaacaccttcagcctggaggaggtggacaagctgggctgccgggacacccggctgctgctgtag

SEQ ID NO: 316296 - DNA, 543 bp, Artificial Sequence
  derived and/or modified sequence
atgtggctgctgccccccggccaggtgttcaacgccttcttccccagccggctgggcaacaattatattactgctgcaggggcacaggttctggcagaaggactacggggaaatacttcactccagtttctgggcttctgggggaatcgggtcggtgatgaaggagctcaagccctagcagaagctctcggcgatcaccagtcattgaggtggctttctctcgtgggcaacaatatcggatcagtcggcgctcaggctcttgctctgatgctggctaaaaacgtgatgctggaagaactgtgcctggaagagaatcatttacaggatgagggtgtgtgcagtttggctgaaggattgaagaaaaatagcagtctcaaaattttgaagctatcaaacaactgcataacatacctgggagctgaggcgctactccaggccttagaacggaacgacaccatcctggaggtctggttacgcgggaatacgttttcacttgaagaggttgataagctgggttgccgcgatacaaggcttcttctgtag

SEQ ID NO: 316297 - DNA, 1300 bp, Artificial Sequence
  derived and/or modified sequence
aacaacagatctgggaaggctgcagagggcacgatggggtctggatcgagggcggctgagaccagagggaaaggtgtgaccctgagtcaccctcgctgtcccggggaaaccacctcccaggacagctgcctactgtggctcctgcctggaattgtcacactgctgtgcaaacagcgtcccgctgcccctttccctttgctgggggaaaatgaagttgtgggagccgctgagtaaactagacctagcagcgagggcacctgatgtggctgctgcctcccgggcaggtcttcaatgctttcttcccttccaggctggggaataactacatcactgccgcgggagcccaagtgctggccgaggggctccgaggcaacacctccttgcagttcctgggattctggggcaacagagtgggtgacgagggggcccaggccctggctgaagccttgggtgatcaccagagcttgaggtggctcagcctggtggggaacaacattggcagtgtgggtgcccaagccttggcactgatgctggcaaagaacgtcatgctagaagaactctgcctggaggagaaccatctccaggatgaaggtgtatgttctctcgcagaaggactgaagaaaaattcaagtttgaaaatcctgaagttgtccaataactgcatcacctacctaggggcagaagccctcctgcaggcccttgaaaggaatgacaccatcctggaagtctggctccgagggaacactttctctctagaggaggttgacaagctcggctgcagggacaccagactcttgctttgaagtctccgggaggatgttcgtctcagtttgtttgtgagcaggctgtgagtttgggccccagaggctgggtgacatgtgttggcagcctcttcaaaatgagccctgtcctgcctaaggctgaacttgttttctgggaacaccataggtcacctttattctggcagaggagggagcatcagtgccctccaggatagacttttcccaagcctacttttgccattgacttcttcccaagattcaatcccaggatgtacaaggacagcccctcctccatagtatgggactggcctctgctgatcctcccaggcttccgtgtgggtcagtggggcccatggatgtgcttgttaactgagtgccttttggtggagaggcccggcctctcacaaaagaccccttaccactgctctgatgaagaggagtacacagaacacataattcaggaagcagctttccccatgtctcgactcatccatccaggccattccccgtctctggtt

SEQ ID NO: 316298 - DNA, 543 bp, Artificial Sequence
  derived and/or modified sequence
atgtggctgctacccccaggccaggtttttaacgccttcttcccatccagactaggaaataactacatcacagccgcaggggcacaggtgctcgccgagggcttgcgcggaaacacgtcactacagttcttaggcttttggggcaacagggtaggagatgaaggagcccaggcccttgccgaggccttaggcgatcaccaatctttaaggtggctctcacttgtgggcaacaacattggctccgtcggggcacaagcactggctctgatgttggctaagaatgtcatgctggaggagctgtgcctggaggaaaaccacctgcaggacgagggagtgtgcagtttagcagaaggccttaagaagaatagcagtctcaagatactgaaactgagcaacaattgtatcacatatttgggggcagaagcccttctgcaagctttggagcgaaacgacaccatcctggaagtgtggctgcggggaaacaccttctctctggaggaggttgacaaactgggctgccgcgatacgcgccttctgctttag

SEQ ID NO: 316299 - DNA, 543 bp, Artificial Sequence
  derived and/or modified sequence
atgtggctgctgccccccggccaggtgttcaacgccttcttccccagcagactgggcaacaactacatcaccgccgccggcgcccaggtgctggccgagggcctgagaggcaacaccagcctgcagttcctgggcttctggggcaacagagtgggcgacgagggcgcccaggccctggccgaggccctgggcgaccaccagagcctgagatggctgagcctggtgggcaacaacatcggcagcgtgggcgcccaggccctggccctgatgctggccaagaacgtgatgctggaggagctgtgcctggaggagaaccacctgcaggacgagggcgtgtgcagcctggccgagggcctgaagaagaacagcagcctgaagatcctgaagctgagcaacaactgcatcacctacctgggcgccgaggccctgctgcaggccctggagagaaacgacaccatcctggaggtgtggctgagaggcaacaccttcagcctggaggaggtggacaagctgggctgcagagacaccagactgctgctgtag

SEQ ID NO: 316300 - DNA, 441 bp, Artificial Sequence
  derived and/or modified sequence
atgtgcagccaggaggccttccaggcccagagaagccagctggtggagctgctggtgagcggcagcctggagggcttcgagagcgtgctggactggctgctgagctgggaggtgctgagctgggaggactacgagggcttccacctgctgggccagcccctgagccacctggccagaagactgctggacaccgtgtggaacaagggcacctgggcctgccagaagctgatcgccgccgcccaggaggcccaggccgacagccagagccccaagctgcacggctgctgggacccccacagcctgcaccccgccagagacctgcagagccacagacccgccatcgtgagaagactgcacagccacgtggagaacatgctggacctggcctgggagagaggcttcgtgagccagtacgagtgcgacgagatcagactgccctag

SEQ ID NO: 316301 - DNA, 441 bp, Artificial Sequence
  derived and/or modified sequence
atgtgtagccaggaagccttccaggctcagagaagccagctggtggagctcctcgtgtcgggctctctggagggctttgagtccgtcttggactggcttctttcttgggaagtgcttagttgggaggattatgaaggcttccaccttctaggacagccactgtcccatctagctcgcagacttcttgacactgtttggaataagggcacttgggcctgccagaagttgatcgccgcagcacaggaagctcaggcagatagccagtctcctaaactgcacgggtgctgggatccacatagcttacaccctgctagggacctgcagagtcatcggcctgccattgtgagacgcttacattctcacgtggagaatatgctggacctggcctgggagcggggcttcgtgtcacagtacgagtgtgatgagatacgtctgccgtag

SEQ ID NO: 316302 - DNA, 441 bp, Artificial Sequence
  derived and/or modified sequence
atgtgcagccaggaggccttccaggcccagaggagccagctggtggagctgctggtgtctggcagcctggagggctttgagagcgtgctggactggctgctgtcctgggaggtgctgtcctgggaggactatgagggcttccacctgctgggccagcccctgagccacctggcccggcggctgctggacacagtgtggaacaagggcacctgggcctgccagaagctgattgctgctgcccaggaggcccaggccgacagccagagccccaagctgcacggctgctgggacccccacagcctgcacccagcccgggacctgcagagccacaggcctgccatcgtgcggcggctgcacagccacgtggagaacatgctggacctggcctgggagcggggctttgtgtcccagtatgaatgtgatgagatccggctgccctag

SEQ ID NO: 316303 - DNA, 441 bp, Artificial Sequence
  derived and/or modified sequence
atgtgcagccaggaggccttccaggcccagcggagccagctggtggaacttctcgtctcaggcagtctcgagggtttcgagtctgtcctagactggctcctaagttgggaggtgctctcgtgggaggattacgaagggtttcacctgctcggacagcccctatcacacttggcacgccgattactcgatactgtgtggaataaaggtacatgggcatgtcagaaattgatcgccgctgcccaggaggcccaggccgacagtcaatcccccaagttacacgggtgctgggaccctcacagtcttcaccccgctcgggatctgcaaagccaccgccccgccatcgtccggagattacattcccacgtggaaaacatgttggatctggcctgggagcgaggtttcgtgtcacagtatgagtgtgatgagattcgcctgccttag

SEQ ID NO: 316304 - DNA, 441 bp, Artificial Sequence
  derived and/or modified sequence
atgtgctcccaggaggcattccaggcacaaaggagtcagctggtggaactattagtatccggaagcctcgagggattcgagtcagtcctggattggcttctaagctgggaggttctgtcctgggaggactatgagggtttccacctattagggcaaccactgtctcatcttgcacgaagacttttggatactgtgtggaataagggaacatgggcctgccagaaactgattgccgctgcacaggaggcacaggccgatagccagagcccgaagctgcacgggtgttgggatccacacagcttgcaccctgctagagatttgcagagccacagacccgcaatcgttagacggttgcactcacatgtggagaatatgctagatctggcttgggagcgcggatttgtttcacagtatgagtgcgacgaaattcgactcccctag

SEQ ID NO: 316305 - DNA, 381 bp, Artificial Sequence
  derived and/or modified sequence
atgcagccgtcaggcctagagggaccaggcacctttggtcgctggcccctgctctccctgctcctgttgctgttgttgctgcagccagttacctgtgcatatactacacctgggccaccccgagctctgactactcttggcgcccccagagcccacacaatgcccggcacatatgcccccagtacaacattgtcttctccctcaactcaggggctgcaggaacaggcaagggcactgatgagagatttccctctggtagacggttcaggtcaacccatgtgccatgcccggcccagaactggcatgccttgtgcctctccctggagccggctcacttcatacgctgcctgcgtgcctccaatattgagctggtccctctag

SEQ ID NO: 316306 - DNA, 381 bp, Artificial Sequence
  derived and/or modified sequence
atgcagcccagcggcctggagggccctggcaccttcggccgctggcccctgctgagcctgctgctgctgctgctgctgctgcagcctgtgacctgtgcctacaccaccccaggccccccccgggccctgaccaccctgggcgccccccgggcccacaccatgcctggcacctacgcccccagcaccaccctgagcagccccagcacccagggcctgcaggagcaggcccgggccctgatgagggacttccccctggtggatggcagcggccagcccatgtgccacgcccggcccaggacaggcatgccctgtgccagcccctggagccggctgaccagctatgctgcctgtgtgccccccatcctgtcctggagcctgtag

SEQ ID NO: 316307 - DNA, 381 bp, Artificial Sequence
  derived and/or modified sequence
atgcagcccagcggcctggagggccccggcaccttcggccggtggccactgttaagtctgctgctgctactgcttctcctccaacctgttacctgtgcctacacaacaccgggccctccaagagcactaactactctaggggcccctcgggcccatacgatgcccggtacttacgcaccctctactactttatcctcaccctctactcagggtctgcaggaacaggctcgagcgctcatgagagacttccccctggtggatgggagcggccagcccatgtgccatgctaggccacgcaccggcatgccatgtgcatcgccctggagcagactcacctcatacgcagcctgcgtcccacccatcctatcctggtccctgtag

SEQ ID NO: 316308 - DNA, 381 bp, Artificial Sequence
  derived and/or modified sequence
atgcagccttccggcttggagggcccaggcacattcggccgttggcctttactgtcactattgttgctgctgcttttgcttcagcccgtgacatgcgcctatactaccccagggcctccaagggcgctcacgactttgggagccccaagagcacacacaatgccagggacctacgcccctagcactacactgtcttctccaagcacacagggcctccaggagcaggctagagcattgatgagagacttcccactggtcgatgggtctggccaacccatgtgccacgcacgccctcgaacggggatgccttgtgcctcaccatggagtaggctaaccagttatgccgcttgtgtgcccccaatcctgtcctggtcactatag

SEQ ID NO: 316309 - DNA, 381 bp, Artificial Sequence
  derived and/or modified sequence
atgcagcccagcggcctggagggccccggcaccttcggcagatggcccctgctgagcctgctgctgctgctgctgctgctgcagcccgtgacctgcgcctacaccacccccggcccccccagagccctgaccaccctgggcgcccccagagcccacaccatgcccggcacctacgcccccagcaccaccctgagcagccccagcacccagggcctgcaggagcaggccagagccctgatgagagacttccccctggtggacggcagcggccagcccatgtgccacgccagacccagaaccggcatgccctgcgccagcccctggagcagactgaccagctacgccgcctgcgtgccccccatcctgagctggagcctgtag

SEQ ID NO: 316310 - DNA, 993 bp, Artificial Sequence
  derived and/or modified sequence
attgtttcttgggaattgtctgtatcagacatcatgggagcagatccagggcgacatcaaagggaagcatgagtctccaggaccagaggggcttggatgcagatgatcatcatctgggcactgctggatactgagctctctgactgccacccctgcctgcctgcccggccctgcacaacatgcagccctccggcctcgagggtcccggcacgtttggtcggtggcctctgctgagtctgctgctcctgctgctgctgctccagcctgtaacctgtgcctacaccacgccaggcccccccagagccctcaccacgctgggcgcccccagagcccacaccatgccgggcacctacgctccctcgaccacactcagtagtcccagcacccagggcctgcaagagcaggcacgggccctgatgcgggacttcccgctcgtggacggttctggtcagcctatgtgccatgccagacccaggaccgggatgccctgcgcctcaccctggagcagattgacctcatacgccgcatgtgtgcctcctattctgagctggagcttgtgacctcggctaaaggtaggcaagttgatgggaagcgttaggaacttgattgagctactccagccctggaaagtaatcacctgacctacctgcccccagctctgaacgacactcagaaattggcctgcctcatcggtgtagagggtggccactcgctggacaatagcctctccatcttacctaccttctacatgctgggagtgcgctacctgacgctcacccacacctgcaacacaccctggtgagcctagtgcagatggtgtgggaccgctgaggcaggggcagagatctgcctgaggtcactgtgggcccagaacaagctttacccatgggatgtggcactgactctggagtggggaggggagctgggattctggttttcagaatacgacttgacccctggccagacgcggtggctcatgcctgtaatcccaaa

SEQ ID NO: 316311 - DNA, 849 bp, Artificial Sequence
  derived and/or modified sequence
atgagcagacagaccgccaccgccctgcccaccggcaccagcaagtgcccccccagccagagagtgcccgccctgaccggcaccaccgccagcaacaacgacctggccagcctgttcgagtgccccgtgtgcttcgactacgtgctgccccccatcctgcagtgccagagcggccacctggtgtgcagcaactgcagacccaagctgacctgctgccccacctgcagaggccccctgggcagcatcagaaacctggccatggagaaggtggccaacagcgtgctgttcccctgcaagtacgccagcagcggctgcgagatcaccctgccccacaccgagaaggccgaccacgaggagctgtgcgagttcagaccctacagctgcccctgccccggcgccagctgcaagtggcagggcagcctggacgccgtgatgccccacctgatgcaccagcacaagagcatcaccaccctgcagggcgaggacatcgtgttcctggccaccgacatcaacctgcccggcgccgtggactgggtgatgatgcagagctgcttcggcttccacttcatgctggtgctggagaagcaggagaagtacgacggccaccagcagttcttcgccatcgtgcagctgatcggcaccagaaagcaggccgagaacttcgcctacagactggagctgaacggccacagaagaagactgacctgggaggccacccccagaagcatccacgagggcatcgccaccgccatcatgaacagcgactgcctggtgttcgacaccagcatcgcccagctgttcgccgagaacggcaacctgggcatcaacgtgaccatcagcatgtgctag

SEQ ID NO: 316312 - DNA, 849 bp, Artificial Sequence
  derived and/or modified sequence
atgtcaagacagacagccacagcgctgccgacagggacttccaagtgcccaccctcacagcgtgttccagccctcactggcacgaccgccagtaataacgacctcgcctccctgtttgaatgtcccgtatgttttgattacgtgcttccccctatcttgcagtgccagagtggccacctagtttgctccaactgtcggcccaagcttacgtgttgcccaacttgcagaggccctctggggtccataaggaatcttgcaatggagaaggtggcgaacagcgtgctttttccatgtaaatatgcatcgagcggctgtgaaatcacactgcctcatactgaaaaggctgaccatgaggaattgtgcgagtttagaccgtacagttgtccttgtcctggggcgagttgtaagtggcaaggctctctggatgctgtcatgcctcacctgatgcatcaacacaaaagcatcacgacactgcagggagaagacatcgtgttcctggctacagacattaatctgcctggagctgtagactgggtcatgatgcagtcctgttttggattccacttcatgcttgtactcgagaaacaagaaaagtatgatggacatcagcagttctttgctatagtgcaactaattgggacccggaagcaggcggaaaactttgcctacaggctcgaactaaatggacaccgacgcagactaacttgggaggctacgccaaggtcaattcacgaagggatcgcgactgcgatcatgaacagcgactgtctcgttttcgacacgagcattgcacagctgttcgctgagaatgggaacctcgggatcaacgtgaccatctcaatgtgttag

SEQ ID NO: 316313 - DNA, 849 bp, Artificial Sequence
  derived and/or modified sequence
atgagccggcagacagccacagccctgcccaccggcaccagcaaatgtcctcccagccagagggtgcctgccctgaccggcaccacagccagcaacaatgacctggccagcctgtttgagtgccctgtgtgctttgattatgtgctgccccccatcctgcagtgccagagcggccacctggtgtgcagcaactgccggcccaagctgacctgctgccccacctgccggggccccctgggcagcatccggaacctggccatggagaaggtggccaacagcgtgctcttcccctgcaagtatgccagcagcggctgtgagatcaccctgccccacacagagaaggctgaccacgaggagctgtgtgagttccggccctacagctgcccctgccctggggccagctgcaagtggcagggcagcctggatgctgtgatgccccacctgatgcaccagcacaagagcatcaccaccctgcagggagaagatattgtgttcctggccacagacatcaacctgcctggagctgtggactgggtgatgatgcagagctgcttcggcttccacttcatgctggtgctggagaagcaggagaagtatgatggccaccagcagttctttgccatcgtgcagctgattggcaccaggaagcaggctgaaaattttgcctaccgcctggagctgaatggccacagaagaaggctgacctgggaggccacccccaggagcatccacgagggcatcgccacagccatcatgaacagcgactgcctggtgtttgacaccagcatcgcccagctgtttgctgaaaatggaaacctgggcatcaacgtgaccatctccatgtgctag

SEQ ID NO: 316314 - DNA, 849 bp, Artificial Sequence
  derived and/or modified sequence
atgagccggcagaccgccaccgccctgcccaccggcaccagcaagtgccctcctagccagagggtcccggccttgacagggactaccgcaagcaataatgacttggcctcgctttttgagtgtcctgtatgcttcgattacgtcttgcccccgatcctgcaatgccagagcggtcatcttgtgtgttccaactgtcggccaaagctgacttgctgccccacatgtaggggacctttgggcagtatccggaaccttgctatggaaaaggtagcaaattctgttctctttccgtgcaagtatgcaagctccggctgcgaaataaccctaccccatactgagaaagcagatcacgaagagttgtgcgaatttaggccttactcttgtccatgtcctggagccagctgcaaatggcaaggtagccttgatgccgtcatgccacatctgatgcaccagcataaaagcataaccaccttacaaggcgaggatatagtgttcctagcgacagacattaacctgccgggggctgtggattgggtgatgatgcagtcctgtttcgggttccacttcatgctggtgttagaaaagcaggaaaagtacgacggacatcaacagtttttcgccatagtccaacttatcggaacccgaaaacaagcggagaacttcgcctaccgacttgagctaaacggtcacaggcggcgcctgacttgggaggcaacaccacgatctattcacgaaggcatcgctaccgcaatcatgaatagtgattgtttagtgtttgacacttccatagctcagttgttcgcggaaaacggcaacctgggaataaatgtcactatctccatgtgttag

SEQ ID NO: 316315 - DNA, 849 bp, Artificial Sequence
  derived and/or modified sequence
atgagccggcagacggctactgccctgcccacgggcacatcaaagtgtcctccttcccagcgtgtgccggctctgactggtacaaccgctagcaacaacgacctggcgtccttatttgaatgccccgtatgttttgattacgtccttccacccatactgcaatgccagtctgggcaccttgtttgctccaactgcaggcctaagctcacatgctgccctacatgcagggggcctctcggatcaattcgaaatctcgcaatggaaaaggtcgcaaattctgttctatttccctgtaaatacgcttcttctggttgcgagattacgcttccacacaccgaaaaggcagatcacgaggagctctgcgaattccgcccatatagctgcccatgcccaggcgctagctgcaagtggcagggaagtctggacgcggtgatgcctcacttgatgcatcagcacaagtcaataaccaccctgcaaggtgaggacatagtgtttttggcaactgatataaatctccccggtgctgtggattgggtcatgatgcagtcttgctttggattccatttcatgctagtactagaaaagcaggagaagtatgacggccaccagcagttttttgcaatcgtgcagctgattggcacccgaaagcaagctgagaatttcgcttaccggctggaacttaacggacacaggcggaggttaacctgggaggctacccccaggtctattcatgaaggtattgctactgccattatgaacagcgattgccttgtctttgatacgagtattgcccagctgttcgccgagaacggcaacttgggtattaatgtcacaatctccatgtgctag

SEQ ID NO: 316316 - DNA, 846 bp, Artificial Sequence
  derived and/or modified sequence
atgtcgagacagaccgcaactgccctgccgactggcacctcgaagtgcccgccgtcgcagagggtccccgccctgaccggcaccaccgcatcgaacaacgatctggcatccctcttcgaatgccccgtctgtttcgactacgttctgccccctatcctccagtgccagtcaggacacctcgtctgctcaaattgccggcctaagctcacttgctgccctacctgccggggacccctgggatccatccgcaatctggcgatggaaaaggtagcaaactctgtgctgttcccgtgcaagtacgcaagctccggatgcgagatcacgttgccgcatactgagaaggcggaccacgaggagttgtgcgaatttcgcccgtactcttgcccgtgtcctggcgcttcgtgtaaatggcagggatctttggacgccgtgatgcctcacctcatgcatcaacataaatccatcaccactctgcaaggagaggacatcgtgttcctggcaaccgatatcaatttgccaggagcggtggactgggtgatgatgcaatcatgtttcggttttcacttcatgttggtgctcgaaaagcaagagaagtacgacggtcatcagcagtttttcgccatagtgcaactgatcggcactcgtaaacaggccgagaacttcgcctatcggctggaactgaacggccaccgcaggcggcttacgtgggaagcgaccccgagatcaatccacgaaggaatcgccaccgccattatgaacagcgattgtttggttttcgacactagcatcgctcaactgttcgccgaaaatggaaacctggggattaatgtgacgatctccatgtgc

SEQ ID NO: 316317 - DNA, 846 bp, Artificial Sequence
  derived and/or modified sequence
atgagtcgccagaccgcaaccgccctcccgaccggaacatctaagtgccctccctcccaacgcgtgcctgcgctcactggcaccacagctagcaataatgacctggcctcactgttcgaatgccccgtgtgcttcgattatgtgctgccacccatcctccagtgccagagtgggcatctggtttgctcgaactgtaggccgaaactgacttgctgtcccacctgccgcggcccactcggcagcattaggaacctggctatggaaaaagtcgctaattctgttctgtttccctgcaaatatgcaagcagtggttgtgaaatcacattaccacacaccgagaaagcggaccacgaagagttgtgcgaatttcgaccttacagttgtccgtgtcctggcgcaagttgtaagtggcagggatctctcgacgccgtgatgccacacctgatgcaccagcataaatctattacgacccttcagggtgaggacatcgtgttcctagcgacggatatcaacctgcccggagccgtagattgggtgatgatgcagtcctgctttgggttccacttcatgttggtcctggagaaacaggaaaagtacgacggtcaccagcagtttttcgccatcgtacagcttattggcaccagaaagcaggccgagaacttcgcatacaggttggaactcaatgggcacaggcggagactgacctgggaagcgaccccccggtccatccatgaggggattgccacagccattatgaactctgactgcttggtgttcgacacatcaattgcccagctgttcgccgaaaacggcaatctcggcatcaatgttaccatctcaatgtgc

SEQ ID NO: 316318 - DNA, 846 bp, Artificial Sequence
  derived and/or modified sequence
atgtctcggcagacggccaccgcactgcccactggtacatccaagtgtcctccctcccagcgggtacctgctctgaccggaaccaccgcaagtaataacgatcttgcttcgctgtttgagtgccccgtttgcttcgattatgtgctgcccccgatactgcaatgtcagtccggacatctggtatgcagcaattgccgccccaagctaacatgttgcccaacctgcagaggccccctcggatccattaggaatttagccatggaaaaagtcgccaattctgtactgtttccctgcaagtacgcatcaagtgggtgcgagattacactgcctcatacagagaaggccgaccacgaggagttgtgtgaattccgtccttactcctgcccatgtccgggtgcgagttgcaagtggcagggatctctcgacgcggtgatgcctcatttaatgcaccagcataagagtataactactttacagggggaagacattgtcttcttggcaacagacatcaacttgccgggggccgtcgattgggttatgatgcagagctgctttggcttccacttcatgctagtgctggagaagcaggaaaaatacgacgggcaccaacagttcttcgcaattgtgcagctgatcggcacccgaaaacaggccgagaactttgcttaccgtctagagttgaacggacaccgacgcaggctgacttgggaggccacccctcgctccattcatgaaggaatcgcaacggctatcatgaactcggattgcctggttttcgatacgtcaatagcacaactgttcgccgaaaatgggaacctgggtataaacgttactatatcaatgtgc

SEQ ID NO: 316319 - DNA, 846 bp, Artificial Sequence
  derived and/or modified sequence
atgtcacggcagactgccaccgcactgcccactggcacgtccaagtgcccgccttcgcagcgcgtgcctgcactgactggtaccactgcctcgaataatgacctggcaagcctgtttgaatgcccagtgtgtttcgactacgtgctcccgcccatcctgcagtgccagtcggggcatctggtctgctcgaattgccggcctaaactgacctgttgcccgacctgcagaggccccctcggatccatccgaaacctcgcaatggaaaaggtcgcgaattcggttctcttcccatgcaaatacgcatcttccgggtgcgagatcactctgccccacaccgagaaagcagaccacgaggaactgtgcgagtttcggccgtactcgtgcccgtgccctggggcctcttgtaagtggcagggttcgctcgacgccgtcatgccgcacctcatgcatcaacacaagagcatcactacgctgcagggcgaagatattgtctttctcgccactgatatcaacctgccgggtgctgtcgactgggtcatgatgcaatcctgtttcggattccacttcatgttggtgctcgagaagcaggaaaagtacgatgggcatcagcagttcttcgccatcgtgcagctgatcggcactagaaaacaagccgaaaacttcgcctacaggctcgagctcaatggtcaccggcgccggctgacttgggaagcgaccccaaggtcgatccacgagggaatcgccactgctatcatgaattcggactgccttgtgttcgacacttcaatcgcgcaactgttcgcggaaaacggaaacctgggaatcaatgtgaccatctcgatgtgc

SEQ ID NO: 316320 - DNA, 846 bp, Artificial Sequence
  derived and/or modified sequence
atgagccgccagaccgcgaccgctctgcctactggtacttcgaagtgccctccgtctcaacgtgtccccgccctgaccggaaccactgccagcaacaatgatctcgcctcccttttcgaatgcccagtctgttttgactacgtcctcccgccgatcctgcagtgtcagagcggacatctcgtgtgttcaaattgccggccaaaactcacttgctgccctacttgccgcggaccgttgggtagcatcagaaatctggcaatggaaaaagtcgccaactcggttctcttcccatgcaaatacgcttcatcaggatgcgaaatcacccttccgcacactgagaaggctgaccacgaagaactctgcgagttccggccatactcttgcccttgcccaggtgcctcctgcaagtggcaaggatcactggatgcggtgatgccgcatctcatgcaccagcataaatcgattactactcttcagggagaggacatcgtgtttctcgccaccgacatcaacctgccgggtgccgtggattgggtgatgatgcaatcatgtttcggatttcacttcatgttggtgctcgagaagcaagaaaagtacgacgggcatcagcagttctttgctatcgtgcagctgattggaactaggaagcaagcggagaacttcgcataccggctcgagctgaacggtcatcgcaggaggctcacttgggaagcaactccgcggtcaatccacgagggaatcgccactgccatcatgaactcggattgcctggtgtttgacaccagcatcgctcaattgttcgccgaaaacggcaaccttgggatcaacgtgactatctcgatgtgc

SEQ ID NO: 316321 - DNA, 846 bp, Artificial Sequence
  derived and/or modified sequence
atgagccggcagaccgcaaccgccctgccgacgggaacttcaaagtgcccgccgagccagcgcgtgcccgcgctgactggaactactgcatcgaataatgacttggcttccctgttcgaatgcccggtgtgcttcgattacgtgctgcctcccatcttgcaatgtcagagcggtcacctcgtatgttccaactgcagacctaaactgacttgctgcccgacttgccggggtccactgggatccatccgaaacctcgctatggagaaagttgctaactcagtgctgttcccttgtaagtacgccagtagcgggtgcgaaatcaccctcccccacactgagaaagcggatcatgaagagctgtgtgagttccggccgtattcatgtccttgcccgggtgcctcatgcaagtggcaaggttcgctggacgccgtgatgccacacctgatgcaccagcataaatcgatcaccaccctccaaggagaagacattgttttcctcgcaactgacatcaacctgccaggagccgtggattgggtcatgatgcagtcttgcttcggcttccatttcatgctggtccttgaaaagcaggagaagtacgacggacaccaacagttctttgccatcgtgcagctgatcggcaccagaaagcaggcagagaatttcgcctaccgcctcgaacttaatgggcaccggcgaagactgacctgggaagcaacccctcgatccattcatgagggaatagctacggcaattatgaactcggattgcctcgtgtttgacactagcatcgctcaattgtttgccgaaaacggaaatcttgggattaacgtcacgatcagcatgtgc

SEQ ID NO: 316322 - DNA, 846 bp, Artificial Sequence
  derived and/or modified sequence
atgtcgcgccaaacagctaccgccctgcctacggggacctctaagtgccccccaagccagcgagtccctgcgctgacgggcactaccgccagcaacaatgatctcgcaagcctcttcgagtgccctgtgtgtttcgactatgtactgccccctatcctgcagtgccagtccggtcatttggtgtgtagcaactgtcggcctaagctgacctgctgccccacgtgtaggggacctcttggctcgatccgaaacctggctatggaaaaagtcgccaactccgtgctgttcccctgtaagtacgcctcttcaggatgtgagatcactctccctcacaccgaaaaagccgaccatgaagagttatgtgaatttagaccctactcctgtccttgtcctggggccagttgcaagtggcaggggagtctggacgccgttatgccccacctgatgcatcagcataagagtatcactaccctgcaaggcgaagacattgtgttcctagcaactgatattaacttgcctggggctgtcgactgggtcatgatgcagtcttgtttcgggtttcacttcatgctggtactggagaaacaagagaaatacgatggccaccagcagttctttgctatcgtgcagctgatcggaactagaaagcaggccgagaacttcgcttatcgcttagaactcaatggtcacagaagacggctgacctgggaggcgaccccccgcagcatccacgaaggaatcgccactgccataatgaattctgactgcttagttttcgacacatctatcgcccagcttttcgctgaaaatggcaatttggggattaatgtcaccatcagtatgtgc

SEQ ID NO: 316323 - DNA, 846 bp, Artificial Sequence
  derived and/or modified sequence
atgtcgcggcagactgctacggctctgcctaccggaacgtcgaaatgcccaccgtcccaaagggtgcctgccctgaccggcactacggcgtccaataatgaccttgcaagcctgttcgaatgtccggtttgcttcgactacgtcctcccacctatcttgcagtgccagtcaggtcacctcgtttgttccaattgtcgcccaaaactgacttgctgcccaacttgtcggggaccgctgggaagcatcagaaatttggctatggagaaggtcgctaactccgtgctcttcccctgtaagtatgcctcatcaggatgtgaaattactctgccgcataccgagaaagcggaccacgaagagctctgcgagtttcgcccatactcctgcccgtgccctggagcctcctgtaagtggcagggatcactggatgccgtgatgccgcacctgatgcatcaacataaatcgattaccaccctccagggagaggacatcgtgttcctggcgactgacatcaatctgccgggagcggtggactgggttatgatgcaatcatgcttcggattccatttcatgctggtgcttgaaaagcaagaaaagtacgatggacaccagcagttcttcgctattgtccagctgatcggaactcgcaagcaggcggagaacttcgcttacagactggaactgaacggacacagacgccggctcacctgggaagccactccgcggtctatccacgagggaatcgcaaccgcaatcatgaattccgactgcctggtctttgatactagcatcgcgcagctgttcgctgaaaacggaaacttgggaataaacgtgaccatctctatgtgc

SEQ ID NO: 316324 - DNA, 846 bp, Artificial Sequence
  derived and/or modified sequence
atgtcaagacaaaccgcgactgctctgccaactgggacctcgaagtgcccaccttcgcagcgcgtccctgcactgactggtactaccgcatcaaacaatgatctcgcatctctgttcgagtgtcctgtgtgttttgattacgtgcttcctcctatcctgcagtgtcagtcaggtcaccttgtctgtagcaattgtcgaccaaaattgacctgttgtccaacctgtagaggcccactcggttcaattaggaatctcgcaatggaaaaggtggcaaacagcgtcctctttccttgtaaatacgcatcgtcgggatgtgaaatcacgctccctcatactgagaaagcagatcacgaagagctgtgcgaatttcggccctactcgtgcccttgtccgggtgcttcctgtaagtggcagggttcactggacgcagtaatgccccatctgatgcaccaacataaaagcattaccactcttcaaggagaggacattgtgtttcttgcaacggacattaaccttccaggagcggtggactgggtgatgatgcaatcgtgtttcggatttcatttcatgttggtgcttgaaaagcaggagaagtacgatggccaccaacagtttttcgcgattgttcagctgattggaacgcggaagcaggcagagaatttcgcctaccgacttgaacttaatggtcataggcgccggctgacctgggaagcaaccccacgaagcatccatgagggaatcgcgaccgcaattatgaactccgattgtctcgtctttgatacgtccattgcccaattgtttgcggaaaacggcaacctgggcattaatgtaaccatctccatgtgt

SEQ ID NO: 316325 - DNA, 846 bp, Artificial Sequence
  derived and/or modified sequence
atgagccgccagacggcgactgctctcccaacgggaactagcaaatgtcctccctctcaacgcgtgccagcacttaccggtaccactgcgtcaaacaatgacttggcgagcctcttcgaatgtcctgtctgcttcgactatgtgctcccccctatccttcagtgtcaatcgggtcatctcgtttgttcgaactgccggcctaagctgacttgctgtcctacctgcagaggacctttgggctcaattagaaatttggcaatggaaaaagtcgcaaactccgtgttgtttccatgcaagtacgcatcatccggttgtgaaattaccctgccacacacggaaaaggccgatcacgaagaactgtgcgaattccgcccttactcctgtccatgccctggagcaagctgcaagtggcaaggatcgttggatgcagttatgccacaccttatgcaccagcacaagtcgataactactctccagggggaagatatagtgttcctggcaacggatatcaacctcccaggggcagtcgactgggtcatgatgcagtcgtgttttgggtttcacttcatgctggtgctcgaaaagcaggaaaagtacgatggccatcagcagttctttgctattgtgcaacttattggaaccagaaagcaagccgagaactttgcataccgactggagctgaatggacatcgcaggcgtttgacttgggaagcgaccccccggtcgatccatgaggggatcgccactgcaattatgaattccgattgtctcgtctttgacacttcgattgcacaattgtttgccgaaaacggcaaccttggaatcaacgtgactatttcgatgtgt

SEQ ID NO: 316326 - DNA, 846 bp, Artificial Sequence
  derived and/or modified sequence
atgtctcggcagacggcgactgcactccctacaggcacatccaagtgccccccttcacagagagtgcctgcccttactggaaccacggccagcaataacgaccttgcttcccttttcgaatgcccagtctgctttgactacgtgttgcctcctatcctgcagtgccaatcagggcatctggtgtgttctaattgtaggcctaaacttacatgctgcccaacgtgccgcggtccactgggttcaatccggaacctcgccatggaaaaggtggctaatagtgtgctgtttccatgcaagtatgcctctagcggatgtgagatcacactcccccacactgaaaaagccgatcacgaagaactctgtgaatttaggccttatagttgtccctgtcccggcgcatcctgtaagtggcagggcagtcttgacgctgtgatgccacacctgatgcaccagcacaagtccataacaaccctgcagggagaggacatcgtcttcctcgcgaccgacataaacttgcccggtgcagttgactgggtgatgatgcagtcatgtttcggtttccacttcatgctcgttcttgagaaacaggagaaatacgatggacatcagcagtttttcgccattgttcagctcatcggtactcggaagcaggccgagaactttgcgtaccgcttggagctcaacgggcaccgcagacggctcacttgggaagcgacccctagatccattcacgaaggcatcgcgacagctattatgaactctgactgcttggtgtttgacacatcaattgcccaactctttgcggaaaacggaaatctggggatcaacgttacgattagtatgtgt

SEQ ID NO: 316327 - DNA, 846 bp, Artificial Sequence
  derived and/or modified sequence
atgtcgcgacaaacggcgacggcgttaccgacgggtacgtcgaaatgtccgccgtcgcaacgagtaccggcgttaacgggtacgacggcgtcgaataatgatttagcgtcgctatttgaatgtccggtatgttttgattatgttttaccgccgatattacaatgtcaatcgggtcatctagtttgttcgaattgtcgtccgaaactaacgtgttgtccgacgtgtcgaggtccgttaggttcgatacgaaatctagcgatggaaaaagttgcgaattcggttctatttccgtgtaaatatgcgtcgtcgggttgtgaaataacgttaccgcatacggaaaaagcggatcatgaagaactatgtgaatttcgaccgtattcgtgtccgtgtccgggtgcgtcgtgtaaatggcaaggttcgctagatgcggtaatgccgcatctaatgcatcaacataaatcgataacgacgttacaaggtgaagatatagtttttttagcgacggatataaatctaccgggtgcggtagattgggtaatgatgcaatcgtgttttggttttcattttatgttagtattagaaaaacaagaaaaatatgatggtcatcaacaattttttgcgatagtacaattaataggtacgcgtaaacaagcggaaaattttgcgtatcgtctagaattaaatggtcatcgtcgtcgtttaacgtgggaagcgacgccgcgatcgatacatgaaggtatagcgacggcgataatgaattcggattgtttagtatttgatacgtcgatagcgcaactatttgcggaaaatggtaatttaggtataaatgtaacgatatcgatgtgt

SEQ ID NO: 316328 - DNA, 846 bp, Artificial Sequence
  derived and/or modified sequence
atgtcacgtcagacagcaactgccctccctacaggcaccagtaagtgcccaccctcccagagggtccctgccctgactggaacaaccgcaagcaataacgacttggctagtcttttcgaatgccccgtgtgtttcgactacgtgctccccccaatcctgcaatgtcagtctggtcacctggtctgtagcaactgtaggcctaagctcacctgctgtccaacatgtcgcggtcccttgggttcaatcaggaacctcgctatggagaaggtagccaacagcgtactgtttccatgtaagtacgctagctccggatgtgagatcacactgccccacacagaaaaggccgaccacgaggaactgtgtgaattcagaccttacagctgcccatgcccaggtgctagctgtaagtggcaaggcagtctggacgccgttatgccccatcttatgcatcagcacaaaagcatcacaactctccagggcgaagacatcgtgtttctggctaccgatatcaatttgcctggagctgtagactgggtaatgatgcagtcttgtttcggctttcacttcatgctggtactcgagaagcaggagaagtacgacggtcatcagcagtttttcgcaatcgttcagctgataggaaccaggaagcaggctgaaaatttcgcctatcgcctcgagctgaatggacatcgccgtaggttgacttgggaagcaactcccagatctatccacgagggaatcgccactgctatcatgaatagcgactgccttgtgttcgacaccagtatcgctcaattgtttgctgagaacggtaacttgggtatcaacgtgacaatttcaatgtgc

SEQ ID NO: 316329 - DNA, 846 bp, Artificial Sequence
  derived and/or modified sequence
atgtctcgacagacagcaaccgctctgccgaccggaacctccaagtgtccaccctcgcagcgggtccccgcccttacgggtacaaccgcttccaacaatgatctggcatcattgttcgaatgccctgtgtgttttgattacgtattgccccctattctccagtgtcagtccgggcatttggtttgcagcaactgccgccctaagcttacctgctgccctacctgccgaggccctctaggtagtatcagaaatcttgctatggaaaaagttgccaactcggtcctctttccatgcaagtatgccagctcgggttgtgaaattacattgcctcacacagaaaaagccgatcacgaggaattatgcgaattccgaccctactcctgcccctgtccaggcgctagttgtaaatggcaaggcagcctagatgccgttatgccccacttgatgcatcagcataagagtatcaccaccctacaaggtgaggacattgtttttcttgctaccgacattaatttacccggggccgtggattgggtcatgatgcagtcgtgttttgggttccatttcatgctcgttttggagaaacaagaaaaatacgacggccatcaacaattttttgccatcgttcagctgatcggaactcgcaagcaggcagagaacttcgcgtataggcttgagttaaacggccatcgtcgtcgtctgacctgggaagctacccctcgctcgatccatgaaggaatcgcaaccgctattatgaactcggactgtctggtttttgacacatcaattgcccaactgttcgctgagaatggcaatctgggaatcaacgttacaatctcgatgtgt

SEQ ID NO: 316330 - DNA, 846 bp, Artificial Sequence
  derived and/or modified sequence
atgtcgcggcaaacggctactgctcttcctactggaacgtccaagtgccctccatcgcaaagggtgcctgcactgaccggtactaccgcgtccaacaacgacctggccagcctgttcgaatgccctgtgtgtttcgattacgtgctcccaccgatccttcagtgtcagtcaggccatttggtgtgctccaattgtcgtcccaagttgacctgttgcccgacttgcagaggaccactgggatctatccgcaacctcgcgatggagaaggtggctaattcagtgctcttcccttgcaagtacgcatccagcgggtgtgaaatcactctgccacataccgagaaggcggaccatgaagagctgtgcgaattccgcccatattcgtgcccatgccccggtgcttcatgcaagtggcaaggctcgctggacgcagttatgcctcacctcatgcaccagcacaaatcgatcaccacgctccagggagaggacatcgtgtttctggcgaccgatatcaaccttcccggcgccgtcgactgggtgatgatgcagtcgtgctttggcttccacttcatgctcgtgctggaaaaacaagagaaatacgacggacaccaacagttcttcgctatagtccagctgattggaacccggaagcaggccgaaaactttgcctaccgcctggaactgaatggacaccgccgacgcctcacttgggaagccactccgcggtcaattcatgagggaattgccactgccatcatgaactcggattgcctggtctttgatacctctatagcccaactgttcgccgagaatgggaacctcggaatcaacgtcaccatctccatgtgc

SEQ ID NO: 316331 - DNA, 846 bp, Artificial Sequence
  derived and/or modified sequence
atgtcgcgccagaccgcaactgcgctccctactggtacgagcaagtgtcccccctcacaaagggtgcccgccctgactggtaccactgcatccaacaatgacctcgctagcctgtttgaatgcccagtgtgtttcgattacgtcctcccaccaatccttcagtgtcaatccgggcatctggtttgcagcaattgcagaccgaagctgacctgctgccccacctgtagaggtcctctgggtagcataagaaaccttgcaatggaaaaagtcgcaaatagcgtcttgtttccctgtaaatacgcatcatccggttgtgaaattactctgcctcacaccgaaaaggcggatcatgaggagctgtgcgaatttagaccatattcctgcccgtgcccaggggcatcatgtaagtggcaaggatccctggatgccgtgatgccccatcttatgcatcaacataagagcataacgactctgcagggcgaggacatcgtgttcctggctactgatatcaaccttcctggtgcagtcgactgggtgatgatgcaaagctgtttcggatttcactttatgctcgtcctggaaaaacaagagaaatacgacggccatcagcagtttttcgcaattgtacagctcatcggaacccgtaagcaagcagaaaacttcgcataccgcctggaacttaatggccatagaaggcgtctgacttgggaggctacccctcggtcgatacacgaagggattgcaaccgcaattatgaacagcgattgtctggtctttgatacctcgatagcgcaactcttcgcagagaacggaaacctgggtattaacgtcactatctcaatgtgt

SEQ ID NO: 316332 - DNA, 846 bp, Artificial Sequence
  derived and/or modified sequence
atgtcacggcagacagccacggctctgcccacgggcacctcaaaatgcccccccagccaacgcgtgcccgcgttgacagggaccacagctagcaacaacgacttagcgtccttatttgagtgccccgtttgctttgattacgtgctgccgcctatcctgcagtgtcaaagtggtcacctggtctgcagcaactgccgtccaaagttgacatgctgccctacatgtaggggaccactcggcagcatcagaaacctcgctatggaaaaagttgcgaactcggttctctttccctgtaagtacgcaagcagcggttgcgaaatcacactgccgcacacggaaaaggccgaccatgaagagttgtgtgaattccgaccttattcatgcccatgccctggggcatcatgtaagtggcaggggtccttggatgcggttatgcctcacctaatgcatcaacacaagtcaatcacaaccctccagggagaggacattgtattcctcgccacagacattaatctgcctggcgcagtggactgggtgatgatgcagtcctgctttggctttcacttcatgctggtgctagaaaaacaggaaaagtacgatggtcaccaacagtttttcgcgatcgtgcaacttataggcactcggaaacaggccgagaacttcgcctaccgccttgagctaaacgggcaccgtcgcagactgacctgggaggctacgccgaggtccattcacgaaggcattgccactgcaatcatgaattctgattgtcttgtctttgacacctccatcgcccagctcttcgcagagaacggcaaccttggcatcaatgtgactatatcaatgtgt

SEQ ID NO: 316333 - DNA, 846 bp, Artificial Sequence
  derived and/or modified sequence
atgtctcgtcagaccgctaccgccctccccacgggcacttcgaagtgtcccccctcccagagggtgccggccctgaccggcactactgcctctaacaatgatcttgcctctctgttcgagtgcccagtgtgcttcgactacgtgctgccccccatcctgcaatgccagtccggacaccttgtttgtagcaactgcagacctaaactcacttgctgtcccacctgccggggtcctctgggatctattaggaacttagcgatggagaaggtggctaattctgtattattcccttgcaagtacgctagctcaggatgtgagataactttgccacacaccgaaaaagccgaccatgaggagctgtgcgaattccgcccttacagctgcccctgtcccggggcaagctgtaaatggcagggaagcctggacgccgtgatgccacacttgatgcaccaacataagtctattactacgctgcagggagaagacatcgtgttcctggctactgatatcaaccttccaggcgcagtggattgggtgatgatgcagtcatgctttgggtttcattttatgcttgtcctggagaagcaggaaaagtatgacggccatcagcagtttttcgccatagtacagctcatcgggacccggaaacaggctgagaatttcgcttacagactggagctaaacggccatcgacgacgactgacctgggaagcaacccccagatcaatccatgaagggatcgcaacagcaattatgaattctgactgcctggtgttcgatacaagcatcgcgcagttatttgcagagaacggaaatctgggcatcaacgtgacgatcagtatgtgt

SEQ ID NO: 316334 - DNA, 846 bp, Artificial Sequence
  derived and/or modified sequence
atgagtaggcagactgcgacagccctgcccaccgggacttcaaaatgccctcctagtcaacgggtgcctgccttaacaggcactaccgctagcaataatgaccttgcatctctttttgaatgtcctgtttgcttcgattatgtgcttccccctattctgcaatgccagagtgggcatctggtgtgctctaactgtaggcccaaactcacctgttgtcctacgtgtagaggtccccttggttccatcagaaacctggccatggaaaaggtggcgaactcagtgctgttcccatgcaaatatgcgtccagcggctgcgaaattaccctcccgcacacagaaaaagcggatcacgaggagctctgtgagtttcgtccatactcttgcccttgtccaggtgcgtcgtgcaaatggcaaggttctctggatgccgtgatgcctcacttgatgcatcagcacaaaagcatcaccacactacagggtgaagacattgtcttcctcgcgaccgacataaacctgccgggggcagtggactgggtaatgatgcagtcatgcttcgggtttcactttatgctggtgctggagaagcaggaaaagtacgatggccatcaacagttcttcgccattgtccagctcattggcacccggaagcaagcggagaactttgcctatagactggagctgaatggtcatcggagacgcctgacatgggaagccacccctagatcaatccacgaaggtatagctaccgccatcatgaattcggattgtctggtgtttgatacgtctatcgcacagctcttcgccgagaacggaaatctggggatcaatgtgacaatctctatgtgt

SEQ ID NO: 316335 - DNA, 846 bp, Artificial Sequence
  derived and/or modified sequence
atgtcccgacagactgcaaccgcactgcctaccggaactagcaaatgtccaccatctcagagagtgcccgccctgacgggaacgaccgcaagcaacaatgaccttgcttcactttttgagtgcccagtttgtttcgattacgtgctgccacccattcttcagtgtcaatccggtcacctggtctgctctaattgcaggccgaaacttacttgttgtcccacctgtagaggaccgctcggttcgatcagaaacctggcaatggaaaaggtggcaaactcggtgctgttcccgtgcaagtacgcctccagcggatgtgagattactcttcctcatactgagaaggcagaccacgaagaactttgtgagtttcgtccctactcctgtccctgcccgggagcctcgtgcaaatggcaaggttcgttggatgcagtaatgccccatctcatgcatcagcacaagtccattactaccctgcagggcgaggatatcgtgtttttggcaactgacataaatctgcccggtgctgtcgattgggtgatgatgcaatcatgctttggattccactttatgctcgtgcttgaaaaacaagaaaagtatgatggtcatcaacagtttttcgcgatcgtgcaacttataggaaccagaaagcaagcagagaactttgcatacaggcttgaattgaatggacatcggcgtaggcttacctgggaagccactcctagaagcatacacgaaggtattgcaaccgcaattatgaactccgattgtctggtttttgacacctcgatcgctcagctttttgcagaaaacgggaacctcggaattaacgtcaccatctcgatgtgt

SEQ ID NO: 316336 - DNA, 846 bp, Artificial Sequence
  derived and/or modified sequence
atgtctcgccagaccgctactgcgctgccgaccggaactagcaagtgcccccctagccagcgcgttccagcacttacaggtactacagcttccaataatgacctggcgagcctgtttgaatgtcctgtttgcttcgattacgtgctcccacccatccttcagtgccagtctgggcatcttgtgtgctcaaactgtaggcctaaactgacttgttgtccaacatgtaggggaccactgggtagcattaggaacctggctatggagaaggttgcaaacagcgtgctgttcccgtgcaagtacgcttctagcggatgcgaaatcacgctgccacacacagagaaagctgaccacgaagaactgtgcgagttccgaccatacagctgcccctgcccaggcgcctcttgtaaatggcaggggtcactggatgccgtcatgccacaccttatgcaccagcacaaatccatcacaacgcttcagggggaggatatcgtgttcctcgcaactgatatcaatctgccgggcgcagttgattgggtgatgatgcaatcctgcttcggtttccatttcatgcttgtgctggaaaagcaggaaaaatacgatggccatcagcagtttttcgctatcgtccaactcatcggaaccaggaagcaggcagagaactttgcctatcgcctggaacttaacggccatagaaggagattaacatgggaggcaaccccgcgatcaattcatgaaggcatagcgaccgcaataatgaattcagactgcttagtctttgatacatctattgctcagctatttgctgaaaatggcaacctgggcataaacgttacaatctctatgtgc

SEQ ID NO: 316337 - DNA, 846 bp, Artificial Sequence
  derived and/or modified sequence
atgtcccgacaaactgcaaccgccctgccaaccgggacttcaaaatgtccaccgagccaacgagtgccagccctcacgggtaccaccgcctcgaacaatgatctggcgtcgctttttgaatgccctgtctgttttgactacgtcctgccacctattctgcaatgtcagtcgggacatctggtatgtagcaactgtagacccaagctcacttgttgccccacctgtcggggaccacttggatcgattagaaacctggcaatggaaaaagtggcgaattccgtgctgttcccctgtaaatacgcatcaagcggctgtgagattaccctgccccataccgaaaaggcagatcacgaggaattgtgcgagttcagaccttacagctgcccgtgtcctggagctagctgtaaatggcaggggtcgctggatgcagttatgccccatttgatgcatcagcataagagcataactaccctccagggtgaagatatcgtgtttttggcgaccgacattaacctgccaggggcagtggattgggtcatgatgcagtcatgcttcggatttcactttatgcttgtcctggagaagcaagaaaagtacgatggtcatcaacagttttttgcaattgtgcagctgattggtactaggaagcaagcagagaacttcgcttaccgcctcgagcttaatggccatcgtagacggctgacttgggaggccactccaagatcaattcatgaaggtattgccaccgccattatgaattcggactgtctggtgtttgatacctctattgcacaactgttcgcagaaaacggaaatcttggaataaacgtgactatttcaatgtgt

SEQ ID NO: 316338 - DNA, 846 bp, Artificial Sequence
  derived and/or modified sequence
atgagccgtcagacagctactgccctgccaactggtacatcgaagtgtcccccttctcaacgggtccccgctttaacagggaccactgcctccaataacgatttagcctctctgtttgagtgtccggtgtgcttcgattacgtgctaccacctatcctgcagtgtcaaagtggacacctagtgtgctctaattgccgccctaaacttacctgttgtcccacatgtaggggacctttagggtcgattcgcaatcttgccatggagaaagtcgctaatagtgtgttgtttccgtgcaagtatgcttcctcaggttgtgagattacgctccctcataccgagaaggctgatcacgaggagctctgtgagtttcggccctatagttgtccgtgccccggagcttcctgcaagtggcagggctctctcgacgcagtgatgccacacctgatgcaccagcataagtccatcacaacactgcagggagaggacatagtctttctggcgacagacattaacctaccaggtgcagtggattgggtgatgatgcagagctgcttcggcttccacttcatgctggtgctggagaaacaggagaaatatgatggacaccagcagtttttcgccatcgtacagttgattggtacaaggaaacaggctgaaaactttgcctatcgccttgaactgaacgggcataggcggcgactgacatgggaggcaacccctagaagcatacacgaaggcattgctacagctatcatgaactccgactgcctcgtgtttgacacatccatcgctcagctctttgcagaaaatggcaacctggggatcaacgtgaccatctcgatgtgt

SEQ ID NO: 316339 - DNA, 846 bp, Artificial Sequence
  derived and/or modified sequence
atgtcacgccagactgctactgcgctgccaaccgggacctcgaaatgcccgccgtcgcagcgggtcccagcacttacgggcactactgcttccaataatgaccttgcttccctgttcgagtgcccagtttgtttcgactatgtcctgccgcccatcctgcaatgccagtccgggcatctggtgtgctcgaactgccgccctaagttgacgtgctgcccgacttgccggggaccattgggatcaatccgcaatctcgcgatggaaaaggtggccaactccgtgctgtttccatgtaagtacgcgtcctcaggttgcgaaataaccctcccgcacaccgagaaagctgaccatgaagagttgtgcgaatttagaccttacagctgtccttgccctggagcctcttgcaagtggcaaggtagcctcgatgctgtgatgccgcatttgatgcatcagcacaagtccatcactacccttcaaggcgaggacatcgtgttcctggcaaccgatatcaatctcccaggcgccgtggattgggtcatgatgcagtcatgtttcggattccatttcatgctggtgcttgagaaacaggagaaatacgacggacaccaacagttcttcgccatcgtccaactgattggtactcggaagcaggccgaaaacttcgcctaccggctcgaactgaacggccaccggagacggctcacttgggaggcaaccccacgctccatccacgaagggatcgctactgcaatcatgaatagcgattgccttgtgttcgatacctccatcgctcagctgttcgccgaaaatggaaatcttggaatcaacgtcaccatctccatgtgt

SEQ ID NO: 316340 - DNA, 846 bp, Artificial Sequence
  derived and/or modified sequence
atgtccagacagactgctaccgccctacccaccggcacctcaaaatgtccacccagccagcgtgtgccagctttaacaggcaccactgcctctaacaatgacctcgcttctctgttcgagtgtcctgtatgcttcgattatgtgttaccgcccatcctccagtgccagtccgggcatctggtttgttccaattgcaggcccaaactcacctgttgccccacctgtaggggcccattgggatctattcggaatttagctatggagaaagtggccaatagcgtcttgtttccttgtaagtacgcaagcagtggatgcgaaataactctaccacacacagagaaggccgatcacgaggagttgtgcgaattccgtccttattcctgtccatgtcccggagcatcctgcaagtggcagggctccctggatgctgtgatgccacatctcatgcatcaacacaagtccatcaccaccctacagggggaggacatagtttttctagcaaccgatataaacttacctggcgccgtggactgggtgatgatgcagtcctgttttgggtttcatttcatgttggttctggagaaacaagagaagtacgatggccaccagcaattcttcgctatcgtccagctgataggcactagaaagcaggcagagaattttgcctatcgcttggaactgaacggccaccgtagacgactgacttgggaggcaacccctcggagcatccacgaggggattgccaccgccatcatgaacagcgattgcctggtgtttgacacctccattgctcaattattcgcagagaacggaaatctgggcattaatgtgacaatctccatgtgt

SEQ ID NO: 316341 - DNA, 846 bp, Artificial Sequence
  derived and/or modified sequence
atgtcaaggcagacagccaccgcgctgccgactggcacctctaagtgcccgccctcccaacgcgtaccggccctgaccgggacaaccgcctctaacaacgaccttgcctctcttttcgagtgccctgtttgttttgattacgtgctgccccctattctgcagtgccaatctggtcacctggtgtgtagtaattgtaggcctaaacttacctgttgtcctacctgtcgtggtcctcttggcagtattagaaacctcgctatggagaaagtggccaactccgttctattcccctgcaagtatgcttcttctggctgcgaaattaccctgccccataccgaaaaagccgatcacgaggaattatgtgagtttcggccttactcatgcccatgccccggtgcttcctgcaaatggcaaggatcactggacgcggtgatgccccacttaatgcaccaacataagagtattacaacactgcagggagaggacatagtctttctggccaccgacatcaatcttcccggggctgtcgactgggttatgatgcagtcatgtttcggctttcactttatgctggtgctcgagaaacaggagaaatacgatgggcaccagcaattcttcgctatagtccagctgattggaacgcgaaagcaggccgagaactttgcgtatagattggagctgaacggacaccggagaagactgacatgggaggccactcctagatcaatacatgaggggatagccacagcaatcatgaatagtgattgcttggtgtttgatacctctattgcccagctgtttgctgagaacggaaatctgggaataaacgtgacaatcagcatgtgc

SEQ ID NO: 316342 - DNA, 846 bp, Artificial Sequence
  derived and/or modified sequence
atgagcaggcaaaccgccacagcgctacctaccggcacatctaagtgccccccatcccagagagtgcccgcgctgacaggaactacagcttcaaataacgatcttgcctctttgttcgagtgtcccgtgtgcttcgattacgtgctgccacccatactgcaatgtcagtcggggcatctggtttgcagcaattgtaggccaaagctgacatgctgcccaacctgtaggggtccattgggttctattcggaatttggctatggagaaagttgccaactcagtcctgttcccttgtaagtatgcttcttccggatgcgaaataactctgccacacacagagaaagcagaccatgaggaactctgtgagttccgcccctattcttgtccctgccccggagcctcttgcaagtggcaggggtctttggatgcagttatgccccatttaatgcatcagcacaaatccattacgaccctccagggtgaggatattgtcttcctggccactgatatcaatctgccaggggcggtggactgggtgatgatgcagtcctgttttggcttccactttatgcttgtgttggagaaacaggagaagtatgatggacaccagcagttctttgcaatcgttcagcttattggtacccggaagcaggctgaaaacttcgcgtaccggctcgagctaaacggtcacaggagacgacttacatgggaggctacaccgaggagcattcacgagggcattgcaacagcgatcatgaatagcgattgtctggtcttcgacacctcaatcgcccagcttttcgctgaaaatggcaatctgggtatcaatgtgaccatatcaatgtgt

SEQ ID NO: 316343 - DNA, 846 bp, Artificial Sequence
  derived and/or modified sequence
atgagcaggcaaaccgctaccgctctgcctacaggcaccagcaagtgtccaccttcgcaacgcgtaccagccctgaccggtacaaccgcaagcaacaacgacctggccagtctcttcgagtgtccagtatgcttcgactacgtgctgcccccaatactccagtgtcaatcgggacacctggtctgcagcaactgccgccccaagttgacctgttgccctacctgcagaggaccactcggaagcattcgtaaccttgcaatggagaaagtcgctaacagcgtgctgttcccttgcaagtacgcctcgagtggatgtgagataactctccctcatacagaaaaagcagatcacgaggagttatgcgagtttaggccctacagctgcccgtgtccaggtgctagctgtaaatggcaaggatctctggatgcagtcatgccacaccttatgcaccaacacaagagcatcaccacacttcagggcgaagatatcgtcttccttgctactgatatcaaccttcctggcgctgtggactgggtgatgatgcaatcctgcttcggattccactttatgctcgtcctggaaaagcaggagaagtacgatggacaccagcagttcttcgctattgtccagctgatcggaacccggaaacaggcagaaaactttgcttataggcttgagttgaatgggcacaggcggcgcttgacgtgggaggctacacctcgcagcattcatgagggtattgcaacagcaattatgaattctgattgcctcgtgttcgacacaagcatcgcacagctttttgctgaaaatggcaaccttggaattaacgtgacaatatcaatgtgc

SEQ ID NO: 316344 - DNA, 846 bp, Artificial Sequence
  derived and/or modified sequence
atgtcgagacagacggccactgcgttgcctaccggcacttctaagtgccctccatcccaacgcgtgccagcactgacgggaaccaccgcctctaacaatgatctcgcgagccttttcgaatgtcctgtgtgcttcgactacgtcctgccgccaatcctgcaatgccagagcggacatctcgtgtgctcaaactgccggccgaaactgacttgctgtccgacttgcagaggacctctcggttccatccggaacctggccatggagaaagtcgctaactcagtactcttcccctgtaagtacgcctcgtcgggctgtgaaattactttgccgcatacggaaaaggctgaccatgaggagttgtgcgaatttagaccatactcctgcccgtgcccgggggcgagctgcaagtggcaaggatcgcttgacgcggtaatgccacacttgatgcaccaacacaaatccataaccacccttcagggagaggatattgttttcctcgcaaccgacatcaacctgccgggtgctgtggactgggtgatgatgcagtcatgcttcggttttcacttcatgctcgtcctcgagaaacaggaaaagtacgatggacatcagcagttcttcgccattgtccaactgatcggaactcggaagcaggccgagaacttcgcttatcgtttggaactcaatgggcaccgcagacggctgacctgggaggctactccccgcagtatccacgaagggatcgctaccgcaatcatgaattcggactgcctggtgtttgatacctcgatcgcgcaactcttcgccgaaaatggtaatcttggcatcaacgtgaccatctcaatgtgc

SEQ ID NO: 316345 - DNA, 846 bp, Artificial Sequence
  derived and/or modified sequence
atgtctcgccagacagccaccgcattgcctacaggcacatcaaagtgcccaccgtctcagagggtgccagccttgactggtacaaccgcaagtaacaacgacctcgcctctttgttcgagtgtcccgtttgttttgactacgtcctacctccaattctgcagtgccagagtggacacttggtgtgtagtaactgtcggcccaagttaacgtgctgccccacctgcaggggacctcttggaagcattcgcaatcttgcaatggaaaaagtggcaaatagtgtcctgtttccatgcaagtacgcctcctccggatgtgagataacattaccccataccgagaaagcagatcacgaggaactttgtgagtttcggccctattcctgcccgtgtcccggagcttcgtgcaagtggcaggggtcattagatgcggtgatgccacatctcatgcaccagcataagtcaatcactactttgcagggggaggacatcgtgtttctcgccaccgatatcaacctcccaggggccgtggattgggtcatgatgcagtcctgctttggatttcacttcatgctagtgctcgagaaacaggagaaatatgatggacaccagcaattttttgctattgtccagctcatcggcacccgaaaacaggcggagaattttgcgtaccggcttgagctgaacggtcataggagacgcctgacctgggaagccactccacggtccatccacgagggcatcgctacagctatcatgaattccgattgcctcgtgtttgatacatcaattgctcaactgtttgctgaaaacggtaacctggggatcaatgtcacgatctcgatgtgt

SEQ ID NO: 316346 - DNA, 846 bp, Artificial Sequence
  derived and/or modified sequence
atgtctcgacagacggcaactgccctgcctaccggcaccagcaagtgtcccccgtcacagcgcgtcccagcacttaccggaactacagcctccaacaacgatttggcatctctgttcgaatgcccggtgtgcttcgactatgtgttacctcctatactgcaatgtcagagcggccaccttgtgtgctcaaattgtcgccctaagttaacgtgctgccctacttgccgaggccctcttggatctatcaggaaccttgcaatggaaaaggttgcgaattctgtgctgttcccctgtaagtacgcatcctctggctgcgagatcacgctacctcacaccgaaaaggccgaccacgaggagctctgcgagtttcgcccctattcctgcccatgcccaggcgcctcctgcaagtggcagggaagcctggatgccgtcatgcctcacctgatgcaccaacataaaagcatcaccacccttcagggcgaggacatagttttcctcgccacggatataaacctccctggcgccgttgactgggtgatgatgcagagctgtttcgggttccactttatgctcgtgctggagaaacaggagaagtacgacggacatcagcagttcttcgccatcgtccaactaatcgggaccagaaagcaggcggagaatttcgcataccggttggagcttaatggccatcgccgccgcctgacgtgggaagcaacaccccgatcaattcacgaggggatagcaacagcaattatgaacagtgattgcctggtcttcgatacatcaatagctcagttgttcgccgagaacggcaatttaggaatcaatgtcacaatctccatgtgc

SEQ ID NO: 316347 - DNA, 846 bp, Artificial Sequence
  derived and/or modified sequence
atgtccaggcagacggccaccgcactgcccacaggtacatccaaatgtccccccagtcagcgcgtacccgccctaacaggaaccacagcctcgaataacgacctggcctcattatttgagtgcccagtctgttttgattacgttctgccccccattctccagtgtcaatctggccaccttgtgtgttctaattgcagaccaaaattaacttgttgtcctacctgtagggggccactgggatcaatccggaatctggcgatggaaaaagtcgcgaacagtgttttgtttccctgtaagtacgctagctcaggctgtgagatcacactgccacacaccgagaaggcagaccatgaagagttgtgtgagttccgaccttactcctgtccgtgccctggagctagttgtaagtggcaagggtccctggatgcagttatgccccacctgatgcaccaacacaaaagcataaccaccctccagggagaggacatagtattcctggctacagatatcaaccttcctggcgccgtcgattgggttatgatgcagtcatgcttcggtttccacttcatgctggtgttggaaaagcaggagaagtatgacggccatcaacagttttttgctatagttcaattaatcggcacacgcaaacaggccgagaactttgcctatcgcctggagctgaacggccacagaagacgcctaacctgggaggccaccccccgctctatccacgaagggatagctaccgccataatgaattcagattgtttggtcttcgacacctccatcgcacagttattcgcagagaacggcaatctcggaattaatgtgaccatcagtatgtgc

SEQ ID NO: 316348 - DNA, 846 bp, Artificial Sequence
  derived and/or modified sequence
atgagtagacagactgcaacagccctgcccactgggacgtccaagtgccccccttcacagagagtgccagctctgactggcacgaccgcctcaaacaacgaccttgcttccttatttgagtgtcctgtgtgcttcgactatgtgctaccacccattctgcagtgtcagagcggccatttggtttgctccaactgccggcccaaattgacttgttgtccgacttgccgaggcccactaggatctatacgcaatctagccatggagaaagtggctaattcggtgctgttcccatgcaaatacgcttccagcgggtgtgaaataactttaccacatacggagaaggctgaccatgaggagctgtgtgaattcaggccctattcctgcccctgccctggagccagctgtaaatggcagggttcactggacgccgtgatgccacatctcatgcatcagcataaatctattaccactctacagggagaagacattgtgttcctcgctaccgacattaatcttcccggcgctgtcgactgggtgatgatgcagtcttgcttcggctttcactttatgctcgtcctggagaagcaggagaagtacgacggacaccagcagttttttgcaatcgtgcaattgattggcacacgaaagcaagccgagaactttgcataccggctggagttaaacggccacagacggcgccttacatgggaggctacacctcgttccatccatgagggtatcgccacggccattatgaattcggattgcctcgtttttgacaccagtatagcccaattgttcgcagagaacggaaaccttggtataaacgtgacgatttccatgtgt

SEQ ID NO: 316349 - DNA, 846 bp, Artificial Sequence
  derived and/or modified sequence
atgtctcgacaaacagctactgcacttccaactgggaccagtaagtgcccgccttctcagagagtccctgccttgactggaaccactgcgagcaataatgacctcgcatctttgttcgagtgtcccgtctgttttgattacgtcctcccaccaattctgcagtgtcaatcagggcatttggtttgctctaattgcaggccaaaacttacttgctgtccaacatgccggggacctcttggttcaataagaaatctcgcaatggagaaagttgccaattccgttctattcccatgcaagtacgcttcctccggatgtgagataacccttccgcacaccgagaaagccgaccatgaagagttgtgtgagttccggccatattcttgtccctgcccaggagcatcctgcaaatggcagggaagcctcgacgcagtgatgcctcatctcatgcaccaacataagtcaattaccactctccaaggagaagacattgtattccttgcaactgatattaatctaccaggtgcagtcgattgggtaatgatgcaatcatgctttggattccactttatgctggttttggaaaaacaagaaaagtatgatggacatcaacaattctttgcaatagtacaacttattggaacaagaaaacaggcagagaactttgcatatcgactggaattgaatggacatcggcgacgattgacatgggaagctacgccacgctctatccatgaaggaattgccactgcaatcatgaactctgattgtttggtttttgacacatctattgcccagttgtttgctgaaaacggaaacctcggaattaacgtgacaatctccatgtgc

SEQ ID NO: 316350 - DNA, 846 bp, Artificial Sequence
  derived and/or modified sequence
atgtcaaggcaaactgccactgctctgccaacggggacttccaaatgtcctcctagccagcgcgtgccagccctgactggaaccacggcatcaaacaacgacctggcgagcctttttgaatgtcctgtgtgttttgactatgtgctgccacctattctccaatgtcagtcaggtcatcttgtctgctcaaattgtagaccgaaacttacttgttgtccaacctgccgcggcccactggggagcatccgtaacctggcaatggaaaaggtggcaaactcggtgctgtttccctgtaagtacgccagctcgggttgcgaaatcactcttccgcacacggaaaaggcggatcacgaagagctctgtgagttccggccgtactcctgcccttgcccaggtgcctcgtgtaaatggcaaggttccctggatgcagttatgccgcaccttatgcatcagcataaatcgatcactaccctgcaaggagaagatatagtgttccttgcaactgatatcaatctccctggggccgtggactgggtcatgatgcaatcgtgcttcggcttccatttcatgctggtcctggagaaacaagagaaatacgacggtcaccaacagttctttgcaattgtccagctcataggaactcgaaagcaagcagagaatttcgcataccgtcttgaactgaatggccatcgcaggcgacttacttgggaggcaaccccacgaagcattcacgaaggtattgccactgctatcatgaactcggattgcctggtctttgatacctcgatagcccagctttttgcggagaacggtaaccttggtatcaacgtgaccatctctatgtgt

SEQ ID NO: 316351 - DNA, 846 bp, Artificial Sequence
  derived and/or modified sequence
atgtcccggcagacagcgaccgcccttcctactggcacatcgaaatgcccccctagtcagcgggtgcctgcccttaccggaacaacagcctccaacaatgaccttgccagcctctttgaatgccccgtttgcttcgactatgtgctgcccccaatcctgcagtgtcaaagcgggcacctggtgtgctcaaattgccgaccaaagctcacctgttgtcctacctgcagggggcccttgggaagcattcgaaaccttgctatggagaaggtggcaaacagcgtgctgtttccatgcaagtacgccagctctggctgtgagatcactttaccgcacacagagaaggccgatcatgaggagctctgcgagtttagaccttattcatgtccctgccctggggccagttgcaagtggcagggcagcttagacgccgtcatgcctcatctgatgcatcaacacaagtcaataaccactctgcagggcgaggatattgtgttcttagctacggacatcaatctcccgggcgcggtggattgggttatgatgcagtcctgttttggcttccatttcatgctcgtgcttgagaaacaggaaaagtacgatggacaccaacagtttttcgccattgtgcagctcatcggcactcggaaacaagccgaaaatttcgcctacaggctggagctgaacggccacaggcgcagactgacttgggaggcaactccacgttctatccacgagggtatagctaccgctatcatgaactctgactgcctcgtttttgatacctccattgcacagttgttcgcagagaatggcaatctgggtattaacgttaccatttcgatgtgt

SEQ ID NO: 316352 - DNA, 846 bp, Artificial Sequence
  derived and/or modified sequence
atgtcacggcaaactgccacagcccttcctaccggcacatccaagtgtcctcccagccagcgtgtgcctgccctaacagggacaacagccagcaacaacgacttggcatccctgttcgagtgtccagtctgtttcgactatgttctccctccaatcctgcagtgccagtccggccacttggtgtgctctaattgtcggcccaaactgacttgttgtcctacatgcaggggaccactcggcagcatccgaaatctagccatggaaaaagtggccaactctgtgctctttccttgtaaatacgcaagctcaggttgtgagattacactccctcacactgaaaaagcggatcacgaagagctgtgcgagttcagaccctattcttgcccgtgcccaggcgcgtcttgtaaatggcagggctcactcgacgccgttatgccccacctgatgcaccagcacaaaagtatcaccactctacaaggggaggatattgtttttttggccacagatatcaacctccctggcgccgtcgactgggtgatgatgcagtcctgtttcggattccacttcatgttggtattagaaaagcaagagaagtacgatgggcaccaacagtttttcgctattgttcagctcataggcacccgaaaacaggcggagaactttgcatatcggcttgagcttaacgggcaccgcaggcggctgacctgggaggcaactccccggagcatccacgagggcatagcaacagccataatgaattctgactgtctggttttcgatacttccattgcccagctgtttgcagaaaatgggaacctagggatcaatgtgacaatctcaatgtgc

SEQ ID NO: 316353 - DNA, 846 bp, Artificial Sequence
  derived and/or modified sequence
atgtcgagacagaccgctactgcactgccaactggaacctccaagtgtccaccatcccaacgcgtcccagcattgactggtaccacggcatcgaacaacgatctggcatcgctgttcgaatgtcctgtgtgtttcgattatgtgcttcctcctatcctgcagtgtcagtccggtcatctcgtttgtagcaactgcagacctaagctgacctgttgcccaacttgtagaggtcctcttggttcgattcggaacctggcaatggaaaaagtcgccaattcggtgctgtttccatgcaaatatgccagctcaggatgtgaaattaccctgccacataccgaaaaagcagatcatgaagagctgtgcgagtttagaccttactcctgcccatgccccggtgcctcctgtaagtggcaaggctcactggatgcggtcatgccccatctcatgcatcaacacaagtcgattactacgcttcaaggcgaagatatcgtgtttctggcgacggacattaacctgcctggagcagtcgattgggtgatgatgcagtcctgttttggcttccatttcatgcttgtcctcgagaaacaggaaaagtacgatggacaccagcagttttttgcgattgtgcagctgatcggcacccgcaaacaagcagagaactttgcctacaggcttgagcttaacggtcatcgacggagacttacttgggaagcaactcctcggtcgattcacgagggaattgccaccgccattatgaactcggactgcctggtctttgatacctcgattgcgcaactgtttgccgaaaatggaaaccttgggataaatgtcaccatctcgatgtgt

SEQ ID NO: 316354 - DNA, 846 bp, Artificial Sequence
  derived and/or modified sequence
atgtctcgccaaactgcgacggccctgcctactggcacctcaaaatgtcctccttcgcaacgcgtgcctgcccttactggcactaccgcttcaaacaacgatctggcatccctcttcgagtgtcctgtgtgcttcgactacgtgctgccccctatacttcaatgtcagtcgggacaccttgtgtgttccaactgcaggcctaaactgacctgttgtcctacctgtagaggtcctttgggttccattcgtaacctggcaatggagaaggtggcaaattccgtgctgtttccctgcaaatacgcaagctcgggttgtgaaatcaccctgcctcataccgaaaaagcagaccatgaggagctgtgcgagtttagaccatattcgtgtccttgtccgggtgcgagctgtaagtggcaaggaagcctggatgcagtcatgcctcaccttatgcaccagcacaaaagcatcactactcttcagggagaggatatagtgttcctggcaactgatatcaacctccctggtgcagtggattgggtcatgatgcagtcgtgctttggatttcacttcatgcttgttctggagaagcaggaaaagtacgacggacatcagcagttttttgccattgtccaactgattggaactcggaagcaagcagaaaactttgcataccgcctcgaactcaacggccatagacgacgcctgacctgggaagcgactccaagaagcattcatgaaggaattgcgactgcaataatgaattcggattgtctggtctttgacacctcaatcgctcagctgttcgcagaaaacggaaaccttggtatcaatgtcacgattagcatgtgt

SEQ ID NO: 316355 - DNA, 846 bp, Artificial Sequence
  derived and/or modified sequence
atgtcgcgccaaaccgctaccgccctgccaactggtacctctaagtgccccccctcccagcgagtgcccgctctgaccggcaccaccgccagcaacaatgatttagcgagtttgtttgagtgccccgtgtgtttcgactacgtgctgcccccaatcctgcagtgccagagtggacacctcgtgtgtagtaattgtcggcctaaacttacgtgttgccccacttgtagagggcctctgggttcaattagaaacctggcaatggaaaaggtggcaaattctgtgcttttcccttgtaagtacgcttcaagtggatgtgaaattacgttgcctcacaccgagaaggccgatcacgaagagctttgcgaatttcggccctattcctgcccctgtcctggagcaagctgtaagtggcagggatccctagacgctgtcatgccccatctgatgcaccagcacaaaagcattactactctccagggcgaggacatcgtattcttagctaccgatatcaatctgccgggcgctgttgactgggtaatgatgcagtcctgctttgggttccattttatgcttgtcctggaaaagcaggagaaatacgacgggcaccagcagtttttcgccatcgttcagctgatcggtacaaggaaacaggccgagaacttcgcttacaggctggagttgaacggacatagacggcggctgacgtgggaggctacccctaggtccatccacgagggcatagccacagccatcatgaacagcgactgtcttgtgtttgatacgtcaattgcccagctgttcgcagagaacggcaatctgggcattaacgttacaataagtatgtgc

SEQ ID NO: 316356 - DNA, 846 bp, Artificial Sequence
  derived and/or modified sequence
atgtccaggcaaaccgcgacggccttgccaacggggacttcgaaatgcccgcctagccaaagagtgccggccctcactggaaccaccgcctctaataacgacctcgcctccctgttcgagtgccctgtgtgcttcgattacgtgttgccgcctattctgcagtgccagtctggacacctcgtctgctccaattgccgcccaaagctcacctgttgtcccacctgcagaggcccgctgggctcgatccggaacctggccatggagaaggtggctaacagtgtgctttttccgtgtaagtacgccagctcgggatgcgaaatcaccctgccgcacactgaaaaagcagatcacgaagagttgtgtgaattccgcccttactcgtgcccatgcccgggagcctcctgcaagtggcaaggatcgctggatgcagtcatgccacatcttatgcaccaacataagagcatcactaccctgcagggcgaggacatcgtgtttctggcaaccgatatcaatctcccgggcgccgtggactgggtaatgatgcagagctgcttcggtttccatttcatgctggtgttggagaaacaggaaaagtacgatgggcaccaacaattcttcgctattgtccagctcatcggaactcgcaaacaggcggaaaacttcgcctaccggctcgagctcaatgggcacagacggcggttgacttgggaagccactccacggtccattcacgagggaatcgcgactgcgatcatgaacagtgattgtctggtgtttgatacgagcatcgcccagttgtttgccgagaacgggaacctcggaatcaatgtgacgatctcgatgtgc

SEQ ID NO: 316357 - DNA, 846 bp, Artificial Sequence
  derived and/or modified sequence
atgtccaggcaaaccgcaactgccctgcctacaggtacatctaagtgtcctccatcccaaagagttccagctcttacaggtacgactgcatccaacaacgatttggccagcctgttcgaatgccccgtctgcttcgattacgttctgcctccgatcctgcagtgccaatccggtcacctggtctgtagtaattgtagacccaaactcacttgctgccctacatgtaggggacctttgggctccattcgcaatcttgcgatggagaaggtagctaactctgttttgtttccctgtaagtatgcctcatcaggatgcgagatcacccttccacacactgaaaaggctgatcacgaagagctttgtgaatttaggccatacagctgcccctgtcctggtgcgagttgcaaatggcaaggttcattggatgctgtcatgcctcacctcatgcaccagcacaaaagtatcacgaccctccagggcgaggacattgtcttcctggctactgatataaatctccctggagctgtggactgggtgatgatgcagtcttgtttcggattccacttcatgttggtgctcgaaaagcaggaaaaatatgatggacatcagcagttttttgctatagtgcagctgatcggaaccaggaagcaagctgagaacttcgcctaccgcctcgagctgaacggccacagacgcagactgacctgggaagccactcctcgctccatccacgagggaatcgccactgccatcatgaactccgattgcctcgtttttgatacatctatcgcacagctcttcgctgagaacggaaacctgggaatcaacgtcacgatcagcatgtgc

SEQ ID NO: 316358 - DNA, 846 bp, Artificial Sequence
  derived and/or modified sequence
atgagtaggcagactgccactgcgctgcccacaggaacatctaaatgtccccccagtcagcgggtgccggctttaacagggacgacagcctctaataacgatctggcttccctgtttgaatgccccgtgtgcttcgactatgttcttcccccaattcttcagtgtcagtccggacacctcgtgtgtagtaactgtcggcccaaactaacatgttgccctacttgtaggggacccctcggatccattcggaaccttgctatggaaaaggttgctaattctgtgctgttcccttgcaagtacgcctcgtccgggtgtgaaatcactctacctcatacagaaaaagctgatcatgaggaactatgcgagtttcggccttacagttgtccttgccccggagcatcatgtaaatggcaggggtccctcgatgctgtgatgcctcacctcatgcatcaacataaatcgataacaacactccagggggaagatatagtattcttagccacagatattaatctacccggggctgttgactgggtcatgatgcagtcatgttttggattccactttatgcttgttctagagaaacaggaaaaatacgatgggcaccagcagtttttcgccatcgtccagctaatcgggactaggaaacaggcggaaaatttcgcctatcggctcgaactgaacggacacaggcgcaggctcacatgggaagccacaccaagatcgatccacgaaggaattgcaacagctatcatgaattctgattgtttagtatttgatacatctatcgcacagctgtttgccgagaatggaaacctgggaatcaacgtgactataagtatgtgt

SEQ ID NO: 316359 - DNA, 846 bp, Artificial Sequence
  derived and/or modified sequence
atgagcaggcaaactgctacggcgctccccaccggcaccagcaagtgtccaccatctcagcgtgtaccggcgctgacggggacaactgcctctaataacgacctggcaagcctgtttgaatgccctgtgtgtttcgattacgttctgcctcctatcctgcagtgtcagagtgggcacctggtctgcagcaattgtcgccctaagttgacctgttgtcctacgtgtcggggcccgctgggttccatccgcaatttggccatggagaaggtggccaactccgtgttgtttccgtgcaagtatgcgtcgagtggttgcgaaatcaccctgcctcacaccgagaaggccgaccacgaagaactgtgcgagttccgcccatatagctgcccatgtcctggcgcaagctgtaagtggcaaggttcattggatgcggtaatgccacacttgatgcaccaacataagagtataactaccctgcaaggcgaagatatcgtgtttctcgcaacggacatcaatttgccaggcgccgttgattgggtgatgatgcagagctgtttcggctttcattttatgctggtgctggaaaaacaagagaaatatgatggccaccaacaattttttgctatcgtgcagctgatcggcacccggaagcaagctgaaaacttcgcctaccgcctggaacttaatggacataggcgtaggttgacttgggaagcgactcctcgttccatccacgaaggtattgcaaccgcaatcatgaatagcgattgtctcgtgtttgacacaagcattgcgcagctctttgcggagaatgggaacctgggcataaacgtcaccatctctatgtgc

SEQ ID NO: 316360 - DNA, 846 bp, Artificial Sequence
  derived and/or modified sequence
atgtctcgccaaacggcgaccgcgctcccaaccggtacctcgaagtgcccccctagtcagcgggtccctgcactgacgggcaccaccgcctccaataacgacctggccagtctctttgaatgcccggtgtgcttcgattacgtgttgccccctattctccagtgccaaagcggacacctggtgtgttcgaattgccgcccgaagttgacctgttgccctacttgtcgggggccactgggctccatccgtaacctggcgatggaaaaggtcgccaatagcgtcctcttcccctgcaagtacgcatcgtcaggatgtgagatcactcttccgcacactgaaaaggcggaccacgaggagctctgtgagttcaggccttactcgtgtccgtgccccggagcgtcgtgcaaatggcagggcagcctggacgccgtgatgcctcacttgatgcatcagcataagtccatcaccacgttgcaaggagaagatatagtgttcctggccactgatatcaacctgccgggagctgtggattgggtgatgatgcaaagctgcttcggtttccactttatgctcgtgctggagaagcaggaaaagtatgacggccatcagcagttcttcgcaatcgtgcagctgatcggaaccaggaaacaagcagagaacttcgcctaccgcctcgaactcaatggccatagacggcggctcacttgggaggctacgccaagatccattcatgagggaattgctaccgccatcatgaactcagactgcctggtctttgacacttcgatcgcacagctgttcgccgaaaatggaaacctcggtatcaacgtaactatctccatgtgc

SEQ ID NO: 316361 - DNA, 846 bp, Artificial Sequence
  derived and/or modified sequence
atgtcccgacagaccgccacagccctccctacaggtacgtctaaatgtcccccgtcccagagagttccggccctcaccgggacaaccgcatcgaataacgatctcgctagtctattcgaatgtcccgtgtgtttcgattacgttcttccaccaattcttcagtgccaatctgggcatttggtctgctcaaattgcaggcccaaacttacttgctgccctacatgccgagggcctctgggctctatccgtaacctggccatggagaaggttgccaactctgtgttgttcccctgtaaatatgccagttccggttgcgagataacccttcctcacactgagaaggctgaccatgaagaattatgcgagttccgcccttattcctgcccttgtccgggggcatcttgcaagtggcagggctctctcgacgctgttatgccccacctgatgcaccagcataagtccatcaccaccctgcaaggtgaagacattgtcttcctggccactgacatcaacctccccggggctgttgattgggtgatgatgcaatcctgcttcggcttccacttcatgctggtgctggagaaacaggagaagtacgacggccaccagcagttctttgcaatcgtgcaactgatcggcacacggaagcaggctgagaattttgcttaccggctggaattgaatgggcataggcgaaggctaacctgggaggccacacctagatcaatccacgagggtattgccactgcgattatgaactccgactgtctggtgtttgacacctcaattgcacagctgtttgccgagaatggtaacctggggatcaacgtgactatttccatgtgc

SEQ ID NO: 316362 - DNA, 846 bp, Artificial Sequence
  derived and/or modified sequence
atgtctcgacaaaccgccaccgccctccccaccgggacctccaagtgccctcccagccagagagtgcctgctttgactggaacaactgcgtccaataatgacctggcatccctttttgagtgccctgtctgcttcgattacgtgctgccacccatcttacaatgccaaagtggacacctggtttgcagcaattgtcggccgaaattgacatgttgtccaacttgtcgaggacccctcggttcaattcgcaatttagctatggagaaggttgctaacagtgtcttgttcccgtgcaagtatgccagttctggctgcgaaattaccctacctcacactgaaaaggctgatcacgaggagctgtgcgaatttcgaccctacagttgtccctgcccaggggccagctgtaagtggcagggatctttggacgcggtgatgccgcatctgatgcaccagcataagtccatcactaccctacaaggagaggacatcgtgttccttgccactgatatcaacctgcctggcgccgttgattgggtgatgatgcagagttgcttcggatttcattttatgttagtactggagaaacaggagaagtatgacgggcaccagcaattcttcgccatcgtacagctgatcggcacacgtaaacaggcagaaaacttcgcttaccgattggagctgaatggccaccgacgacgattgacttgggaagccaccccaaggtcaatacacgagggtatcgctacggctatcatgaactcagattgtctagtgtttgacacttcaattgcgcagctgtttgccgagaatgggaatcttgggattaatgtgaccatttcaatgtgt

SEQ ID NO: 316363 - DNA, 846 bp, Artificial Sequence
  derived and/or modified sequence
atgagcaggcagactgcgactgcccttccgactgggacctcgaagtgtccgccgtcgcaacgagtgccggcgctgactggaaccactgcgtcgaacaacgacctggcgtctcttttcgaatgtcccgtctgttttgattacgtcctgcctcccatcctccagtgccaatcaggacacttggtgtgtagcaactgcagacctaagctcacgtgctgccctacctgccgcggaccgctcggttcaattcgaaatctcgccatggagaaagttgctaatagcgttctgttcccgtgtaagtacgcaagctccggatgcgaaattactttgccacacaccgagaaagcggatcatgaggaactgtgcgaattccgcccgtactcttgcccatgtcccggcgcctcctgcaagtggcaaggatcgctcgacgcggtcatgccacaccttatgcaccaacacaagtcgatcactactttgcagggtgaagatattgttttccttgcaaccgacatcaatctcccgggagctgtggattgggtgatgatgcaatcctgctttggattccacttcatgttggtgctggagaagcaggaaaagtatgacggtcaccagcaattctttgccatcgtgcagctgataggtacccgtaagcaggctgagaactttgcctaccgccttgagctcaatggacacagacggagactgacttgggaggctacgccgcggtccatccatgaaggaatcgccaccgctatcatgaacagcgactgtctcgtctttgacacctcgatcgcgcagctgttcgccgaaaatgggaacctgggcatcaacgtgaccatctccatgtgt

SEQ ID NO: 316364 - DNA, 846 bp, Artificial Sequence
  derived and/or modified sequence
atgtccagacagactgccacagctttacccaccggcactagtaaatgccccccatcccagcgagtccccgcactgaccggaacgaccgcttcaaataatgacctggctagcctgtttgagtgcccagtgtgcttcgattacgtgctgccccctatactccagtgtcaaagcggccatctggtctgcagtaattgcagaccgaaactgacatgctgccctacttgccgagggccactggggtctattaggaatctggctatggaaaaggttgccaacagcgtgctcttcccttgtaagtacgcctcctcaggctgtgagatcacactgcctcacaccgaaaaagcagatcatgaggagctgtgcgaattcagaccgtactcttgtccttgcccaggcgcctcttgcaaatggcagggcagcctggatgcggtgatgccccatctaatgcatcagcataagagcattactaccctgcagggagaggacatcgtgttcttagccactgacattaacctgcccggcgccgtggattgggtgatgatgcagagttgttttggcttccacttcatgctcgtccttgaaaagcaggagaaatacgacggacatcagcagttcttcgctatcgtgcagctcattggtacacggaagcaggccgaaaattttgcctaccgcttagagctgaacggccacagacgcaggttgacttgggaggccacaccccggagcattcacgagggtattgccaccgcaatcatgaactctgactgtctggtgtttgatactagtattgcacagctttttgccgagaatggcaacctcggtattaacgtgaccatctcaatgtgt

SEQ ID NO: 316365 - DNA, 846 bp, Artificial Sequence
  derived and/or modified sequence
atgtcccggcagaccgctacggcactgcctaccgggacgagcaagtgcccaccatcccaaagggtgcccgcactgaccggaacaacagcatctaacaacgacctggcctctctgttcgagtgtccggtctgcttcgattatgtgctgccacctattttgcaatgccagtcaggacacctcgtttgctccaattgcagacctaagctcacatgttgtcccacttgccggggtcccctcggatctatcaggaacctcgccatggagaaagtcgcgaattcagtactgtttccatgtaagtacgcttcttctggctgtgagatcaccctccctcatacggagaaggccgatcatgaggaactgtgcgagttccggccatacagttgcccctgtccaggcgcttcctgcaagtggcaagggagtctcgatgctgtgatgccccacttgatgcaccagcacaaaagtattacaacgctgcaaggcgaggatatcgtgtttcttgccacagatatcaatctcccaggagccgtagattgggtaatgatgcagagctgcttcggcttccattttatgctcgtcctggagaaacaggagaagtatgacggtcatcagcagtttttcgcaatcgttcagctgatcgggactcgaaaacaggcggagaacttcgcttatcggctggaattgaatggccataggcgccgactgacctgggaagccactcccaggtcaatccatgagggcatagccacagctattatgaattcagactgcctggtgttcgataccagcattgcacagctgtttgccgaaaatggcaatctgggcatcaatgttacaattagcatgtgt

SEQ ID NO: 316366 - DNA, 846 bp, Artificial Sequence
  derived and/or modified sequence
atgtcaaggcagactgccacagcccttcccacagggacatcaaaatgccctccgtcacagagggttcccgctctgacagggacaactgcatctaataacgatctggcctccttgttcgaatgtccagtgtgctttgattatgtgctccctccaatccttcagtgccagtctgggcacctggtgtgctccaattgcagacccaagctgacatgttgtccaacatgtaggggacccctagggtccattagaaatctcgctatggaaaaagtggccaattctgtactcttcccatgcaaatacgcgtcaagtgggtgtgagattacactaccacacactgaaaaagcagaccatgaagaactatgcgaatttaggccttattcatgtccctgtcctggggcttcctgtaaatggcagggatcccttgatgctgtaatgccacaccttatgcaccagcataagtccataacaacacttcagggggaagatattgtattcctggcgactgatataaaccttcccggagcagtggattgggtgatgatgcaatcatgctttggattccactttatgctggtgctcgagaaacaagaaaagtatgatgggcatcagcagttcttcgcaatcgtccagttgatagggacacggaaacaggctgaaaattttgcctatcggctagaactcaatgggcatcgacgcaggctaacgtgggaagcgactccaagatcaatacacgaagggatagcaactgcaattatgaattccgattgtctggtgtttgatacttccatcgctcagctgttcgccgaaaacggaaacttaggaattaacgtaacaatctccatgtgt

SEQ ID NO: 316367 - DNA, 846 bp, Artificial Sequence
  derived and/or modified sequence
atgagccggcagacagcaacagccttgcccaccggaacgtcaaagtgcccccccagtcagcgagttccggcactgacaggaactacggcctccaacaacgacctggctagtctgttcgaatgccccgtgtgcttcgattacgtcttgcccccaatcctccagtgccagagcggacacctcgtttgtagcaattgccgcccaaagctgacctgctgcccgacttgcaggggtcctcttggtagtatacgtaatctggccatggaaaaagtagcaaactcggtgctattcccgtgtaagtacgctagctcaggctgcgagattacgttgccacatacagagaaggcggatcacgaggagctgtgtgaattccgaccgtactcctgtccgtgtccgggagcttcgtgcaagtggcaaggtagcttggacgcggttatgccccatctgatgcatcagcataaatccatcaccacgctgcagggtgaggacatcgtgttcttagcaaccgatatcaacctgccgggagctgtcgactgggttatgatgcaaagctgcttcggtttccacttcatgctagtcctcgaaaagcaggagaaatacgatggccatcagcagttcttcgcgatagtgcagctcattggtacgcggaagcaggcagaaaacttcgcatataggctggaattgaacggtcatcgtcgaaggctgacctgggaagccactccgcgctccattcacgagggaatcgctaccgccatcatgaactctgattgcctagtcttcgacacctccattgcccaactcttcgccgagaatggcaacctgggcatcaacgttacaataagtatgtgc

SEQ ID NO: 316368 - DNA, 846 bp, Artificial Sequence
  derived and/or modified sequence
atgagccggcagacagcaaccgcacttcccaccggcaccagtaagtgccctcctagccagcgggtgccggccctcacaggcaccaccgcctccaataacgacctagctagcctatttgagtgtccggtctgtttcgactacgtcctgccccctatactgcagtgtcaaagcggacatctggtgtgtagtaactgtaggccaaagttaacatgttgtcccacctgcagggggccattaggatccattcggaatctcgcgatggagaaagtggcaaacagcgtcctctttccctgcaaatacgcctccagtggatgtgaaattactttgccgcatactgagaaggctgaccatgaggaactttgcgagttccggccatactcctgcccctgccctggagcgagttgcaaatggcagggttcactcgacgccgtcatgccacaccttatgcatcagcacaagagcatcacaaccctccagggagaggacatcgtcttcctggctaccgacatcaacctcccgggggccgtggattgggtgatgatgcagtcttgtttcggttttcacttcatgttggttctcgagaagcaggagaaatacgacggccaccaacagtttttcgccatcgtccagctgataggcactaggaagcaagccgaaaattttgcctatcgactggagctgaacggccaccggcggcggctgacatgggaagccaccccaagatctatacatgaaggtatcgctaccgctatcatgaattcggattgtctggtgtttgacacgtccattgcgcagcttttcgctgagaatgggaacctcggcatcaatgttactatttcgatgtgc

SEQ ID NO: 316369 - DNA, 846 bp, Artificial Sequence
  derived and/or modified sequence
atgagccgtcagactgcaacggctcttcctaccggaacgtccaagtgtccaccatctcaaagagtccccgcactcactggtaccaccgcgtcaaacaacgatctcgcatccctctttgaatgtccggtctgttttgattacgtgctgccccccattcttcagtgtcaatcgggacatctggtctgtagcaattgcagaccaaagttgacctgctgtcctacctgtcgtggccctcttggttcgataagaaaccttgccatggagaaagtggcaaatagtgtcctctttccttgtaaatacgcgtcgagcggatgcgaaatcactctgccacataccgagaaagcggatcacgaagaactgtgcgagttccggccatattcttgtccttgccctggtgcctcgtgtaagtggcaggggtcgcttgacgccgtgatgccgcatctgatgcaccagcacaagagtatcaccactctccaaggcgaagatatcgtgttcctggcaactgacattaaccttcctggtgccgtggactgggtgatgatgcaatcttgctttggatttcatttcatgcttgttctggaaaagcaagaaaagtacgatggacatcagcaattcttcgcaatagtgcagctgatcggtacgcgaaagcaggctgagaacttcgcataccgcctggaactgaatggacataggcggcggctgacttgggaagcgactccacgatccattcacgaggggattgcaaccgcaattatgaacagcgactgcctcgtgtttgatacttccattgcgcaattgtttgcagaaaatgggaaccttggcattaacgtgaccatctcgatgtgc

SEQ ID NO: 316370 - DNA, 846 bp, Artificial Sequence
  derived and/or modified sequence
atgtcccgccaaacagccactgccctaccgactgggacctccaaatgccctccaagtcagcgggtgccggccctcacaggtactactgctagtaacaacgatctcgcaagcttattcgaatgtccagtatgttttgattatgtcctcccgccaatcttgcagtgccaaagcggccacctggtttgctccaactgcagaccgaagctgacctgctgccctacttgtaggggtccactcggctcaataaggaacctggcaatggagaaagtggctaactccgtcctgtttccgtgtaagtacgcatcctctggctgcgagattactctccctcacactgagaaggcggatcacgaggagctgtgcgaattccgcccttattcctgcccatgccccggggcctcctgcaagtggcaaggctcacttgacgcagtcatgccacacctgatgcaccagcacaaaagcatcacaaccctacagggagaagacatcgtgttccttgccacagatattaacctccctggagctgtcgactgggtgatgatgcagagctgtttcggatttcatttcatgctcgtgctcgagaagcaggaaaagtacgatggccaccagcagttcttcgctatagtgcagctgattggcactcgcaaacaggctgagaactttgcgtatcgacttgaactcaatggccatcgtcgaagattgacgtgggaagctaccccccggtccatacatgaggggattgctacagctatcatgaatagcgattgcttagtgttcgacacctcaattgcccaactgtttgccgaaaacggcaaccttggcataaatgtgaccatttcaatgtgc

SEQ ID NO: 316371 - DNA, 846 bp, Artificial Sequence
  derived and/or modified sequence
atgtcacggcagaccgccactgccctaccaaccggcactagcaagtgtcctccatcccagcgggtacctgcacttaccggtactactgcctccaataatgacctggcctcgctgtttgagtgcccagtgtgttttgactacgtgctaccacctatcctgcagtgtcaaagtgggcacttggtctgctccaattgccgacccaaactaacttgctgtccaacttgccgtgggccacttggaagcatcaggaatctggcaatggaaaaggttgcaaattctgtattgttcccctgcaaatatgcctcctccggatgcgaaatcactctgccgcatactgagaaggccgaccacgaggagctgtgtgaattccgaccatattcatgtccctgtccaggcgcctcttgcaagtggcagggtagcctggacgccgtgatgccgcatctgatgcaccaacataagtccatcaccaccctgcagggggaggatattgtttttcttgcgacagacattaatctccccggggctgtcgactgggtgatgatgcaatcttgtttcggcttccatttcatgctcgtgttagagaagcaagagaagtacgatgggcatcaacagtttttcgcgatagtacagttaatcggcacacgaaagcaggcagaaaactttgcctaccggttagagctcaatgggcacagacgacgcctgacatgggaagccacacctagatccattcacgagggtattgcgacagcaatcatgaactctgattgtctcgtcttcgatactagcattgcccagctgttcgcagagaatggcaacttgggaatcaatgtgactatctctatgtgt

SEQ ID NO: 316372 - DNA, 846 bp, Artificial Sequence
  derived and/or modified sequence
atgtctagacagacagctactgcactgcccactggcacatccaagtgccctccgagtcaaagggtgccggccctgactgggacaaccgcgtctaataacgacctcgcctcactctttgagtgccccgtgtgtttcgattacgttctcccacctatcctccagtgtcagtccggtcatcttgtctgttccaattgccggcctaaactgacgtgttgccccacgtgcagggggcctctgggttccataaggaacttggccatggaaaaggtggcaaacagcgtgctgtttccatgcaagtatgcttcgtcaggctgtgaaattacgttgccccacaccgagaaggcagaccacgaagagctctgcgagtttcgtccctactcctgtccttgcccaggtgcttcatgcaagtggcagggtagtctcgatgccgtcatgccgcacttaatgcatcagcataagtctataacaaccctacagggcgaggacattgtgttcctcgcaactgatatcaacctccccggggcagttgattgggtaatgatgcaatcatgtttcgggtttcactttatgctagttctggaaaagcaagagaagtacgacggccatcagcagtttttcgctattgtgcaattgatcggaacaaggaagcaggctgaaaatttcgcgtaccggttggagctgaacgggcaccggaggagactgacttgggaggcaaccccacgctccattcatgagggcattgccacagccattatgaacagcgactgcctggtgttcgacaccagcatcgcccagctgtttgccgagaacggcaatttaggcattaatgtgacaatctcaatgtgc

SEQ ID NO: 316373 - DNA, 846 bp, Artificial Sequence
  derived and/or modified sequence
atgagccggcagaccgccactgccctgccgactggaacctcaaagtgccctccgtcccaacgcgtcccagccctgaccggcacgaccgcatccaataacgaccttgcaagcctgtttgaatgtccagtgtgcttcgattacgtgctgccgcctatcctgcagtgtcagtccgggcacctggtgtgcagcaactgcaggccgaaactgacctgctgccccacctgcagaggccctctgggctcgatccgcaatctcgctatggagaaggtggcgaatagcgtgctcttcccatgtaagtacgcctcttccggatgcgagatcaccctgcctcacactgagaaagcagaccatgaagaactgtgcgaattcagaccatacagctgcccctgtccgggcgcctcctgcaaatggcagggatccctcgatgccgttatgccgcatctgatgcaccagcataagagcatcaccactcttcagggagaagatatcgtgttccttgcaactgacataaacctgccgggtgctgttgactgggtgatgatgcaaagctgctttggctttcactttatgttggtgctggaaaagcaagagaaatatgatggccaccagcagtttttcgctatcgtgcaactcatcggcactagaaagcaggcggaaaacttcgcctaccgcctggagctgaacgggcaccgccgtcgccttacgtgggaagctaccccacgctcgattcatgagggcatcgcaaccgcgatcatgaactccgactgcctggtgtttgacacctctatcgcccagctgttcgctgaaaacggtaacctgggaattaacgtgacgatctcgatgtgt

SEQ ID NO: 316374 - DNA, 846 bp, Artificial Sequence
  derived and/or modified sequence
atgtcaaggcaaaccgcaactgccctgcctaccggcaccagcaagtgcccgccatctcagcgcgttccggccctcaccggcaccacggcgtcaaacaatgatctggcatcgctcttcgaatgcccggtgtgtttcgactatgtgctgcctcccattctccagtgccagtccgggcatctcgtgtgttccaactgtcgccccaagctcacctgctgccctacttgccggggaccgcttggttcaatcagaaacctggcgatggaaaaggtggcgaacagcgtgctgttcccgtgtaagtacgcgtcctccggatgcgaaatcactcttccccacacggaaaaggctgatcacgaggaactgtgcgagttccggccatactcgtgcccgtgcccgggcgcatcttgcaagtggcaaggttcacttgacgcggtcatgcctcacctcatgcatcaacacaaatccatcaccacgctgcagggagaggatatcgtctttctggcgactgacataaatctgccgggggctgtcgactgggtcatgatgcaatcctgcttcggcttccacttcatgctggttctggagaaacaggagaaatacgatgggcatcagcagttttttgcgatcgtgcaactgatcggaactcggaagcaggcggagaattttgcctaccgcctggagttgaatggacaccggcgccgcctgacgtgggaagccaccccaaggtctatacatgaaggaattgcaactgccatcatgaactcggactgtctggtgttcgacacttcaatcgcccaattgttcgccgaaaacggtaaccttggaatcaatgtgaccatctcgatgtgc

SEQ ID NO: 316375 - DNA, 846 bp, Artificial Sequence
  derived and/or modified sequence
atgtctagacagaccgctacggcgctgccaaccggaacaagcaagtgtccgccaagtcagagggtgccggcgctcacaggaactactgcaagcaacaatgacctggcctcactgttcgagtgcccggtatgcttcgactacgtactgcctccgattcttcagtgtcagtctggtcacctggtatgtagcaactgtcggccgaagctgacttgttgtccgacctgcagagggcccctgggctctataagaaatttggccatggagaaggtggcgaactcagtgctttttccctgtaaatatgcttccagcgggtgcgagattaccctgccccacacggagaaggctgaccacgaagagctgtgcgaattcaggccgtactcctgtccttgtccaggagcctcctgcaaatggcaaggctcccttgatgctgtaatgccacacctgatgcaccagcataagtcaatcaccaccctgcagggcgaggatattgtgtttctggccactgacatcaatctgcctggggcggttgactgggtgatgatgcagagttgctttggctttcatttcatgctggtcttggagaagcaggaaaagtacgatggacaccagcagttttttgcaattgttcagttgatcggaactaggaaacaggctgagaactttgcctatcgactggaactgaatggtcatcgccggcgcctgacctgggaagccactcctaggtcaatccacgaaggaatagccacagctattatgaatagcgactgtctggtatttgatacctctattgcacagctgttcgctgagaatggaaacctggggattaacgtcaccatcagtatgtgt

SEQ ID NO: 316376 - DNA, 846 bp, Artificial Sequence
  derived and/or modified sequence
atgtcacggcaaactgccaccgcactgcctacgggtacaagcaagtgtccaccttctcagcgcgttccagcactgactggaacgacagcttccaataacgacctcgcttcactttttgaatgtccagtttgcttcgactacgtcctgcctccgattttacaatgccagagtgggcatctggtctgctctaactgcagacccaagctcacctgttgtcctacctgtcgcggaccactgggtagcatcaggaacctcgctatggagaaagtggcgaactcagttttgtttccctgcaaatacgccagcagtgggtgcgaaataaccctcccccataccgagaaagcggaccatgaggagctgtgtgagttccgcccttacagctgtccgtgcccaggcgccagctgtaagtggcaagggagcctagatgccgtcatgcctcatcttatgcaccagcacaaatcaataacgacactgcagggagaggatatagtattcctagctacggacattaatttgcctggagccgtggactgggtgatgatgcagtcctgttttgggtttcacttcatgttagtcttggagaagcaggaaaagtatgacggtcatcagcaatttttcgctatcgttcagctgatcggaacccggaagcaggcagagaatttcgcttatcggctcgagctgaatggccaccgcaggcgattgacctgggaggcgacacctcggtccatccacgaaggcatcgcaaccgccatcatgaattctgactgcctggtgtttgacacaagtatagcacagctatttgctgagaacggcaaccttggcatcaacgtaacgatctcaatgtgc

SEQ ID NO: 316377 - DNA, 846 bp, Artificial Sequence
  derived and/or modified sequence
atgtcgcgccagactgcgactgccctgccgactggcacttcaaagtgcccacctagccagagggttccggcgctcaccgggaccactgcctccaacaacgacctcgcctccttgtttgagtgtcccgtgtgcttcgactatgtcctcccgcccattctgcagtgccagtcagggcacttggtgtgtagcaattgccggccgaagctgacctgctgcccgacctgccgcgggccactcggttcgattagaaatctggcgatggagaaggtcgctaacagcgtgctgttcccttgcaagtacgcttccagcggatgtgaaatcaccctgccgcacactgaaaaagccgaccacgaggaattgtgcgagttccggccgtacagctgcccttgcccgggagccagctgcaaatggcaggggagtttggatgctgttatgccgcacctgatgcatcaacataaatccatcactaccctccaaggtgaggacatcgtgtttctcgccactgatatcaacttgcctggcgccgtggactgggtcatgatgcagtcgtgtttcggattccatttcatgttggtgctggaaaagcaggagaagtatgatggacaccaacagttctttgcaatcgtgcaactcatcggaacccgtaagcaggctgaaaacttcgcctacagactggagctcaacggacaccgcagacggctcacttgggaggccactccgcgctcaatacacgagggcatcgcaacggcgatcatgaactccgactgccttgtgttcgatacttccatcgcacagctctttgcggaaaacggcaacctgggaatcaatgtcaccatcagcatgtgc

SEQ ID NO: 316378 - DNA, 846 bp, Artificial Sequence
  derived and/or modified sequence
atgtctcgccagactgcaactgcactgcctaccggcaccagcaagtgcccacctagccagagggtccccgcacttactggaaccactgcgagcaataacgacttggcgtccctctttgagtgtcctgtctgttttgattatgtgctgcctcctatccttcaatgtcagtccggacacctcgtgtgttccaattgtcgtcctaaactgacctgctgccctacctgtcgcggcccgctgggaagcatcagaaacctggctatggaaaaagtggccaacagcgtgctgtttccatgtaaatacgcatcctcaggctgcgagatcactctccctcacactgaaaaagccgaccatgaggaactctgtgaatttcgcccatactcctgtccttgtccaggggccagctgcaaatggcagggatctctcgacgcagtgatgccacatctcatgcatcaacataagtcgatcactacccttcaaggcgaagatatcgtgttcctcgcaacggatatcaacctgccaggggccgtggattgggtgatgatgcaatcctgtttcggctttcatttcatgctcgtgcttgaaaagcaagaaaagtacgatggccaccagcagttttttgcaattgtccagctgatcggaaccagaaagcaagcggagaattttgcataccgacttgaacttaacggtcacagacgacgcctgacctgggaagcaacgcctcggtcgattcacgaaggcatcgcaaccgcaatcatgaactcggattgtctcgtgttcgatacgtcgattgctcaactgtttgccgaaaatggaaacttgggcataaacgtcaccatttcaatgtgt

SEQ ID NO: 316379 - DNA, 846 bp, Artificial Sequence
  derived and/or modified sequence
atgtcgagacaaactgccaccgctctgcctactggaacctccaagtgcccaccatcacagcgggtgcctgctctgacggggactaccgcatcaaacaatgacctggccagcctgttcgaatgcccggtttgttttgattacgtcttgcctccaatccttcaatgtcaatcaggccatctggtctgttcgaattgtaggccaaagctcacctgctgccctacctgccgcggtcccctgggtagcattcggaacttggctatggagaaagtcgcaaactccgtccttttcccttgtaagtatgcctcgagcggatgcgaaattactctgccgcataccgagaaggcagatcacgaggaactgtgcgagtttcggccttactcctgtccctgtcccggagcctcgtgtaagtggcagggatcccttgacgccgtgatgccacacctgatgcaccaacataaaagcataaccacgcttcaaggtgaagatattgtctttctcgcgaccgatatcaatctccctggagctgtggactgggtgatgatgcaatcatgctttggtttccacttcatgttggtgctcgagaagcaggaaaagtacgacggtcatcaacagttcttcgctattgtgcaactcatcggtacccgcaagcaggcagaaaactttgcataccgactcgaactgaatggtcatcgtcgcaggcttacgtgggaagccacgcccaggtcgatccatgaaggcatagcaaccgcaatcatgaactcggactgtttggtgttcgatacttctattgctcagctttttgccgaaaacggcaatcttggcattaacgtgactatatccatgtgt

SEQ ID NO: 316380 - DNA, 846 bp, Artificial Sequence
  derived and/or modified sequence
atgagcagacaaaccgcaactgccctcccgaccggaacttcgaagtgcccaccgtcacaacgcgtgccggccctcactggcactactgcaagcaataatgacctcgcatccctgttcgagtgtccggtgtgctttgactacgtcctgccgccaatcctgcagtgccagtcaggtcacctggtgtgctctaactgcaggccaaagctgacttgttgcccaacgtgtagaggccccctgggatcgatccggaacctggccatggagaaggttgccaacagcgtgctgtttccgtgtaaatacgccagctcgggatgcgaaatcactctcccgcacactgaaaaagcggatcatgaagagctctgcgagttccgtccttactcgtgcccctgtccgggcgcttcatgcaaatggcagggaagcctcgatgccgtgatgcctcatcttatgcatcaacacaaatcaatcactaccctccagggagaggatatcgtgtttctcgcaaccgacatcaatctgccgggtgccgtcgactgggtcatgatgcagtcttgcttcggattccatttcatgcttgtgctggaaaagcaagaaaagtacgacggacatcagcagtttttcgccatcgtgcaactgatcggaaccagaaaacaagccgagaacttcgcctatcgcctggaattgaatgggcatcggcgaagattgacctgggaagcaactccacgctccatccacgaaggaatcgccactgccatcatgaacagcgactgcctcgtctttgacacgtccatcgcccagctttttgctgagaacggaaacctgggcataaatgtgaccatctccatgtgc

SEQ ID NO: 316381 - DNA, 846 bp, Artificial Sequence
  derived and/or modified sequence
atgtcccgtcaaaccgcgacagccctgcctactggaacgagtaagtgtcccccctcacaaagagttcctgcgctgacgggaacaactgcctccaataacgatctcgcatccctgtttgagtgtcctgtatgcttcgactatgtgctgcccccaattctccagtgtcagtcgggccatctcgtctgttcgaattgcagacctaaactgacatgttgtcctacctgccggggcccattgggttcaatccgtaatctcgcgatggagaaggttgcaaattcagtactgtttccatgcaagtatgcttcatccggctgcgagatcactctcccccatactgaaaaagcggaccatgaggaactgtgtgaattccggccatactcatgcccctgtccaggcgcctcctgtaagtggcaagggtcactggatgccgtgatgccccacttaatgcaccagcacaaatctatcacaactctccagggcgaagacatcgtctttctggccacagatataaatctacccggggcagttgattgggttatgatgcaatcctgttttggcttccattttatgctggtactggagaagcaagagaagtatgatggtcatcaacagttctttgccattgtgcaactaataggtaccaggaaacaagctgaaaacttcgcctatcgcctagagttgaacggacatcggcgcaggctcacttgggaagcaacacctcggagtattcacgagggcattgcaacagctatcatgaactccgactgcctggtgttcgacacgtcgattgcacagctgtttgccgagaacggaaacttaggcattaacgtgaccatttccatgtgt

SEQ ID NO: 316382 - DNA, 846 bp, Artificial Sequence
  derived and/or modified sequence
atgagcagacagaccgccactgccctccccacaggcacatccaaatgcccccctagtcagcgggttccggccctgaccggaactaccgcgtcaaataacgacctggcttctttgtttgaatgtcctgtgtgctttgattacgtgttgccccctatcctgcagtgccagagtgggcatctagtttgctccaactgccgcccaaaactgacctgctgtcctacctgccgtgggccccttggatcgatacggaatcttgcgatggagaaagtggctaacagtgttttgtttccttgcaagtatgcctcaagtgggtgtgaaatcacactgccccacacggagaaagctgatcacgaggaactgtgtgagttccggccgtacagttgcccatgtccaggagccagctgcaagtggcagggaagtttggatgctgtgatgcctcatcttatgcatcaacataagtccattaccactctccagggggaggacatcgtgtttctggcaactgacattaatctccccggagccgtcgattgggtcatgatgcaaagctgttttggcttccacttcatgctcgttttggaaaaacaggagaagtatgatgggcaccaacagttctttgcgatagtgcagctgataggaactcgcaagcaagctgagaattttgcctacagattggaactgaatggacaccggcgtcgcctgacctgggaggcaaccccccggagcattcatgagggtatcgcaactgcaattatgaattcggactgtcttgtgttcgacacatcaatcgcacagctattcgctgagaacgggaatctaggaattaatgtgacaatcagtatgtgc

SEQ ID NO: 316383 - DNA, 846 bp, Artificial Sequence
  derived and/or modified sequence
atgtcgcgccagacggcaaccgcactccccaccggtacgtccaagtgccccccttcgcagagggtcccggcgctgactggaactaccgcctcgaacaatgatctggcctcactcttcgaatgccctgtgtgcttcgactatgtgttgcctccgattctccagtgccagtccggacacctggtctgttcaaattgccggccgaagctcacttgctgcccaacctgccgcggccctctgggatcgatcagaaatctcgctatggaaaaagtggcgaactccgtgctcttcccgtgcaagtacgcctcctcgggttgcgaaatcaccctgccacatactgaaaaggcggaccacgaagaactttgcgaattccgcccttacagctgcccatgcccgggagcgtcgtgcaaatggcagggctcattggatgccgtgatgccgcacctgatgcaccaacataagtcgatcaccactctccagggcgaggacattgtgttcctggccactgatatcaacctccctggagccgtggattgggtgatgatgcagtcctgcttcggattccacttcatgttggttctggaaaaacaggagaaatacgatggacatcagcagttcttcgcgatcgtccaactgatcggcacccggaagcaagccgagaattttgcctaccggctcgagctcaatggccaccgcaggcgcctgacctgggaggctacgccacgctccattcacgaggggattgctactgccatcatgaatagcgattgcctggtgttcgatacttccattgcccaactgttcgcagaaaacggaaacctggggataaatgtgaccatctcgatgtgt

SEQ ID NO: 316384 - DNA, 846 bp, Artificial Sequence
  derived and/or modified sequence
atgagcagacagactgccaccgctttaccgacgggtacgagtaagtgtccaccctcacagagagttcctgcgttaactggtactactgccagcaacaacgacttagcaagtttgttcgaatgcccagtttgcttcgattacgttctccctcctatcctccaatgtcagagtgggcatttggtctgttcgaactgccgccccaaattgacttgctgccctacctgtaggggtccactgggttcaattaggaatcttgcgatggaaaaagttgctaatagcgtcttgttcccttgcaaatatgcttcgtcgggttgcgagattacactgccgcataccgaaaaggctgatcacgaggagttgtgcgaattcaggccgtattcttgtccatgtcctggagcctcttgcaagtggcagggttctcttgatgctgtgatgcctcatttgatgcatcaacacaagagtattacaacccttcaaggagaagatattgttttccttgcaactgatattaatttgcccggcgctgtggattgggtcatgatgcaaagttgctttggctttcactttatgttagttctcgaaaaacaagagaagtatgatggccatcagcagttcttcgcaatagtccagttgattggtaccagaaagcaagctgagaactttgcttatcgacttgagttgaatggtcatagaaggcggttgacatgggaggcaacccctaggtctattcatgagggaatagctactgcgattatgaactccgattgtctcgttttcgatactagtattgcacaactattcgcggaaaacgggaacctggggattaatgtgaccatctcaatgtgc

SEQ ID NO: 316385 - DNA, 846 bp, Artificial Sequence
  derived and/or modified sequence
atgtcacgtcaaaccgctaccgccctgccgactgggacctccaagtgcccaccatcacagcgcgttcctgcattgactggtacgaccgcgagtaacaatgacttggcgtcgctgttcgaatgcccggtgtgttttgattatgtcctgccgcctattctgcagtgccaatcgggtcatctggtgtgttccaattgtcgaccaaaattgacctgttgccccacctgccggggccctcttggttccattcgcaacctggcgatggagaaagtggcaaactccgtgctctttccatgcaagtacgcatcctcaggttgtgaaatcactcttcctcatactgaaaaggcagatcatgaggaactgtgtgagttccggccatactcgtgcccttgtcccggggcatcttgtaaatggcaggggagccttgatgctgtgatgccacatctcatgcatcaacacaagagcatcaccactttgcaaggcgaggacattgtctttcttgcaacggacataaaccttcctggcgcggtcgattgggtcatgatgcagtcatgcttcggatttcactttatgttggtgcttgaaaagcaggaaaagtacgacggacaccaacaattcttcgccatagtccaactcattggaactcgaaagcaggcagaaaactttgcataccgcctggaactgaacggtcaccgacggcgtctcacctgggaggccacccctaggtccattcatgaggggatagcgaccgcaatcatgaattccgattgcctggtgtttgatacctcaattgcacagctgtttgctgaaaatgggaacctgggtataaacgtgaccatttcgatgtgt

SEQ ID NO: 316386 - DNA, 846 bp, Artificial Sequence
  derived and/or modified sequence
atgtccaggcaaaccgccacggctctccccacagggactagtaagtgcccccctagccagagggtccccgctctgactggaaccacagcatcaaacaatgatctggcgtccttgtttgaatgccccgtgtgctttgactacgtcctcccccccattctgcagtgtcaatcaggacaccttgtgtgttcaaactgtcggcctaagctgacttgctgtccgacctgtagaggccctctcggcagcattcggaatctggctatggaaaaagttgctaactcagtgctttttccgtgtaaatacgcctcttccggctgtgagatcaccctgcctcataccgagaaagccgaccacgaggagctgtgtgagttcagaccgtactcctgcccctgtcccggcgcctcctgtaagtggcaaggctctcttgacgcggtcatgccgcatctgatgcaccaacataagagtataacaacgctgcaaggcgaagatattgttttcctcgccaccgatatcaacttgccaggtgctgtggactgggttatgatgcagtcatgttttggattccatttcatgttggtgcttgaaaagcaggagaagtacgacggccaccaacagtttttcgccattgtccaactgatcggcacccggaagcaggctgaaaattttgcttaccgcctggagctcaatggtcataggcgcaggctgacttgggaggccacaccgcggtctatccacgagggtatagccacagcaatcatgaattctgactgtcttgtctttgacactagtatcgctcaactgttcgccgaaaatggtaacttgggtattaacgtgaccattagcatgtgc

SEQ ID NO: 316387 - DNA, 846 bp, Artificial Sequence
  derived and/or modified sequence
atgtcgcggcagactgcgactgccctgccaaccggtacttctaagtgtccgccctcccagcgggtccctgctctgaccggaaccactgcctcgaacaacgaccttgcttcgctctttgagtgtcctgtgtgttttgattacgtgcttccaccaattctccagtgtcagtcggggcatcttgtgtgtagcaactgtcgccccaagttgacttgctgtcctacctgccgcggtcctcttggatcgattcggaacctcgcaatggagaaggtggcaaattccgtcctgtttccgtgcaagtatgcaagctcgggatgtgagattaccctccctcataccgaaaaagcggatcatgaagagctgtgcgaatttagaccttacagctgtccttgtccaggagcctcgtgtaaatggcaaggttcacttgatgccgttatgccccacttgatgcaccaacataaatcgatcaccaccctccagggcgaggatatcgtgttcctggctaccgatatcaacctgccaggcgcagtggactgggtgatgatgcaatcatgcttcggattccatttcatgctcgtcctggagaaacaagaaaagtacgatggtcatcaacaattctttgcaattgtgcagctcataggaacgcgcaagcaggcagagaactttgcgtatagattggaattgaatggacatagaaggcggctgacttgggaagcaactcctagaagcattcatgagggcatcgccacggcgattatgaactcagattgtctcgtgttcgatacctccattgctcagctgttcgcggaaaatggcaatcttggaattaacgtgaccatctccatgtgc

SEQ ID NO: 316388 - DNA, 846 bp, Artificial Sequence
  derived and/or modified sequence
atgagtcgacaaacagctactgcacttccaacaggtacaagtaaatgtccaccatctcaaagagtaccagctttaacaggaactacagcatcaaataatgatcttgctagtttattcgaatgtccagtttgttttgattatgttcttcctcctattttacaatgtcaatctggtcatcttgtttgttccaactgtagaccaaaattaacatgttgtcctacatgtcgtggaccacttggttcaataagaaatttagctatggaaaaagttgctaattctgttctttttccttgtaaatatgcttctagtggatgtgaaattactcttccacatacagaaaaggctgaccatgaagaattatgtgaattcagaccatatagttgtccatgtccaggagctagttgtaaatggcaaggatctttggacgctgtaatgcctcacttaatgcatcaacacaaaagtataactacattacaaggagaagatattgtattcttagcaacagatataaacttaccaggtgctgtagattgggtaatgatgcaatcatgttttggttttcattttatgttagttttggaaaaacaagaaaaatatgatggtcatcaacaattctttgcaattgtacagttaattggaacacgtaagcaagcagaaaattttgcatacagattagaattaaatggacacagaagaagattaacatgggaagcaacacctagatcaattcatgaaggaatagcaacagctattatgaatagtgattgccttgtttttgatacatcaattgctcaattatttgctgaaaatggtaatttaggaattaatgttacaatttcaatgtgt

SEQ ID NO: 316389 - DNA, 846 bp, Artificial Sequence
  derived and/or modified sequence
atgagccgccaaaccgcaaccgcactccctaccggaaccagcaaatgcccaccaagccaacgggtgccagccctgaccggcacgaccgcatccaacaatgatctcgcctcgctctttgaatgccccgtctgttttgattacgtgctgccacctattcttcagtgtcagagcggtcatctggtgtgttcaaactgccggcccaagctgacctgctgtcccacctgccgcggtcctctgggatcaatacggaatcttgccatggagaaggtggcgaattctgtgctctttccctgtaagtacgcaagctccggatgtgagattactctgccccacacggagaaggctgaccacgaggaactttgtgaattcagaccgtactcctgcccctgtccgggagcttcatgtaagtggcaggggtcccttgatgccgtgatgccacaccttatgcaccagcataagtcgattactacccttcagggtgaggacattgttttcctcgctactgatatcaatctcccaggcgccgtggattgggtgatgatgcagtcctgttttggatttcatttcatgctggtgctggaaaagcaagagaaatatgacggacatcaacagttttttgcgatcgtccagctcataggcaccaggaagcaggcagagaactttgcttacagactcgagttgaatggacataggagacggctgacttgggaagcgacgcctcgatctatccacgagggcattgccaccgctatcatgaactcggattgtcttgtctttgataccagcatagcacagctgttcgcagaaaatgggaaccttggaatcaatgtgaccatttcaatgtgt

SEQ ID NO: 316390 - DNA, 846 bp, Artificial Sequence
  derived and/or modified sequence
atgagtaggcagactgcgaccgctcttcctaccggtacttccaaatgccctccgagccaacgcgtccctgcactcactgggactacggcatcgaacaacgatctcgcgagcctctttgaatgtccagtctgttttgattacgttctgccacccatcttgcaatgtcaatccggacacctggtctgttcgaattgcagaccaaagctgacctgttgtccaacctgcagaggacctttgggctccattcgcaacttggctatggagaaggtggctaacagcgtgctgttcccgtgcaagtacgcctcgtctggatgtgaaatcacgctccctcataccgaaaaggccgaccacgaggaactgtgtgaatttagaccgtatagctgtccctgtccaggggcatcatgcaaatggcagggttcccttgatgccgtgatgccccatctcatgcatcaacacaagagtattactacgctccaaggtgaggacattgttttcctggcaaccgacatcaatctgcctggtgcagtggactgggtgatgatgcagtcgtgcttcggtttccatttcatgcttgttctcgaaaaacaggagaagtacgatggacaccagcaattctttgctatcgtccagcttataggaacgcggaagcaagccgagaattttgcgtaccgactggagctgaatggacatagaaggcggctgacttgggaggctaccccgagatcgattcatgaaggcattgcaaccgccattatgaactcggactgtcttgtctttgatacctcaatcgcccagctgttcgcggaaaacggcaaccttggaatcaatgtgactattagcatgtgt

SEQ ID NO: 316391 - DNA, 846 bp, Artificial Sequence
  derived and/or modified sequence
atgtcacggcagactgcgaccgccttgccgacgggaacttcaaagtgcccgccgtcccagcgcgtccccgccctcaccgggactaccgcctccaacaatgacttggcctcgctctttgaatgtccagtgtgtttcgactacgtgcttcctcctatcctccagtgccaatccggtcatctggtgtgctcgaattgtcgcccgaagctcacttgctgccctacctgcagaggtccactgggatccatccgtaatttggctatggaaaaagtcgcaaactccgtgcttttcccatgtaagtacgcgtccagcggatgcgagatcactctcccacacacggagaaggcggaccacgaagagctctgcgaatttcggccttactcctgcccttgtccaggcgcttcttgcaagtggcaaggatcgctcgatgcggtgatgccgcacctgatgcaccaacacaagtcgattactaccctccagggagaagatattgttttcctggcaaccgatatcaacctgccgggggctgtggactgggtcatgatgcagtcctgtttcggattccacttcatgctcgtgctggagaagcaggaaaagtacgatggacaccaacagttctttgcaatcgtgcagctgatcggaacccgcaagcaggcagaaaacttcgcgtaccggctggagctgaatggccataggagacgcctgacctgggaggctaccccacgcagcatccacgaggggatcgccaccgcaatcatgaacagcgactgtcttgtgtttgataccagcatcgcacagctcttcgcggaaaatggaaacctgggaattaacgtgactatctcgatgtgc

SEQ ID NO: 316392 - DNA, 846 bp, Artificial Sequence
  derived and/or modified sequence
atgagccggcaaactgctaccgctctccctaccggaacctccaagtgtccaccatcacagcgcgttcctgcactgaccggcaccaccgcctcgaacaatgatctggcatcactgtttgaatgtcctgtgtgcttcgactacgtgctgcctccgattctgcaatgccagtccggacatctggtgtgttctaattgcagaccaaaactgacgtgttgtccaacttgcagaggcccgctgggctcgatccgcaaccttgcgatggaaaaggtcgccaattccgtgctttttccttgtaagtacgcgtcgtccggatgtgaaattacccttcctcatactgaaaaggctgatcacgaagagctttgcgaatttcgtccttattcctgtccctgcccgggggcgtcgtgtaagtggcagggatccctcgacgcagtcatgcctcatctgatgcatcaacataaaagcatcacgacgctccaaggggaggacatcgtgttcctcgctaccgacattaatctgcccggagctgttgattgggttatgatgcaaagctgtttcggatttcacttcatgctcgtgcttgaaaaacaggagaagtacgatggacaccaacagttttttgcaattgtgcaactcattggaactaggaagcaggccgaaaacttcgcataccgattggagcttaacgggcataggagacgtcttacttgggaggcaactccacggagcattcatgaaggaatagccaccgcaattatgaactccgattgtctggtgtttgatacctcaatcgcccagcttttcgctgaaaatggcaacctgggtattaacgtgactattagcatgtgt

SEQ ID NO: 316393 - DNA, 846 bp, Artificial Sequence
  derived and/or modified sequence
atgtctcggcaaacagctaccgccctgcctaccggtacaagcaaatgcccgccgagtcagcgggtaccagcgcttacaggcacaacagcaagcaacaacgaccttgcttccctgttcgagtgccctgtttgtttcgattatgtcctgcctccaattctgcagtgtcaatcaggccacctcgtttgttcgaactgcaggcctaaactgacctgctgccctacctgtagaggacccctgggaagtattcgcaatctagccatggagaaggtagccaacagtgtactgttcccttgcaagtatgcatccagcggctgcgagatcacactaccgcacactgagaaggcggaccacgaggaactgtgcgagtttagaccttactcctgcccatgccccggcgcgagttgtaaatggcagggttccctcgatgccgtcatgccccatctaatgcatcagcataaaagtattacaacattgcagggtgaagacatagtcttcttagcaaccgacatcaacctgccaggcgctgtcgactgggtaatgatgcagtcttgtttcgggttccattttatgctggtgctagaaaagcaggagaaatatgatgggcatcagcagttctttgcgattgtacagctcattggaacccggaaacaggccgagaatttcgcataccgcctggagctgaacggacataggcgtcggctgacatgggaggcgacccctagatccatccatgaggggatcgctacagctatcatgaacagcgactgtcttgtctttgacacgagcatagctcagcttttcgccgaaaacggaaatttgggcattaacgtcacaatctctatgtgc

SEQ ID NO: 316394 - DNA, 846 bp, Artificial Sequence
  derived and/or modified sequence
atgagccggcagaccgccactgccctgccaaccggaacaagcaagtgtcctccatcccagagagtgcctgctctgaccggaacaactgcaagcaataatgaccttgcatcactcttcgaatgccctgtgtgctttgactatgtgctgcctcccatcctgcagtgccagtccggccatcttgtatgttcaaattgcaggccgaagctgacttgttgtcctacgtgtcgcggacccctcggaagcattaggaacctagcaatggaaaaggtcgctaatagcgttctttttccgtgtaagtacgctagctccggttgtgaaataactctgccgcacaccgagaaagctgatcacgaggagctatgcgaattcaggccctactcttgcccttgtcctggagcctcatgtaagtggcagggctccttggacgctgtgatgccccaccttatgcaccaacacaagagcatcaccactctgcagggcgaagatatagttttcctcgccaccgacatcaacctccccggtgctgtggactgggtaatgatgcagtcttgcttcggcttccatttcatgctggtcctagagaaacaagaaaaatacgacggacatcagcagtttttcgccattgttcagctcataggaacgcgcaagcaagctgaaaactttgcttataggctcgaattgaatggacatcgcagacgcctcacttgggaagctacaccaaggagtattcacgaaggtattgctaccgccataatgaactccgattgtctggtattcgacacaagcattgcccagttatttgccgagaacggaaatttaggcattaacgtgaccatctccatgtgt

SEQ ID NO: 316395 - DNA, 846 bp, Artificial Sequence
  derived and/or modified sequence
atgagccggcagactgccacagcgctacccacggggaccagcaaatgcccacccagtcagcgcgtgccagctcttacagggacaacagctagcaataatgaccttgcttccttatttgagtgccctgtgtgtttcgactacgtgctgccacctatactgcagtgtcagagtggccaccttgtctgcagtaattgcaggcctaagctgacttgttgccctacctgccgcggacccctcggttccatacggaatctcgcaatggagaaagtcgctaactctgttctctttccctgtaagtatgcttcctccggctgtgaaataactctgccccacacagaaaaggccgaccatgaagaactctgcgaattccgcccctactcctgcccatgtcctggggcctcatgcaaatggcaagggtcactggacgctgtcatgccccacctgatgcaccagcataagagtatcaccacacttcagggagaggatatagtgtttttggccacggacattaatctgcccggcgctgtcgattgggtaatgatgcagagctgcttcggctttcactttatgctcgtccttgagaagcaggagaaatacgatggacaccagcagttttttgctattgtccagctcatcggcacgcgtaagcaggcagagaactttgcctaccgcttggaactaaacgggcaccggcgaagattaacctgggaggccacccccagatctattcacgaaggaatcgctactgccatcatgaactctgactgtttggtatttgatacatcgatcgcgcaactgtttgcggaaaatggcaacctcgggatcaatgttactattagcatgtgt

SEQ ID NO: 316396 - DNA, 846 bp, Artificial Sequence
  derived and/or modified sequence
atgagccgtcagaccgctaccgcattgccaaccgggacttcgaaatgcccaccatcccaacgcgttcctgctctcaccggaaccacggcatccaacaatgatctggcctcgctgtttgaatgtccggtctgttttgactacgtgctcccgcctattttgcaatgccagtccggacatctcgtctgtagcaattgcaggccgaagttgacctgctgccccacctgcaggggtccccttgggtcaattcggaacctggccatggaaaaagtcgcaaacagcgtgcttttcccttgcaagtacgcctcgtccggatgtgagatcaccctgcctcataccgaaaaggcagatcatgaggagctgtgcgaatttcgcccctacagctgcccatgtcccggtgcctcgtgtaaatggcagggatctctcgacgcggtcatgccccatctgatgcatcaacacaaatccattaccactctgcagggagaagatattgtgtttctggccactgacatcaacctgcccggtgcagtcgactgggtgatgatgcaatcgtgcttcgggttccactttatgctggtgctggaaaagcaggagaaatacgatgggcatcagcagtttttcgcaatcgtgcaactcatcggaacccgaaagcaggccgaaaacttcgcctacaggttggaacttaatggacatagacggcggcttacctgggaggcaacgccacgctcaattcacgaggggatagccactgcaattatgaactccgattgtcttgtctttgatacttcaattgcgcagctcttcgcagagaacgggaaccttggtattaacgtgactatttccatgtgt

SEQ ID NO: 316397 - DNA, 846 bp, Artificial Sequence
  derived and/or modified sequence
atgagtcgtcagacggcaacagctctgcccacgggaacatctaagtgtccgcctagccagcgggttccggcacttactggcacgactgcaagcaataatgatcttgcctcactgttcgaatgtccagtctgctttgactatgtattgccaccgattttgcagtgtcagagcggccatttggtttgttcaaactgtcgtccaaaacttacatgctgtccaacgtgccgcggaccgctgggctctatccgcaatcttgcaatggagaaagttgccaatagcgtcttatttccttgcaaatacgccagctctggatgcgaaattaccttgccgcatacggaaaaagccgaccatgaagagttatgtgaatttcgcccatatagttgtccatgtcctggtgcgagctgtaaatggcaaggatctctcgatgctgtcatgccccatttgatgcatcagcacaaaagcattacaacactgcagggagaagatattgtattccttgcgacagacattaatttgccgggagctgttgactgggtcatgatgcaatcatgttttggcttccattttatgttggtcttggaaaagcaggaaaaatatgatgggcaccagcagtttttcgccattgttcaattgattggtactcggaaacaagccgaaaattttgcataccgtctggaactcaatgggcatcggaggcgtttaacgtgggaggccacgccccgctccatccacgaaggtattgcgacagcaattatgaactctgactgtcttgtttttgatacgagtattgcacagctttttgcggaaaatggaaacttaggaattaatgtcacaataagtatgtgc

SEQ ID NO: 316398 - DNA, 846 bp, Artificial Sequence
  derived and/or modified sequence
atgtcccgccagaccgcaactgctctccctaccgggacctccaagtgccccccctcccagcgtgttcccgctctcaccggtacgacggctagcaataacgacctggcatccctgttcgagtgccccgtttgcttcgattatgtgctgccacccattcttcagtgccagtcgggtcatctggtttgttccaactgccggcccaagctcacttgttgtccgacatgccgaggccccttgggatctattaggaatcttgccatggagaaggtggctaactccgttttgttcccctgtaagtacgccagcagcggctgcgagatcactttgcctcacacggagaaggccgaccacgaggagctctgcgagttccgcccgtactcttgcccgtgccccggcgcttcgtgtaagtggcaaggctctttggacgccgtcatgccacacctcatgcaccaacacaaatctatcacgacgctgcagggcgaggacatcgtgttccttgccaccgatatcaacctgccgggtgccgtcgactgggtcatgatgcagagttgcttcgggttccatttcatgctcgtcctcgagaagcaggaaaaatatgacggccaccagcaattcttcgcaattgtccaactgatcggtacacggaagcaagcggagaacttcgcctaccgcctggaattgaacggtcataggcgtcgccttacgtgggaggccacgccccgcagcatccacgagggtatcgccaccgccatcatgaatagcgattgcctcgtcttcgacacgagtatcgctcagcttttcgccgagaacggaaatttgggcattaacgttaccatctccatgtgt

SEQ ID NO: 316399 - DNA, 846 bp, Artificial Sequence
  derived and/or modified sequence
atgtcccggcagaccgccaccgctctgccgacgggaactagcaaatgcccgccgtctcaaagggtaccagccctcaccgggaccactgctagcaacaatgatctcgcctcgctctttgagtgcccagtgtgtttcgactacgtcctgccgcctattctccagtgccaaagcggtcaccttgtgtgctcgaattgccggccgaagctgacctgttgcccgacttgcaggggccctttgggatcgattcggaacctcgcgatggagaaggtcgcgaacagcgtgctgttcccctgcaagtacgcatcatccggctgcgaaatcactttgccacataccgagaaagctgaccacgaagagctgtgcgaattccgtccatacagctgcccatgtcctggagctagctgcaagtggcagggtagcctggacgcagttatgccgcatctgatgcaccagcataagtcgatcaccactctccagggagaggatatcgtgtttctggcaaccgacatcaacctcccaggggcagtcgactgggtgatgatgcaatcctgcttcggattccactttatgctcgtgctggaaaagcaagaaaagtacgatggacatcaacagtttttcgcgattgtgcagcttatcggaacccggaaacaggccgaaaactttgcctacagattggaattgaacggacataggcgtcgactgacctgggaggcgactccgagatcgatccacgaaggcatcgccactgcaataatgaatagtgactgtctggtgttcgataccagcatcgcccagttgttcgccgagaatgggaacctcggtatcaatgtcaccatctccatgtgt

SEQ ID NO: 316400 - DNA, 846 bp, Artificial Sequence
  derived and/or modified sequence
atgagcagacaaacggccaccgctttgccaactgggacatcaaaatgcccgccttcccagagagtgccagccctgaccggtactacagccagcaacaacgatcttgccagtctgtttgaatgtcctgtgtgcttcgactatgtgctcccaccaatcctgcagtgccaatcgggccatctagtttgtagcaactgcagaccaaaactgacttgctgccctacgtgcagaggccctctcgggagcataaggaacctggctatggaaaaagttgctaatagtgtgctgttcccgtgtaagtacgccagctcaggatgcgagataaccctcccacacaccgaaaaagccgaccacgaggagctctgcgaattccggccctactcttgcccttgcccgggagcctcttgcaaatggcaggggtcattagatgcggttatgccccacctcatgcatcagcataagtccattactactctgcaaggcgaagacattgtgttcctcgctacagatataaacctgccgggtgcggtcgattgggtaatgatgcagagctgcttcgggttccatttcatgctcgtgctcgaaaagcaagaaaagtatgacggccatcagcagtttttcgctattgtgcagcttattggaacccgcaagcaggcagagaactttgcttacagattggagctcaatggccatcgcagacgattgacctgggaggccaccccacgttctatccacgagggtatcgccacagccatcatgaactccgattgcctggtgtttgatacttctatcgctcagctgtttgccgagaatggaaatctggggatcaacgtgactatttctatgtgt

SEQ ID NO: 316401 - DNA, 846 bp, Artificial Sequence
  derived and/or modified sequence
atgtccagacagactgcgaccgccctgccgactggaacctcaaagtgcccaccaagccaacgcgtgcccgccctcaccggaaccaccgctagcaacaacgacttggcctccctttttgagtgccctgtgtgcttcgactacgtgctgccaccgatcctccagtgtcagagcggacacctggtgtgctcgaactgccggcctaaattgacttgctgcccgacttgccgggggccactcggcagcatcagaaatctggcaatggaaaaggtcgcgaattcggtgctgtttccgtgcaagtacgcgtctagtgggtgcgagattaccctgccccataccgaaaaggccgatcatgaagaactgtgtgagttcaggccgtactcctgtccatgtccgggagcctcgtgcaagtggcagggatcattggatgccgtcatgccgcaccttatgcaccaacacaaatcaatcacgactctgcagggcgaggatattgtgttcctggccaccgacatcaatcttccgggcgcggtcgactgggtcatgatgcagtcatgctttggattccacttcatgctcgtgctcgagaagcaagaaaagtatgacggacatcagcagttcttcgctatcgtgcagctcatcggtacccgaaaacaagccgaaaacttcgcgtaccgcctggagctgaatgggcatcgccgccggctcacttgggaggcaactcctagatcgatccacgaaggaatcgcaaccgccatcatgaactccgattgtctggtgtttgacacgtccattgcacaactgttcgctgaaaacggcaacctgggtatcaacgttactatctcgatgtgc

SEQ ID NO: 316402 - DNA, 846 bp, Artificial Sequence
  derived and/or modified sequence
atgagccgccagaccgccaccgccctgcccaccggcaccagcaagtgcccccccagccagcgcgtgcccgccctgaccggcaccaccgccagcaacaacgacctggccagcctgttcgagtgccccgtgtgcttcgactacgtgctgccccccatcctgcagtgccagagcggccacctggtgtgcagcaactgccgccccaagctgacctgctgccccacctgccgcggccccctgggcagcatccgcaacctggccatggagaaggtggccaacagcgtgctgttcccctgcaagtacgccagcagcggctgcgagatcaccctgccccacaccgagaaggccgaccacgaggagctgtgcgagttccgcccctacagctgcccctgccccggcgccagctgcaagtggcagggcagcctggacgccgtgatgccccacctgatgcaccagcacaagagcatcaccaccctgcagggcgaggacatcgtgttcctggccaccgacatcaacctgcccggcgccgtggactgggtgatgatgcagagctgcttcggcttccacttcatgctggtgctggagaagcaggagaagtacgacggccaccagcagttcttcgccatcgtgcagctgatcggcacccgcaagcaggccgagaacttcgcctaccgcctggagctgaacggccaccgccgccgcctgacctgggaggccaccccccgcagcatccacgagggcatcgccaccgccatcatgaacagcgactgcctggtgttcgacaccagcatcgcccagctgttcgccgagaacggcaacctgggcatcaacgtgaccatcagcatgtgc

SEQ ID NO: 316403 - DNA, 1035 bp, Artificial Sequence
  derived and/or modified sequence
taatacgactcactatagggaaataagagagaaaagaagagtaagaagaaatataagagccaccatgagccgtcagactgctacagcattacctaccggtacctcgaagtgtccaccatcccagagggtgcctgccctgactggcacaactgcatccaacaatgacttggcgagtctttttgagtgtccagtctgctttgactatgtgttaccgcccattcttcaatgtcagagtggccatcttgtttgtagcaactgtcgcccaaagctcacatgttgtccaacttgccggggccctttgggatccattcgcaacttggctatggagaaagtggctaattcagtacttttcccctgtaaatatgcgtcttctggatgtgaaataactctgccacacacagaaaaagcagaccatgaagagctctgtgagtttaggccttattcctgtccgtgccctggtgcttcctgtaaatggcaaggctctctggatgctgtaatgccccatctgatgcatcagcataagtccattacaaccctacagggagaggatatagtttttcttgctacagacattaatcttcctggtgctgttgactgggtgatgatgcagtcctgttttggctttcacttcatgttagtcttagagaaacaggaaaaatacgatggtcaccagcagttcttcgcaatcgtacagctgataggaacacgcaagcaagctgaaaattttgcttaccgacttgagctaaatggtcataggcgacgattgacttgggaagcgactcctcgatctattcatgaaggaattgcaacagccattatgaatagcgactgtctagtctttgacaccagcattgcacagctttttgcagaaaatggcaatttaggcatcaatgtaactatttccatgtgttgataataggctggagcctcggtggccatgcttcttgccccttgggcctccccccagcccctcctccccttcctgcacccgtacccccgtggtctttgaataaagtctgagtgggcggctctaga

SEQ ID NO: 316404 - DNA, 1012 bp, Artificial Sequence
  derived and/or modified sequence
gggaaataagagagaaaagaagagtaagaagaaatataagagccaccatgagccgtcagactgctacagcattacctaccggtacctcgaagtgtccaccatcccagagggtgcctgccctgactggcacaactgcatccaacaatgacttggcgagtctttttgagtgtccagtctgctttgactatgtgttaccgcccattcttcaatgtcagagtggccatcttgtttgtagcaactgtcgcccaaagctcacatgttgtccaacttgccggggccctttgggatccattcgcaacttggctatggagaaagtggctaattcagtacttttcccctgtaaatatgcgtcttctggatgtgaaataactctgccacacacagaaaaagcagaccatgaagagctctgtgagtttaggccttattcctgtccgtgccctggtgcttcctgtaaatggcaaggctctctggatgctgtaatgccccatctgatgcatcagcataagtccattacaaccctacagggagaggatatagtttttcttgctacagacattaatcttcctggtgctgttgactgggtgatgatgcagtcctgttttggctttcacttcatgttagtcttagagaaacaggaaaaatacgatggtcaccagcagttcttcgcaatcgtacagctgataggaacacgcaagcaagctgaaaattttgcttaccgacttgagctaaatggtcataggcgacgattgacttgggaagcgactcctcgatctattcatgaaggaattgcaacagccattatgaatagcgactgtctagtctttgacaccagcattgcacagctttttgcagaaaatggcaatttaggcatcaatgtaactatttccatgtgttgataataggctggagcctcggtggccatgcttcttgccccttgggcctccccccagcccctcctccccttcctgcacccgtacccccgtggtctttgaataaagtctgagtgggcggc

SEQ ID NO: 316405 - protein, 331 aa, Artificial Sequence
  derived and/or modified sequence
MVVVIVLYFSLWKGVKTSGKVWIDAATQIFFSLGAGFGVLIAFASYNKFDNNCYRDALLTSSINCITSFVSGFAIFSILGYMAHEHKVNIEDVATEGAGLVFILYPEAISTLSGSTFWAVVFFVMLLALGLDSSMGGMEAVITGLADDFQVLKRHRKLFTFGVTFSTFLLALFCITKGGIYVLTLLDTFAAGTSILFAVLMEAIGVSWFYGVDRFSNDIQQMMGFRPGLYWRLCWKFVSPAFLLFVVVVSIINFKPLTYDDYIFPPWANWVGWGIALSSMVLVPIYVIYKFLSTQGSLWERLAYGITPENEHHLVAQRDIRQFQLQHWLAI

SEQ ID NO: 316406 - DNA, 996 bp, Artificial Sequence
  derived and/or modified sequence
atggtggtggtgatcgtgctgtacttcagcctgtggaagggcgtgaagaccagcggcaaggtgtggatcgacgccgccacccagatcttcttcagcctgggcgccggcttcggcgtgctgatcgccttcgccagctacaacaagttcgacaacaactgctacagagacgccctgctgaccagcagcatcaactgcatcaccagcttcgtgagcggcttcgccatcttcagcatcctgggctacatggcccacgagcacaaggtgaacatcgaggacgtggccaccgagggcgccggcctggtgttcatcctgtaccccgaggccatcagcaccctgagcggcagcaccttctgggccgtggtgttcttcgtgatgctgctggccctgggcctggacagcagcatgggcggcatggaggccgtgatcaccggcctggccgacgacttccaggtgctgaagagacacagaaagctgttcaccttcggcgtgaccttcagcaccttcctgctggccctgttctgcatcaccaagggcggcatctacgtgctgaccctgctggacaccttcgccgccggcaccagcatcctgttcgccgtgctgatggaggccatcggcgtgagctggttctacggcgtggacagattcagcaacgacatccagcagatgatgggcttcagacccggcctgtactggagactgtgctggaagttcgtgagccccgccttcctgctgttcgtggtggtggtgagcatcatcaacttcaagcccctgacctacgacgactacatcttccccccctgggccaactgggtgggctggggcatcgccctgagcagcatggtgctggtgcccatctacgtgatctacaagttcctgagcacccagggcagcctgtgggagagactggcctacggcatcacccccgagaacgagcaccacctggtggcccagagagacatcagacagttccagctgcagcactggctggccatctag

SEQ ID NO: 316407 - DNA, 996 bp, Artificial Sequence
  derived and/or modified sequence
atggtcgtggtcatagtcctctatttttcactttggaaaggagtgaagaccagtggaaaagtttggatcgacgcggctacacagatctttttcagcttaggagcaggctttggcgtccttatcgcattcgcctcttacaataagtttgacaataattgttatagagatgcactgctgacgtcaagtatcaattgcattacttcattcgtgagtggttttgctatattcagcatactgggttacatggcacacgaacacaaggtcaacattgaagacgtcgcaacagaaggcgccggcctggtctttattttgtatcccgaggccatatcaaccctcagcggttctaccttctgggctgttgtgttcttcgtaatgctgctagccctgggccttgatagttctatgggtgggatggaggcggtcattaccggactggctgacgattttcaggtgctgaagcgccacaggaaactgttcactttcggcgttaccttcagcaccttcctgctggctctcttctgtatcaccaagggtggaatatatgtcctcacccttttagacaccttcgccgctggtacatccattcttttcgcagtgctgatggaagccataggcgtgagctggttctacggtgtggacaggttctcgaacgacatacaacagatgatggggttcagacctggcctatattggcggctatgttggaaattcgtgtccccggcgttcctgctattcgtagtcgtggtgtctatcatcaatttcaagcctttaacctatgatgactacattttccccccttgggccaattgggtggggtggggtatagccctctcatctatggtgctggtgccgatctatgtcatttataagtttctatctacgcaaggttccctttgggaacgtctagcatatggaattaccccggaaaacgagcaccatctagtggcgcagagggacatcaggcagtttcagctgcagcattggctagcaatctag

SEQ ID NO: 316408 - DNA, 996 bp, Artificial Sequence
  derived and/or modified sequence
atggtggtggtgattgtgctgtacttcagcctgtggaagggcgtgaagaccagcggcaaggtgtggattgatgctgccacccagatcttcttcagcctgggcgccggctttggagtgctgattgcctttgccagctacaacaagtttgacaacaactgctacagagatgccctgctgaccagcagcatcaactgcatcaccagctttgtgtctggctttgccatcttcagcatcctgggctacatggcccacgagcacaaggtgaacattgaagatgtggccacagaaggagctggcctggtgttcatcctgtacccagaggccatcagcaccctgagcggcagcaccttctgggccgtggtgttctttgtgatgctgctggccctgggcctggacagctccatgggcggcatggaggccgtcatcaccggcctggctgatgacttccaggtgctgaagaggcacaggaagctgttcacctttggagtgaccttcagcaccttcctgctggccctcttctgcatcaccaagggcggcatctacgtgctgaccctgctggacacctttgctgctggcaccagcatcctgtttgctgtgctgatggaggccatcggcgtgtcctggttctacggcgtggaccgcttcagcaatgacatccagcagatgatgggcttccggcccggcctgtactggaggctgtgctggaagtttgtgtccccagccttcctgctgtttgtggtggtggtgtccatcatcaacttcaagcccctgacctatgatgactacatcttccccccctgggccaactgggtgggctggggcatcgccctgagctccatggtgctggtgcccatctacgtgatctacaagttcctgagcacccagggcagcctgtgggagcggctggcctacggcatcaccccagaaaatgagcaccacctggtggcccagagggacatccggcagttccagctgcagcactggctggccatctag

SEQ ID NO: 316409 - DNA, 996 bp, Artificial Sequence
  derived and/or modified sequence
atggtggtggtgatcgtgctgtacttcagcctgtggaagggcgtgaagacctctggaaaggtctggatcgatgctgccacccaaatttttttttccctcggggccggcttcggcgtcctcatcgcatttgctagctacaacaagtttgataataactgttatcgcgatgccctgctgacatccagtattaactgtataaccagtttcgtctcaggttttgctatcttttctatccttggttacatggcccacgagcataaagtgaatattgaggatgtggccacagaaggcgccgggcttgtatttattttgtaccccgaagctatttcaaccctgagtggaagcacattctgggcggtggtgtttttcgttatgctccttgccttaggactagattcttccatgggggggatggaggctgtgatcaccgggcttgcggacgactttcaagttctcaagcggcatagaaagctgttcacattcggtgtgaccttctccacgttcctcctggctttgttttgcatcaccaagggcggtatctatgtgctgactctactggataccttcgctgctgggaccagtatcttgtttgctgtgctcatggaggcaataggcgtgtcgtggttctacggtgtcgatcgattctctaacgacatccagcagatgatgggtttccgacccggcctgtattggaggctgtgttggaagtttgtgagtccagcatttctgttattcgtagtggtcgtctcaataattaactttaaaccactgacttacgacgattacatctttcccccttgggcgaattgggtgggctggggcatcgccctcagcagcatggttctcgtccccatctacgtaatatataagtttctctcaacacaaggtagcctctgggaaagattggcttatgggatcactcctgaaaacgaacaccacctggtggcacagagagacatccgtcagtttcagctacagcattggcttgccatctag

SEQ ID NO: 316410 - DNA, 996 bp, Artificial Sequence
  derived and/or modified sequence
atggtggtggtcatcgtgctctacttctccctatggaaaggcgtaaaaacctccgggaaagtctggattgacgcagcgactcaaatttttttcagcctgggcgcagggtttggggtacttattgcttttgcttcctacaataagtttgataataactgctaccgggacgccttactgacctcttccataaactgcatcacttcgttcgtttcaggctttgccatattttcaatattgggatacatggctcacgaacacaaagtgaacatcgaggatgttgcaaccgaaggggctggactggtgttcatcctgtatccagaggccatatcaacactttccggctccactttttgggccgtggtattttttgtaatgctcctggctctcggcctggattcctccatgggtggcatggaagcagttatcaccggattggcagacgactttcaggtgttgaagcggcaccgcaagctcttcacgttcggagtgacttttagtacttttctcctggcattgttttgcattaccaaaggcggaatttacgtgttgaccttattggataccttcgccgcaggtacctcgattctgtttgccgttcttatggaggctattggagtatcctggttttatggagtagaccgattcagcaacgacatccagcaaatgatgggatttcgacccggactctactggcgcctgtgctggaagtttgtctcaccagctttcctgcttttcgtcgtggtagtatccatcataaatttcaagccactgacctacgatgactacatttttcccccttgggctaattgggtggggtggggaatagcactatccagtatggttctggtaccaatatacgtgatctataaattcttgagcactcaaggctctctgtgggagcgccttgcctacggaataaccccggaaaacgaacaccacctggttgcacaaagagatatacgccagtttcagctgcagcactggctcgctatatag

SEQ ID NO: 316411 - DNA, 3752 bp, Artificial Sequence
  derived and/or modified sequence
agagctggtgctgcaccggtcgctgcttccccagtccttttttggcctcctttctgacgcgacgcagaccccagttctggagagtctgtcactcgctccccgtggtgggagatcagaggcctggtgtccttgggagcggcgagcggtgctcggcgcaggatagaaagggagtgcgcgcccgagtcccccagatccctgggaacccgcgccaccctcccgcccctgcccatccccggccgcgctgtcagtctccattagcgctaacaggctccagacggagcgggccgggcgctgggttaatgcaatcggcgcgttacctggggcgcaggctacattaccagcccggcccccgccaggcacggccagaaccagtcagcccgcgccctgccggccgccccgcgcctccagctcttccccggccccgcccgaacgccacacggcggagcccagccccagcccgcgccctagagcctgccaaggcgccgccggtcgggggccggcagggcgcaaggcaccagggatcccctcgccgccggacacagcctcggcgtgcccccaggaccggtaaagttcctctcgccagccgcatccatgcttctggcgcggatgaacccgcaggtgcagcccgagaacaacggggcggacacgggtccagagcagccccttcgggcgcgcaaaactgcggagctgctggtggtgaaggagcgcaacggcgtccagtgcctgctggcgccccgcgacggcgacgcgcagccccgggagacctggggcaagaagatcgacttcctgctgtccgtagtcggcttcgcagtggacctggccaacgtgtggcgcttcccctacctctgctacaagaacggcggcggtgccttcttgatcccgtacacactgttccttatcatcgcggggatgcccctgttctacatggagctggctctgggacagtacaaccgggagggggctgccaccgtttggaaaatctgcccattcttcaaaggcgttggctatgctgtcatcctgatcgccctgtacgttggcttctactacaacgtcatcatcgcctggtcactctactacctcttctcctccttcaccctcaacctgccctggaccgactgtggccacacctggaacagccccaactgtaccgaccccaagctcctcaatggctccgtgcttggcaaccacaccaagtactccaagtacaagttcacgccggcagccgagttttatgagcgtggtgtcctgcaccttcacgagagcagcgggattcatgacatcggcctgccccagtggcagctcttgctctgtctgatggtcgtcgtcatcgtcttgtattttagcctctggaaaggggtgaagacatcaggaaaggtatggattgatgccgcaactcagatatttttttccttgggggctggatttggagtattgattgcatttgccagttacaacaaatttgacaacaactgttacagggatgccctgctgaccagcagcatcaactgtatcaccagcttcgtctctgggttcgccatcttctccatccttggttacatggcccatgaacacaaggtcaacattgaggatgtggccacagaaggagctggcctagtgttcatcctgtatccagaggccatttctaccctgtctggatctacattctgggctgttgtgtttttcgtcatgctcctggcgctgggccttgacagctcaatgggaggcatggaggctgtcatcacgggcctggcagatgacttccaggtcctgaagcgacaccggaaactcttcacatttggcgtcaccttcagcactttccttctcgccctgttctgcataaccaagggtggaatttacgtcttgaccctcctggacacctttgctgcgggcacctccatcctttttgctgtcctcatggaagccatcggagtttcctggttttatggagtggacaggttcagcaacgacatccagcagatgatggggttcaggccgggtctatactggagactgtgctggaagttcgtcagtcctgccttcctcctgttcgtggttgtggtcagcatcatcaacttcaagccactcacctacgacgactacatcttcccgccctgggccaactgggtggggtggggcatcgccctgtcctccatggtcctggtgcccatctacgtcatctataagttcctcagcacgcagggctctctttgggagagactggcctatggcatcacgccagagaacgagcaccacctggtggctcagagggacatcagacagttccagttgcaacactggctggccatctgagcctgcctggaggagaaggaggaacccccatgccaatgtccaggtcacaggcatccgctgcgctcccacctcggacaccatcttgggattcctcccctggaagttgtcctttctgatcctctcttcttttcccatttacaaatgatttcgtgactgtagtttttgttcaccttctgtgcatctggcctgggggctgttagctcagaggagaggagcaaacaggaaaatgacttctgttctgtccccgctgttttgggggaagtctctcccactttgggatcctgctgaagctaggttcatgaggtcggaaatccccaccacatttgcctagactttgggcacaggagttcttagtccaccaaatcagagagaggatgggcttttgatcagatacccctcccaaaaaaaaaaaaaactaaaactaaagcaaaaatcaaacaaaatctggctgagtttagtggggtggttggggaaggtacatagaccctcctcttgcccaccctagacagccctctcatgtctgaacctcagcctgggagttagatttatttgtctctaaaatgaagtcagtggatagatgctttgagggattttgagtagaaacattcatagttaattttcactctggccaatctgagtttgatgtgtgtgttctggaacattcctccagcttttggtggtcagatggcccagagatatgggggacaggaggaagagggtaaatgaaccacagtgagcaggttctaggaggtacctgcatcagacaagctggtggaggccacgtggcaagccacatctactgaggcctcatgctgctcttgctctgtaagacacggagcccagaaacccatctgcacttcctgagacctgcctggggaaacgggggcagggaccaagtgaggcctcatgtgtgtcttcaccgtgctgtcctcacaaggccaggtgggtgcccaaagggagcctgacaggctgttgtgttaatttattgttcttgcacacctgcacagcctccctctggggatcccacctggagtggaccaggggtcttgagaaatggagagttggctgcaaaaactctcatgcactagatgtggcaccttggagggcagggtgagacaagcagcccagaaatactctctcaagtggaggggagaattttgagagtggatggaacagtttggtggtttcagagaatttctaggtttctacttggatctacttctgatacaaacttgcacttggtgccctctggtggtgtttagttttagttccgtaagagaaatgattcctagtttgctaaattggtggcatctttgggaggggtttctgtttatggttagagtctcttacacccttgttggagggattcttattctgactgtgggagctcctgttgcgggatcttgggaaaaaataaagaagccgctgcattcgcacgtcaa

SEQ ID NO: 316412 - DNA, 1308 bp, Artificial Sequence
  derived and/or modified sequence
atgagaagaagcgcctacagaatcagagaccagatctgggacgtgtactacagactgaacatcagagacgccatcagcttcgtggaccagggcggccacgtgctgagcagcaccggcctgaccctgcccagcatgcccagcagaaacagcgtggccgagaccagcgtgaccaacctgctgagagagagcggcagcggcgcctgcctggacctgcaggtgatcgacaccgtgagaagcggcagagacagagaggacgccgtgatgcaccacctgctgtgcggcggcctgtacaagcccagaagaagaatcgagctgagaaccgagccctgcggcatgctgctgaagaccttcctgcagaccgacatggaccaggccttcctgggcaccaagcccgccgccgtggccaccagcagccagagaatgagaagaagcggcagaaccagaagaagcagcagcagaatgaagagaagactggagagcttcaagagcaccaagcacaacatctgcttcaccaagagcaagcccagacccagaaagaccggcagaagaaagaaggacggcgtggccaacgccgaggccaccaacggcaagcacagaggcctgggcttccaggacaccgccgccgtgatcctgaccgtggagagcgaggaggaggaggaggagagcgacagcagcgagaccgagaaggaggacgacgagggcatcatcttcgtggccagagccaccagcgaggtgctgcaggagggcaaggtgagcggcagcctggaggtgtgccccagccccagaatcatcccccccagccccacctgcgccgagaaggagctgccctggaagagcggccagggcgacctggccgtgtacgtgagcagcgagaccaccaagatcgtgcccgtggacatgcagaccggctggaaccagagcatcagcagcctggagagcctggccagccccccctgcaaccaggcccccatcctgacctgcctgcccccccaccccagaggcaccgaggagccccaggtgcccctgcacctgcccagcgaccccagaagcagcttcgccttcccccccagcctggccaaggccggcctggccgtgagagccgccctgaccagccccagcagcagaagctgcagccccagctgggccaccagaaccacccccatcagcgcccaggcccccctgccccccaccggcgccagcagcagcaccgaggccgccggctgcagcagcagacccagaggcggcgccggcggcggcatccccgtgggcagcgccccctgggtgatgggcagagccctggagacctag

SEQ ID NO: 316413 - DNA, 1308 bp, Artificial Sequence
  derived and/or modified sequence
atgcgaaggtccgcctatcgtatccgggatcagatctgggatgtctattaccgtctgaacatcagggatgctatctcatttgtggatcagggcggacatgtcttgagctccacaggcctgacgctgccatccatgccaagccgcaacagcgtagctgagacctctgtcacaaatctgctgagggaaagcggctccggtgcctgcttggaccttcaggtgattgacacagtgaggtctggcagggaccgagaggatgccgttatgcaccacctgctgtgtggaggcttatataaacctaggcgacggatcgaactccgcacggagccttgcggcatgcttctcaagacgtttcttcagaccgatatggatcaggccttcctgggcaccaaaccagctgccgtggccaccagctctcagcggatgagacggtccgggcgtacgcgacgcagtagtagccgtatgaagcggagactggaaagctttaaatccaccaagcataatatatgctttaccaaatccaagccacgaccacggaaaactggacggcggaagaaagacggggtggcaaacgccgaggcaactaatggcaagcaccggggactgggatttcaggatactgctgccgtgatcctgacagtggaaagtgaggaggaagaagaggaaagtgatagctctgaaacagaaaaggaggatgatgagggcattatctttgtggcgcgcgccaccagcgaggtgctccaggaagggaaagtatcgggatccttggaggtgtgtccatcaccacgcattatccctccctctcctacttgcgctgagaaggagctcccatggaagtcgggacagggcgacctggcagtgtacgtctccagcgaaacgacaaagatcgttccggtggacatgcagaccgggtggaatcaaagcatttcaagcctagagtctttagcttctcctccttgtaaccaagccccaatcttaacatgcctgcccccccacccccgcggcaccgaagagccccaggtaccgcttcacttgccttcagatcctcggagtagcttcgcatttcctcccagtttggccaaagctggcttggcagtaagagcagccttgacttctcctagcagtcggtcctgttctcccagctgggctacaaggaccacccccattagtgctcaggctcccctaccacctacgggagcgtcgtcttcgacagaggctgctggctgctcttcccgccctaggggaggggccggagggggcatccccgtcggctcagccccatgggtgatgggacgagcattagagacttag

SEQ ID NO: 316414 - DNA, 1308 bp, Artificial Sequence
  derived and/or modified sequence
atgagaagaagtgcctaccgcatccgggaccagatctgggatgtgtactaccgcctgaacatcagagatgccatcagctttgtggaccagggcggccacgtgctgagcagcacaggcctgaccctgcccagcatgcccagcaggaacagcgtggccgagacctctgtgaccaacctgctgcgggagagcggcagcggggcctgcctggacctgcaggtgattgacacagtgcgcagcggccgggaccgggaggatgctgtgatgcaccacctgctgtgtggcggcctgtacaagcccaggagaagaattgagctgaggacagagccctgtggcatgctgctgaagaccttcctgcagacagacatggaccaggccttcctgggcaccaagccagctgctgtggccaccagcagccagaggatgaggaggagcggccgcacccggcgcagcagcagcaggatgaagaggcggctggagagcttcaagagcaccaagcacaacatctgcttcaccaagagcaagccccggcccaggaagacaggccgcaggaagaaggatggagtggccaatgctgaggccaccaacgggaagcaccggggcctgggcttccaggacacagctgctgtgatcctgactgtggagagcgaggaggaggaggaggagagtgacagcagcgagacagagaaggaggatgatgagggcatcatctttgtggcccgggccaccagcgaggtgctgcaggagggcaaggtgtctggcagcctggaggtgtgccccagcccccgcatcatcccccccagccccacctgtgccgagaaggagctgccctggaagagcggccagggcgacctggccgtgtatgtgagcagcgagaccaccaagatcgtgcctgtggacatgcagacaggctggaaccagagcatcagcagcctggagagcctggccagccccccctgcaaccaggcccccatcctgacctgcctgcccccccacccccggggcacagaggagccccaggtgcccctgcacctgcccagcgaccccaggagcagctttgccttcccccccagcctggccaaggccggcctggccgtgcgggccgccctgaccagccccagcagccgcagctgcagccccagctgggccaccaggaccacccccatcagcgcccaggcccccctgcccccaactggagccagcagcagcacagaagctgctggctgcagcagccggccccggggcggggccggcggcggcatccctgtgggcagcgccccctgggtgatgggccgggccctggagacctag

SEQ ID NO: 316415 - DNA, 1308 bp, Artificial Sequence
  derived and/or modified sequence
atgcggcggagcgcctaccggatccgggaccagatctgggacgtgtattatcgtttgaacattcgcgatgccatcagctttgtggaccagggtggccatgtgctgagtagtacaggacttacccttccatccatgccgtccagaaatagcgtggccgaaacaagtgtcacaaacctgttacgagaaagcggatccggggcttgcctggacctgcaagttatcgataccgttcgatcgggaagagatagagaggacgctgtgatgcatcacctgctctgcggcggcttgtacaaacctcgccgtcgcatagagctgaggaccgagccttgcggcatgttattgaaaacctttctgcagacagacatggaccaggctttcctgggcaccaagccagctgccgttgccacaagcagccagaggatgcggagatctggtaggacaaggcgcagttcctcccgcatgaaaagaagacttgagagcttcaaatcaactaaacacaatatttgctttaccaagagtaagcccaggcctaggaagactggacgcaggaaaaaggacggcgtggctaatgccgaagcgactaacggaaaacatcgcggtctcggatttcaggacaccgctgcagtcattctaactgttgagagcgaggaggaagaagaggagtctgacagcagtgaaacggaaaaggaagacgatgaaggcataatctttgtagctcgtgctacatctgaagtgctgcaagagggaaaggttagcggtagtctcgaagtctgtcctagccctcgcattatccctccaagccctacctgtgccgagaaagagctaccctggaagtcggggcaaggcgatttggcagtgtatgttagtagtgagactacgaagattgtgccagtggacatgcaaacgggctggaatcagtcaatatcttcattggagtccctcgctagccctccctgcaaccaggccccaattttgacctgcctgcctcctcatccaagaggcactgaagagccccaggtacctctgcatcttccaagtgaccctcgctccagcttcgcatttccccccagcctcgccaaggctgggctcgccgtccgtgccgctctaacgtcccctagcagtcgaagttgtagccccagctgggctacccgaaccacacccattagtgcccaggcccctctgcctcccacgggagcctcctcgtccaccgaagcagctgggtgttcctctcgccccagagggggggcaggaggtggtattcctgttggatccgcaccctgggtaatgggtagggccctagaaacatag

SEQ ID NO: 316416 - DNA, 1308 bp, Artificial Sequence
  derived and/or modified sequence
atgcgtaggtcagcctaccgtattagagatcagatctgggacgtctactaccgtctgaacatcagggacgccataagcttcgtcgatcaaggagggcacgtgctctcctctactggcctgaccctgcccagcatgcctagcagaaactctgtggcagaaaccagcgtgaccaacctgcttagggagagtggcagcggagcttgtctagacctgcaagtaatagacaccgtacgctcagggcgagatcgcgaagacgccgtgatgcaccacttactgtgtggtggattgtataaacctagacgaaggattgagctcaggacagaaccatgcggcatgctactgaaaaccttcctacagacagacatggatcaggccttcctggggacgaagcctgctgctgtggccacatctagtcagcgcatgcgcagaagtggtaggactcggagatcgtcttcacggatgaaaaggcgtctcgagtctttcaagagtacaaaacataacatttgttttactaagtctaagccacgccctcgaaaaaccggaaggcgcaagaaggacggggtggctaatgccgaagccacgaacggcaaacaccggggtctgggcttccaggatactgccgctgttattctcacagtagaatccgaagaggaggaagaagagagcgacagcagtgagactgagaaagaagatgatgagggcattatttttgtggcccgagcaacgtctgaagtgctgcaggagggaaaggtttccgggagcttagaggtgtgtccaagccccaggataattccaccaagccccacatgcgccgagaaggaattaccctggaaatccggacaaggagacctggcagtgtacgtgagtagcgaaacaacaaaaatagtgccagtggacatgcagaccggctggaatcagtctatttcttcacttgagagccttgcaagcccaccttgtaatcaggctcctattctcacctgcctccccccacaccctcgaggaaccgaggagccccaagtgcccctgcatttaccatccgacccgcgaagctctttcgcgttcccaccctcactggcgaaagcagggctggccgtgcgggcagctctgacttctcctagtagtcgatcttgtagtccttcttgggcaaccaggaccacacccataagcgcacaggctcctctgcccccaactggagcttcctctagtaccgaggctgccggatgttcgagccggccaagagggggtgcgggagggggaattcctgtcggttcagccccatgggtgatgggtcgagctctggaaacttag

SEQ ID NO: 316417 - protein, 127 aa, Artificial Sequence
  derived and/or modified sequence
MEWRKVSECNSVEPCREVKKWPYRCIHHGKNFSRMTNAVLHEVKREGLPVEQRNEILTAILASLTARQNLRREWHARCQSRIARTLPADQKPECRPYWEKDDASMPLPFDLTDIVSELRGQLLEAKP

SEQ ID NO: 316418 - DNA, 2799 bp, Artificial Sequence
  derived and/or modified sequence
gaacaaaggaatgaaatcttgactgccatccttgcctcgctcactgcacgccagaacctgaggagagaatggcatgccagggcagagaggagtgttggtgccagtcacgaattgcccgaacattacctgctgatcagaagccagaatgtcggccatactgggaaaaggatgatgcttcgatgcctctgccgtttgacctcacagacatcgtttcagaactcagaggtcagcttctggaagcaaaaccctagaaggagcacaagtctcaggcggaggagaaaaagagatcggcttttctcctccaacgttgtcatgggcttaagcaagagcagtggagacttctcttggcccctagattgtagcacccgggtcccaatccaaaacagctaggaaatggtgcccatgaagttttaaatgttttaaaatgaccctgtgttatagtctgatttggtgttaaacaggaccttcttcccccaaaattgttcagattataaaatgtgagccattcagcccccaaggtccagggcaggcgacaggaacgagcccagcgtgtgacaaagcctaacctactttcctctttcccaagctttttcagagactctggagtggacccagccctctggggaaagacagaacttagagacatcccagttactcaccacacccatagtgctgtccaatatggtagccactagctagctgtggctacttcaatttaaattcagttttaattttaattaaaaatgcagctcttcagtcgccctggccacatttcaagtgcttaacagcctcatgtggctagtgactgctgtattggacggtacagatatggaacattttcatcatcgaagaaagtcctattggacaacacttctataaaaagtttgagagcaggaattctcatttccattcgtctgtagcttctatccccaaaggcaaagaaactaaaagagaaatgactcattgaagattggcctctttcctttctctaagacaaacctaagtaaaagcctgagctttgagtcctatgctcagcacacgggaaggagatgttaataattaaaataaagttgatatcctgtctttagggagttcccttgatctcttgaaagagacacagccccatttacattatttcgtggatttcaccagcatagtatagtttttttctgtaagtccctcattcttatgtaataacaggtggaactgaggtttgaagaacctcagtggcccatcctgatgacattggagactcaaagagacaagagagagtagggtttaaaacctgagctttaagactcccactagcttcgtgtcctttggcatgttaacgtgcctcagtttcctcatctgtataatggggatatatgaaaggcaccagtcctaaggtgaacattaagtgagatgattctagttacagacttagaacaatttccagcacatagttaaatatccaggaaattctggtactgttatgtgtgggtgagctgacctggatgtagatgttttcctctctcttgctgacccctccgccagttttgtcttgtgatgccattaacacatctctccctttctgacctggctcctgcccattggtgtcccaagaaatcgtgagaatagttagccccccgtctccccagcctgttgctttctcgtgtagttgttcacagtagttgagaagttgaagagcttttgcctattgaaggtgcactgagaataaactctttcctgccaccagaattgcagtggttcacggcctgcactcattcccatgaatgcagttaatagccacagaaatgtcacattaagcaaagcagccagggtctcatcgtgttgagactcgagtctctcagaccttggattcattccctggtgtctttgagcctcagtttcctcattggtaaaagagaagtgaagcagtgtctcacagggtcattacagagattaaatgaaataaatgaaataacatagaccaggagggcgtggtgtttaaaagtcacagatggggcaccctcgggccatccagcccagtgttttctttagcccctatgatgttcattttttgttatatcccattaggtgcccatatttaaaaattgggagatttcacataaaattaaaaggtctgcattttcttttttcttttctttttttttttttttgagacacagtctcactctgtcaccaggctagagtgcagtggcacgatctcagctcactgcaacctctgcctcccaggttcaagtaattctcctgcctcagcctcccaagtagctgggactacaggcacgtgccaccacgcccagctaatttttgtatttttagcagagatggggtttcaccacattggccaggatggtctcgatctcaacctcgtgatccacccacctcggtctcccaaagcgctgggattacaggcgtgagccaccgcgccaagccaaggtctgcatttttctttagaactcagaacacccaatagtcctaggcccccatcctcgcatggcagcaagctaaataagcatcttcccactgcgagttggggcatgacccagcctatggtttgccatactccctctttttctccgttttttcattaattgtgaacctgacctgcatcaccctttcatgtcagtgctctccaaacctgcttgcttgcacccctctagtcgaaatattttgtgcttaccccaatatatgtgtgtgactattgaactctattcgtagactgcttgtactaatgtcatttgcatcataaaatattcatatccaataaacatattaaaaggatgagataagaaa

SEQ ID NO: 316419 - DNA, 1537 bp, Artificial Sequence
  derived and/or modified sequence
cccgggatgttagaggcgctcagggtggcagcagagcagacgccgggctgcgcgctgggagctgcggtctccggccatggcccccgctccgccccccgccgcctccttctcgccctccgaggtccagcggcgcctggcggccggcgcgtgctgggtccgccgcggggcccgcctctacgacctctccagcttcgtgcggcaccacccggggggcgagcagctgctgcgggccagggcgggccaggacatcagcgccgacctggacgggccgccgcacaggcactcggccaacgcgcgccgctggctggagcagtactacgtgggagagctccgcggggagcagcagggctccatggagaacgagcctgtagcccttgaggaaactcagaagacagatcctgctatggaaccacggttcaaagtggtggattgggacaagagtacacggtggcagtgcccaagtccatgttccccgggctcttcatgctggggacattcctctggagcctcatcgagtacctcatccaccgcttcctgttccacatgaagccccccagcgacagctattacctcatcatgctgcacttcgtcatgcacggccagcaccacaaggcacccttcgacggctcccgcctggtcttcccccctgtgccagcctccctggtgatcggcgtcttctacttgtgcatgcagctcatcctgcccgaggcagtagggggcactgtgtttgcggggggcctcctgggctacgtcctctatgacatgacccattactacctgcactttggctcgccgcacaagggctcctacctgtacagcctgaaggcccaccacgtcaagcaccactttgcacatcagaagtcaggatttggtatcagcactaaattgtgggattactgtttccacaccctcactccagagaaaccccacctgaagacgcagtgacaactcccaccccctccgtcctgccctcagcccggccctggccccttcccgacccccacccgccattcagaccccattaagaaggttggcttggccaggcaggatgggctgtgtccggccctgcagcctagtggaaggtgctgagggggccctgaggcaggaccgccctcctgacccctggtaggagggtcacatccacttggtggccaggtggcccttggtgacccacttcttcctggagcgtccctgcctagagctcagcccacaggactgcttcaggccgtggccacaggtagcagccgcaaggggaaatgaagaaaactgagccctcgtggccacctgtgtcacccttgtgccttagcctcatgggctgcctaggagctgcctgcacggcacagctcgctttcacagtcagaagtgggtctgtgggatctgtggtccctgtcctccctgctgtcccttctggggaggctttggtggctctgaggtggacaaagagctctcgcaagaagagacagcgtgatgcctcccacagtccaccccagaccctggggcagcccctctggccctgccagctgcctgcgtcgttggg

SEQ ID NO: 316420 - DNA, 480 bp, Artificial Sequence
  derived and/or modified sequence
atgtttcccggactgtttatgcttggcacttttctatggagcttaattgagtacctgatccaccgcttcctgtttcacatgaaacctccaagcgacagctattacctgatcatgctgcacttcgtcatgcatggacagcatcataaggcaccctttgacggttcaaggcttgtgtttcctccggtgcccgcatctctggtgattggcgtgttttacttgtgtatgcaattgattctgcccgaagccgtgggaggtacagtcttcgctggcggcctcctgggttatgttctatacgatatgacccactactatctccactttggatcccctcacaagggatcttacctttattcactgaaggctcatcatgtgaagcaccacttcgcccatcagaagagcggctttggcatatcaactaaattgtgggactactgcttccacaccttgacccccgagaagccacatctcaaaacacagtag

SEQ ID NO: 316421 - DNA, 480 bp, Artificial Sequence
  derived and/or modified sequence
atgtttcctggcctcttcatgctgggcaccttcctgtggagcctcatcgagtacctgatccaccgcttcctgttccacatgaagcccccaagtgacagctactacctgatcatgctgcactttgtgatgcacggccagcaccacaaggccccctttgatggcagccggctggtgttcccccctgtgcctgccagcctggtgattggagtcttctacctgtgcatgcagctgatcctgcctgaggccgtgggcggcaccgtgtttgctgggggcctgctgggctacgtgctgtatgacatgacccactactacctgcacttcggcagcccccacaagggcagctacctgtacagcctgaaggcccaccacgtgaagcaccactttgcccaccagaagagcggcttcggcatcagcaccaagctgtgggactactgcttccacaccctgaccccagagaagccccacctgaagacccagtag

SEQ ID NO: 316422 - DNA, 480 bp, Artificial Sequence
  derived and/or modified sequence
atgttccccggcctgttcatgctgggcaccttcctgtggagcctgatcgagtatctgattcataggtttcttttccacatgaaaccgccaagcgactcctactacctgataatgctccacttcgtgatgcatggccagcatcataaagcgccattcgatgggtcacgtctagtcttccctcctgttccagcctcactcgttatcggcgtattttacttatgtatgcaactgattctgcccgaggcagtaggtggcacggtattcgcaggcggcctcctgggatatgtcctgtacgacatgacccactattatctacactttggtagtccgcataagggctcctacctgtacagtctgaaggcacaccacgtgaaacaccactttgctcaccagaagagcggctttggtatttctacaaaactctgggattattgcttccacaccctgaccccagaaaagccacacctcaaaactcagtag

SEQ ID NO: 316423 - DNA, 480 bp, Artificial Sequence
  derived and/or modified sequence
atgttccctgggctgtttatgttgggaaccttcctgtggtcgctcatcgaatatctgatacataggttcttgttccatatgaagcctccatccgattcttattacctgattatgctccattttgtgatgcacgggcagcaccacaaagcccctttcgatggtagcagattggtctttcccccagtcccggcttccttggtgatcggcgttttttatttatgcatgcagttaatactccctgaagcagtgggtggtaccgtgtttgcgggaggactgcttgggtatgttctgtatgatatgacccactactatcttcacttcggctctcctcacaagggcagctacctgtacagcctgaaagctcaccacgtgaagcatcactttgcgcaccaaaagagcggcttcggcatttctaccaagctgtgggattattgttttcacacattgacaccagaaaagccacaccttaaaactcagtag

SEQ ID NO: 316424 - DNA, 480 bp, Artificial Sequence
  derived and/or modified sequence
atgttccccggcctgttcatgctgggcaccttcctgtggagcctgatcgagtacctgatccacagattcctgttccacatgaagccccccagcgacagctactacctgatcatgctgcacttcgtgatgcacggccagcaccacaaggcccccttcgacggcagcagactggtgttcccccccgtgcccgccagcctggtgatcggcgtgttctacctgtgcatgcagctgatcctgcccgaggccgtgggcggcaccgtgttcgccggcggcctgctgggctacgtgctgtacgacatgacccactactacctgcacttcggcagcccccacaagggcagctacctgtacagcctgaaggcccaccacgtgaagcaccacttcgcccaccagaagagcggcttcggcatcagcaccaagctgtgggactactgcttccacaccctgacccccgagaagccccacctgaagacccagtag

SEQ ID NO: 316425 - DNA, 642 bp, Artificial Sequence
  derived and/or modified sequence
atgagccctctgccccgacagcgttttccggtgccagatagtgttctgaacatgtttccggggacggaggagggccccgaggatgattctaccaagcatggaggccgtgtgagaacatttcctcacgagaggggtaactgggccacccacgtgtacgtgccgtatgaggctaaggaggagttcctcgacttactggacgtgctccttccccacgcacagagtgtggtcctgcgccaccattggattcttccattcgtgcaggctttaaaagcacgtatgacttccttccacagattcttctttaccgcgaaccaggttaaaatctataccaaccaggaaaagacacggacttttattggactagaggtgacctctggacacgcgcagtttctggaccttgttagcgaggtagaccgcgtcatggaggaattcaacctcacaaccttttatcaggacccctccttccacttgagtcttgcatggtgtgtcggcgatgccagactccagctggagggccagtgcctgcaggagttacaggcgatagtggacggcttcgaggatgctgaagtgctgctgcgtgtccatacagagcaggtgcgctgcaagagtggtaacaagtttttctccatgcccctgaaatag

SEQ ID NO: 316426 - DNA, 642 bp, Artificial Sequence
  derived and/or modified sequence
atgagccccctgccccggcagcgcttccctgtgcctgacagcgtgctgaacatgtttcctggaacagaggagggcccagaagatgacagcaccaagcatggaggccgggtgaggaccttcccccatgagcggggcaactgggccacccacgtgtatgtgccctatgaggccaaggaggagttcctggacctgctggatgtgctgctgccccacgcccagagcgtggtgctgcggcaccactggatcctgccctttgtgcaggccctgaaggccaggatgaccagcttccaccgcttcttcttcaccgccaaccaggtgaagatctacaccaaccaggagaagaccaggaccttcatcggcctggaggtgaccagcggccacgcccagttcctggacctggtgtctgaggtggacagagtgatggaggagttcaacctgaccaccttctaccaggaccccagcttccacctgagcctggcctggtgtgtgggagatgcccggctgcagctggagggccagtgcctgcaggagctgcaggccatcgtggatggctttgaagatgctgaggtgctgctgcgggtgcacacagagcaggtgcgctgcaagagcggcaacaagttcttctccatgcccctgaagtag

SEQ ID NO: 316427 - DNA, 642 bp, Artificial Sequence
  derived and/or modified sequence
atgagccccctgccccggcagcggttccccgtgcccgacagcgtgctgaacatgtttccagggactgaggagggaccagaggacgactcaacaaagcacggaggtagagtgcgcacatttccacacgaacgtggaaactgggcaacacatgtctatgttccgtacgaggccaaagaggagttcctggacttattggatgtcctgctgccacatgcccaatcagtcgtgctccgtcaccactggatcctgcctttcgtgcaggctttgaaggccaggatgaccagcttccacaggtttttcttcactgccaaccaggttaagatctatacaaaccaagaaaagacgcgtaccttcatcgggctggaggtgacaagcggacacgcccagttcctggacctggtgagtgaggtggatagggttatggaggagtttaatttgaccacattttaccaggatcctagtttccacctatcccttgcatggtgcgtgggcgatgcccgactgcagctggagggccagtgccttcaggaattacaggctattgttgacggtttcgaagatgcagaggtgttgctgagggtacatactgagcaggtaaggtgcaagtccggaaacaagttcttcagcatgcccctcaagtag

SEQ ID NO: 316428 - DNA, 642 bp, Artificial Sequence
  derived and/or modified sequence
atgtctcccctgcccaggcagaggttcccggtgcccgattctgttctgaatatgtttccgggaactgaagaggggcctgaggatgacagtacaaaacacggcggaagggtcagaacctttccacatgaaaggggtaattgggccacccatgtttatgtgccatacgaagcgaaggaagagtttttagacctattggatgtgcttctgcctcatgcacaaagcgtcgtgttaagacatcactggatcttgccatttgtgcaggcattgaaggctcggatgacgagcttccaccggtttttcttcactgcaaatcaagttaagatctacaccaatcaggaaaagaccagaacctttatagggctagaggtcacctcgggccacgcgcagtttctcgatttggttagcgaagtggatagggtgatggaggagttcaatctgactaccttttaccaggacccaagtttccatctctcgctcgcgtggtgtgtgggggacgccaggctgcaactcgaggggcagtgcctgcaagagctccaggcaatcgttgatgggtttgaggatgcagaggtcctccttcgggtccacacagaacaggttagatgtaaaagtggcaacaagttcttttctatgcccctgaagtag

SEQ ID NO: 316429 - DNA, 976 bp, Artificial Sequence
  derived and/or modified sequence
acagcggaactccgggtgccggttgaggttgctggtggacctgctctggtggtcttggatgaggccccatgagcgcggcgcccctggtgggctacagcagcagcggctccgaggatgagcccccttcccaggcagagatttccagtacctgacagtgtgctgaacatgttcccgggcaccgaggaggggcctgaagatgacagcacaaaacacgggggacgggtgcgcaccttcccccacgagcgaggcaactgggccacccacgtctatgtaccatatgaagccaaggaggagttcctggatctgcttgatgtgttgctgccccatgcccagagtgtggttctgcgccaccactggatcctccccttcgtgcaggctctgaaagcccgtatgacctccttccacagattcttctttactgccaaccaggtaaagatttacaccaatcaagagaaaaccaggacctttattgggcttgaggtcacttcagggcatgcccagttcctggacctggtttcagaggtggacagagtcatggaggaattcaacctcaccactttctaccaggatccttctttccacctcagcctggcctggtgtgtgggtgatgcacgtctccagctggaggggcagtgcctgcaggaactacaggcaatcgtggatgggtttgaagatgctgaggtgctgctgcgcgtgcacactgagcaagtccgctgcaagtctgggaacaagttcttctcgatgcctttgaagtgagcaccagaggccttcctcctccagggccctctgcagaccaggctgagatggaggaacctgctaaaatcgatggagatgcttctagcctcccagtaggaggccccagccatgccttcaacctggcaggaggtgtagccactcctcatcctccctgagtgctgatattctctctctctctttctcttcctcttctttctctctcttctcctctctttctctc

SEQ ID NO: 316430 - DNA, 642 bp, Artificial Sequence
  derived and/or modified sequence
atgagccccctgcccagacagagattccccgtgcccgacagcgtgctgaacatgttccccggcaccgaggagggccccgaggacgacagcaccaagcacggcggcagagtgagaaccttcccccacgagagaggcaactgggccacccacgtgtacgtgccctacgaggccaaggaggagttcctggacctgctggacgtgctgctgccccacgcccagagcgtggtgctgagacaccactggatcctgcccttcgtgcaggccctgaaggccagaatgaccagcttccacagattcttcttcaccgccaaccaggtgaagatctacaccaaccaggagaagaccagaaccttcatcggcctggaggtgaccagcggccacgcccagttcctggacctggtgagcgaggtggacagagtgatggaggagttcaacctgaccaccttctaccaggaccccagcttccacctgagcctggcctggtgcgtgggcgacgccagactgcagctggagggccagtgcctgcaggagctgcaggccatcgtggacggcttcgaggacgccgaggtgctgctgagagtgcacaccgagcaggtgagatgcaagagcggcaacaagttcttcagcatgcccctgaagtag

SEQ ID NO: 316431 - DNA, 1761 bp, Artificial Sequence
  derived and/or modified sequence
atggcactgacatcccccttacaggacgacagtattaatcaggctccactagagattgtgagcaaactcctatccgagaacacaaacttgaccacccaggaacacgaaaacattatagtggccattgctcccctcctggagaataaccacccacccccagacctatgtgagtttttctgcaagcactgtcgggaaagaccacgttcaatggttgttatcgaggtttttactcccgttgtccaacgcatactgaagcacaatatggactttggcaaatgtccacgtctcaggctcttcacccaggaatacattctggcactgaacgaactgaacgcggggatggaggtggtgaagaagtttatccagagcatgcatggccctaccggccattgcccacatcctagggtattacctaacttagtagctgtgtgcttggcggccatatatagctgttatgaggaatttataaactcccgtgacaatagtccatccttaaaggagatccggaatggatgtcagcagccttgtgatcggaaacccactctgccgctccgcctgctccatcctagccctgacctggttagtcaagaggccaccttgtctgaggctagacttaaatccgtggttgtggcctcttctgaaattcacgtcgaagtggaacgcacctcaactgcaaaaccagcattgactgccagcgcgggaaacgactctgaacccaacttgattgactgtctcatggtgtcccccgcttgctcaactatgtctatagagctgggcccacaggccgatagaactttaggctgttacgtcgagatactgaagctgctgtctgactacgacgactggagaccgtcactggccagccttctgcagccaattccctttccaaaggaggcattggctcatgagaagtttaccaaagaactaaagtatgtgattcagcgcttcgcagaggatcccaggcaggaggtccacagttgcctgctaagcgttagggcaggcaaagatgggtggttccagctctactctccgggtggggttgcttgtgacgacgatggcgagctgttcgcaagtatggtgcacatactgatggggtcctgctacaaaacaaaaaagttcctgcttagcctcgcagaaaacaaacttggtccctgcatgttgctggcgctgaggggcaatcagaccatggttgagatcctgtgtttaatgctggagtacaacataatcgataacaacgacacccaactgcagatcattagtactttagaaagcactgatgttggcaagagaatgtatgagcaactttgcgataggcagagggagctcaaagaattacagcgcaaaggagggccaacccggctgactctgcccagcaaaagcacagatgccgatcttgcccgcctgctgtcctccgggagtttcggtaacctggaaaatctgtccttggcgttcactaacgtgaccagtgcctgtgccgagcatctgatcaaactaccatccttgaaacaattgaatctgtggtccactcaatttggtgatgccggactccggttactttctgagcatctgaccatgctgcaggtgcttaatctttgcgagaccccagtaaccgatgctgggctcctcgccctgtcaagtatgaaatccttatgttcactgaacatgaatagcacaaagctcagcgccgacacttatgaggacctaaaggctaaattgcctaatctgaaagaagtggacgtcaggtataccgaagcctggtag

SEQ ID NO: 316432 - DNA, 1761 bp, Artificial Sequence
  derived and/or modified sequence
atggccctgaccagccccctgcaggatgacagcatcaaccaggcccccctggagatcgtgtccaagctgctgtctgagaacaccaacctgaccacccaggagcacgagaacatcatcgtggccatcgcccccctgctggagaacaaccaccccccaccagacctgtgtgagttcttctgcaagcactgccgggagcggcccaggtccatggtggtgattgaggtgttcacccctgtggtgcagaggatcctgaagcacaacatggactttgggaagtgcccccggctgcggctcttcacccaggagtacatcctggccctgaatgagctgaatgccggcatggaggtggtgaagaagttcatccagagcatgcacggccccaccggccactgcccccacccccgggtgctgcccaacctggtggccgtgtgcctggccgccatctacagctgctatgaggagttcatcaacagccgggacaacagccccagcctgaaggagatcagaaatggctgccagcagccctgtgacaggaagcccaccctgcccctgcggctgctgcaccccagcccagacctggtgtcccaggaggccaccctgtctgaggcccggctgaagtctgtggtggtggccagcagcgagatccacgtggaggtggagaggaccagcacagccaagccagccctgacagccagcgctggaaatgattctgagcccaacctgattgactgcctgatggtgtccccagcctgcagcaccatgagcattgagctgggcccccaggccgacaggaccctgggctgctacgtggagatcctgaagctgctgagtgactatgatgactggaggcccagcctggccagcctgctgcagcccatccccttccccaaggaggccctggcccacgagaagttcaccaaggagctgaagtatgtgatccagagatttgctgaggacccccggcaggaggtgcacagctgcctgctgtctgtgcgggccggcaaggatggctggttccagctgtacagccctgggggcgtggcctgtgatgatgatggagagctgtttgcctccatggtgcacatcctgatgggcagctgctacaagaccaagaagttcctgctgagcctggccgagaacaagctgggcccctgcatgctgctggccctgcggggcaaccagaccatggtggagatcctgtgcctgatgctggagtacaacatcatcgacaacaatgacacccagctgcagatcatcagcaccctggagagcacagatgtgggcaagaggatgtatgagcagctgtgtgaccggcagcgggagctgaaggagctgcagaggaagggcggccccacccggctgaccctgcccagcaagagcacagatgctgacctggcccggctgctgagcagcggcagctttggaaacctggagaacctgagcctggccttcaccaacgtgaccagcgcctgtgccgagcacctgatcaagctgcccagcctgaagcagctgaacctgtggagcacccagtttggagatgctggcctgcggctgctgtctgagcacctgaccatgctgcaggtgctgaacctgtgtgagacccctgtgacagatgctggcctgctggccctgagctccatgaagagcctgtgcagcctgaacatgaacagcaccaagctgtctgctgacacctatgaggacctgaaggccaagctgcccaacctgaaggaggtggatgtgcgctacacagaggcctggtag

SEQ ID NO: 316433 - DNA, 1761 bp, Artificial Sequence
  derived and/or modified sequence
atggccctgaccagccccctgcaggacgacagcatcaaccaggccccgctggaaatcgtttctaaattgctgtctgagaataccaatctcaccactcaggagcacgaaaacattatcgttgctatagcccctctgctggagaataatcatcctccacctgacctgtgtgaatttttttgtaaacactgccgggagcgccctcggtctatggtggtgatcgaggtgtttaccccagttgttcagcgaattctaaaacacaacatggactttggtaagtgcccccgattacgcctgtttacccaggagtatatcctcgccctcaatgagctgaatgccgggatggaagtagttaagaagtttatccagtctatgcatgggcctaccggacattgtccccatccaagagtgctgcccaatttggtggcagtctgcctagccgccatctactcctgctatgaagaattcatcaattctcgcgataacagcccttccctgaaagagatcaggaacggctgccagcagccctgcgaccgtaaaccaacgcttcctctaagattgctgcatcctagcccggacctagtcagccaggaggcaaccctgagcgaggcaaggttgaagagtgttgtggtagcttcatccgagatccatgtggaggtggagagaacctcaaccgcaaagcctgcactgaccgccagcgctggtaacgacagcgagcccaacttgatcgactgtttgatggtcagccctgcctgtagcaccatgtccattgaactgggaccccaggctgaccggacactgggctgttacgtcgaaattctgaaactgctgtccgactatgacgattggcgcccatctctggcttcactccttcagcccattccctttcccaaggaagcactggcacatgagaaatttaccaaggaactcaagtatgtaattcagaggtttgcagaggacccaagacaagaggtgcatagctgcttactgagtgtgcgggccgggaaggatgggtggtttcagttgtacagcccaggaggggttgcctgcgatgatgacggcgagctgtttgcgtctatggtgcacatcttgatgggctcctgctacaagactaaaaaatttcttctctcccttgcggagaataagttaggaccctgtatgctactggctcttcgggggaaccaaacaatggtggagatcttgtgtttgatgctagaatataacataatcgataacaacgacacccagttgcagattatctcaacactggagtctacagacgtggggaaacgtatgtacgaacagttgtgtgatagacagagagagctgaaagagttacagcgaaaggggggaccgacccggcttacactgccctccaaatctacggatgccgatctggcccggttgctatcttcagggtcctttggcaatctagagaatctgtcactcgctttcacaaacgtgacgtcggcgtgtgctgaacatttaattaaattaccaagtctgaaacagcttaacctgtggtcaacccagtttggcgatgcgggcctgcggcttctgtcagaacacctgacgatgctacaggtgctcaatttgtgcgagactccagtcacagacgcgggattgcttgcactgtcttccatgaagtccctgtgttcactgaatatgaatagcactaaactgtcagccgatacgtacgaggacctgaaggcaaagctgccaaacctgaaggaggtagatgtacgctatacagaagcttggtag

SEQ ID NO: 316434 - DNA, 1761 bp, Artificial Sequence
  derived and/or modified sequence
atggctctgacatctccacttcaggatgactctatcaaccaggcccctctggagattgtatcaaagctgttgagcgagaacaccaatttaaccacgcaagaacatgagaatatcattgtggctatagctcctctcttggaaaacaaccatccacccccagatctgtgtgaattcttctgcaagcactgcagggaacgcccaagatcaatggtcgtcattgaagtgtttactcccgtggttcagcgcatcctaaagcataacatggactttgggaagtgccccaggctgagactcttcacccaagagtacattctggctcttaacgaactcaatgccggaatggaagtggttaagaaatttatacagtctatgcacgggccaacaggccattgccctcacccgagggtcctgccaaacctggtcgccgtgtgtcttgccgcaatctactcctgctatgaggagtttattaacagtagggataactcaccgtccctgaaagagatccgtaatggctgtcagcagccctgcgatcggaagccaactttacccctccggctgctgcaccccagccccgatctcgtgtcacaggaggcaaccctttcggaagcaaggctcaaaagtgtagtcgtggctagctctgagatccatgttgaggttgagcggacgagcaccgccaaacctgcgctgacagcaagcgcgggtaatgactcagaacctaacttaatagattgtttgatggttagcccagcttgctcaactatgagcatcgaactcggaccccaggctgatcgcacgctcggctgctacgtcgaaatcctgaagcttttaagcgattatgacgactggcggccaagtctcgctagcctgctgcaaccaattccattccctaaggaggcgctagcgcatgaaaaattcaccaaggaactcaaatacgtgattcaacgctttgcagaggacccccgacaggaggtacactcctgtctgttgagcgtcagagctggaaaggacggctggttccagctgtattcccccggtggcgttgcatgtgacgacgacggtgaactattcgcctctatggtgcatattctcatgggatcttgttacaaaactaaaaagttcttactttccctggcggagaataaactgggaccatgtatgctccttgcgcttagaggtaaccagactatggttgaaatactgtgcctcatgctggagtacaatatcattgacaacaatgatacacaacttcagattatcagcacacttgagtctaccgacgtgggcaagaggatgtatgagcagctgtgcgatcggcagcgggagctgaaggaactgcagcgtaaaggcggacccacacgtctgactctcccctcaaaaagtacagatgccgatctggccagactcctctctagtggctcttttggcaatctagaaaatctgtccctcgccttcacaaatgtgacgtccgcatgcgcagagcacctgatcaaactcccctcactgaagcagctgaacctatggagtacacagttcggcgacgccggactccggctcctgagcgaacaccttaccatgttgcaggtcctcaacctttgcgaaacacctgttaccgatgcaggtcttttagccctttcaagcatgaagagcttatgttctttgaacatgaatagcaccaagctgtctgccgacacttatgaggatctgaaggcaaagctgcccaatctaaaagaggttgatgtcaggtatactgaagcttggtag

SEQ ID NO: 316435 - DNA, 1761 bp, Artificial Sequence
  derived and/or modified sequence
atggccctgaccagccccctgcaggacgacagcatcaaccaggcccccctggagatcgtgagcaagctgctgagcgagaacaccaacctgaccacccaggagcacgagaacatcatcgtggccatcgcccccctgctggagaacaaccaccccccccccgacctgtgcgagttcttctgcaagcactgcagagagagacccagaagcatggtggtgatcgaggtgttcacccccgtggtgcagagaatcctgaagcacaacatggacttcggcaagtgccccagactgagactgttcacccaggagtacatcctggccctgaacgagctgaacgccggcatggaggtggtgaagaagttcatccagagcatgcacggccccaccggccactgcccccaccccagagtgctgcccaacctggtggccgtgtgcctggccgccatctacagctgctacgaggagttcatcaacagcagagacaacagccccagcctgaaggagatcagaaacggctgccagcagccctgcgacagaaagcccaccctgcccctgagactgctgcaccccagccccgacctggtgagccaggaggccaccctgagcgaggccagactgaagagcgtggtggtggccagcagcgagatccacgtggaggtggagagaaccagcaccgccaagcccgccctgaccgccagcgccggcaacgacagcgagcccaacctgatcgactgcctgatggtgagccccgcctgcagcaccatgagcatcgagctgggcccccaggccgacagaaccctgggctgctacgtggagatcctgaagctgctgagcgactacgacgactggagacccagcctggccagcctgctgcagcccatccccttccccaaggaggccctggcccacgagaagttcaccaaggagctgaagtacgtgatccagagattcgccgaggaccccagacaggaggtgcacagctgcctgctgagcgtgagagccggcaaggacggctggttccagctgtacagccccggcggcgtggcctgcgacgacgacggcgagctgttcgccagcatggtgcacatcctgatgggcagctgctacaagaccaagaagttcctgctgagcctggccgagaacaagctgggcccctgcatgctgctggccctgagaggcaaccagaccatggtggagatcctgtgcctgatgctggagtacaacatcatcgacaacaacgacacccagctgcagatcatcagcaccctggagagcaccgacgtgggcaagagaatgtacgagcagctgtgcgacagacagagagagctgaaggagctgcagagaaagggcggccccaccagactgaccctgcccagcaagagcaccgacgccgacctggccagactgctgagcagcggcagcttcggcaacctggagaacctgagcctggccttcaccaacgtgaccagcgcctgcgccgagcacctgatcaagctgcccagcctgaagcagctgaacctgtggagcacccagttcggcgacgccggcctgagactgctgagcgagcacctgaccatgctgcaggtgctgaacctgtgcgagacccccgtgaccgacgccggcctgctggccctgagcagcatgaagagcctgtgcagcctgaacatgaacagcaccaagctgagcgccgacacctacgaggacctgaaggccaagctgcccaacctgaaggaggtggacgtgagatacaccgaggcctggtag

SEQ ID NO: 316436 - DNA, 282 bp, Artificial Sequence
  derived and/or modified sequence
gtgtgactttatcctggaggcagtgggatgctgatagcaagttcagacaggcatgaggccagaccagagctgagttttcaagataactccagccagaggagtctgcactatggaaacaacctgtcaatccagctcaaggcacacatagcccagacacccatgagaccctctccgtggggaccctagagcacctatcatgaacgaggagaccaaggctggctcctcatggaccccgttggcctccagctcggcaacaagaacctgtggagctgtcttgtgagg

SEQ ID NO: 316437 - DNA, 594 bp, Artificial Sequence
  derived and/or modified sequence
acagatgaggacgctgaggtacgaagaggctgcgtaacctaccagggtcacacagctttggtgtggagtagggactcaaatccagggccctggtacggaggcatttgccctcaccaagattcaggcactgagagaagctgacgggcctagagaatggcaagacttgagatagcagaaggaaggagagagggtgagaaatggatccccgtgctgaggtctggtctggaaggagaagtctgcaaggagtctgcactatggaaacaacctgtcaatccagctcaaggcacacatagcccagacacccatgagaccctctccgtggggaccctagagcacctatcatgaacgaggagaccaaggctggctcctcatggaccccgttggcctccagctcggcaacaagaacctgtggagctgtcttgtgaggctgctcaccaaagacccagaatggctgaacgccaagatgaagttcttcctccccaacacggacctggattccaggaacgagaccttggaccctgaacagagagtcatcctgcaactcaacaagctgcatgtccagggttcggacacctggcagtctttcattcattg

SEQ ID NO: 316438 - protein, 312 aa, Artificial Sequence
  derived and/or modified sequence
MAAGQNGHEEWVGSAYLFVESSLDKVVLSDAYAHPQQKVAVYRALQAALAESGGSPDVLQMLKIHRSDPQLIVQLRFCGRQPCGRFLRAYREGALRAALQRSLAAALAQHSVPLQLELRAGAERLDALLADEERCLSCILAQQPDRLRDEELAELEDALRNLKCGSGARGGDGEVASAPLQPPVPSLSEVKPPPPPPPAQTFLFQGQPVVNRPLSLKDQQTFARSVGLKWRKVGRSLQRGCRALRDPALDSLAYEYEREGLYEQAFQLLRRFVQAEGRRATLQRLVEALEENELTSLAEDLLGLTDPNGGLA

SEQ ID NO: 316439 - DNA, 939 bp, Artificial Sequence
  derived and/or modified sequence
atggccgccggccagaacggccacgaggagtgggtgggcagcgcctacctgttcgtggagagcagcctggacaaggtggtgctgagcgacgcctacgcccacccccagcagaaggtggccgtgtacagagccctgcaggccgccctggccgagagcggcggcagccccgacgtgctgcagatgctgaagatccacagaagcgacccccagctgatcgtgcagctgagattctgcggcagacagccctgcggcagattcctgagagcctacagagagggcgccctgagagccgccctgcagagaagcctggccgccgccctggcccagcacagcgtgcccctgcagctggagctgagagccggcgccgagagactggacgccctgctggccgacgaggagagatgcctgagctgcatcctggcccagcagcccgacagactgagagacgaggagctggccgagctggaggacgccctgagaaacctgaagtgcggcagcggcgccagaggcggcgacggcgaggtggccagcgcccccctgcagccccccgtgcccagcctgagcgaggtgaagcccccccccccccccccccccgcccagaccttcctgttccagggccagcccgtggtgaacagacccctgagcctgaaggaccagcagaccttcgccagaagcgtgggcctgaagtggagaaaggtgggcagaagcctgcagagaggctgcagagccctgagagaccccgccctggacagcctggcctacgagtacgagagagagggcctgtacgagcaggccttccagctgctgagaagattcgtgcaggccgagggcagaagagccaccctgcagagactggtggaggccctggaggagaacgagctgaccagcctggccgaggacctgctgggcctgaccgaccccaacggcggcctggcctag

SEQ ID NO: 316440 - DNA, 939 bp, Artificial Sequence
  derived and/or modified sequence
atggctgcgggacagaacggtcatgaggagtgggtgggtagcgcttacctgtttgtcgagagctccttagataaagttgtgctttccgacgcttacgcccatccccagcagaaagtggctgtgtatagagctctgcaggccgccctcgccgaaagcggaggatctcccgatgtgctacagatgctcaagatccatcgtagtgaccctcagttgattgtccagttacgcttctgcgggcgccagccatgtggaaggttcttaagggcctaccgagaaggcgccctccgagccgctttgcaaagaagcctggctgccgccttagctcagcactcggtccctctccaattggaattacgcgctggcgctgaacgccttgatgcccttctggctgacgaggaaagatgcctgtcatgcattcttgcacagcagcccgataggcttcgggatgaagaactcgccgagctggaggatgccctgagaaacctaaaatgcgggtccggagcccgcggaggagatggcgaggtggctagcgcccctctgcaacccccagtgccatctttgtctgaggtgaagccacctcccccccctcctccagctcagacgttcctgtttcaggggcagcctgtcgtaaatcggccactgagtttgaaggatcagcagacttttgccaggagtgtgggcctgaaatggaggaaggtgggaaggtctctacagcggggttgtcgggctttgcgggaccctgcactggacagcctcgcttacgaatacgagcgggagggactgtatgaacaggccttccagcttctacgtaggttcgttcaggccgaaggaagacgcgccacacttcagcgcctggtcgaagcacttgaggaaaacgagctcacttctctggccgaggatctactcggtctgaccgatcccaacggtggcctagcttag

SEQ ID NO: 316441 - DNA, 939 bp, Artificial Sequence
  derived and/or modified sequence
atggctgctggccagaatggccacgaggagtgggtgggcagcgcctacctgtttgtggagagcagcctggacaaggtggtgctgagtgatgcctatgcccacccccagcagaaggtggccgtgtaccgggccctgcaggccgccctggccgagagcggcggcagcccagatgtgctgcagatgctgaagatccacagaagtgacccccagctgattgtgcagctgcgcttctgtggccggcagccctgtggccgcttcctgcgggcctaccgggagggcgccctgcgggccgccctgcagaggagcctggccgccgccctggcccagcacagcgtgcccctgcagctggagctgcgggccggggctgagcggctggatgccctgctggctgatgaggagcgctgcctgagctgcatcctggcccagcagcctgaccggctgagagatgaggagctggccgagctggaggatgccctgaggaacctgaagtgtggcagcggggcccggggaggagatggagaggtggccagcgcccccctgcagccccctgtgcccagcctgtctgaggtgaagcccccacctcctcctcctccagcccagaccttcctgttccagggccagcctgtggtgaaccggcccctgagcctgaaggaccagcagacctttgcccggtctgtgggcctgaagtggaggaaggtgggccgcagcctgcagaggggctgccgggccctgcgggaccctgccctggacagcctggcctatgaatatgaaagagagggcctgtatgagcaggccttccagctgctgcggagatttgtgcaggccgagggccggcgggccaccctgcagaggctggtggaggccctggaggagaatgagctgaccagcctggccgaggacctgctgggcctgacagaccccaacggcggcctggcctag

SEQ ID NO: 316442 - DNA, 939 bp, Artificial Sequence
  derived and/or modified sequence
atggccgccggccagaacggccacgaggagtgggtgggcagcgcctatctcttcgttgaaagctcattggacaaagtcgtcctctctgatgcctatgctcatcctcagcaaaaggtggctgtgtaccgggcactacaggcggctctcgccgagagcgggggctccccagacgttctccagatgttgaagattcaccgtagcgatccccagctcattgtccaactgagattttgtggacgccagccctgtggccggtttttacgcgcttacagagagggcgctcttagagctgccctgcagagaagcctcgccgccgccctggcccaacactccgtgcctcttcagctagaactgcgagcaggagctgagaggctggatgcccttcttgcggacgaggagagatgcctgtcctgtatcctggcccaacagcccgacagactgcgagacgaggagctagccgaattagaggacgcgctcagaaacctgaagtgcggttcaggagctcgcgggggggacggcgaggtagcctctgcccctctgcaaccaccagtgcccagcctgagcgaggtcaagccccccccaccgcctccccccgcacagacattccttttccaaggccaacccgttgtgaataggccactgtctctgaaggaccagcagacattcgcacggtcagtgggactcaagtggagaaaggtcggccgctccctccagaggggatgtcgggcactgcgggaccccgccctggacagcttagcatacgagtatgaacgggaaggcctgtacgagcaggcgtttcagcttttgcggcggtttgtgcaagccgagggacggcgggctaccctgcagaggctggtggaggctctcgaggaaaacgagctgacaagcctagccgaggacctcctgggcctgaccgatccaaatggcggtttggcctag

SEQ ID NO: 316443 - DNA, 939 bp, Artificial Sequence
  derived and/or modified sequence
atggcagctggccagaatggccacgaggaatgggtgggctctgcctacctgttcgttgagagctctctcgacaaggtggtcctgtcggatgcgtacgcgcacccccagcagaaagtcgccgtgtacagagctttgcaggccgcactcgccgaatcggggggaagtccagacgttttgcagatgctcaagatccacagatcagatcctcagttgattgtgcagttacgcttctgtgggagacagccatgtgggaggtttttacgcgcatatagagagggggctctgcgagccgcactgcaacggagcttagcagctgccctggctcagcactccgtgccgctgcagttggaacttagagctggtgccgaacggctggatgccttgctcgccgatgaggaacgctgcctgagctgcattttagcccagcagccggatcggttgcgtgatgaggaactcgctgagcttgaggacgctctccgcaacttaaagtgcggaagtggagcaagagggggtgacggagaagtggcgagcgcccctctccagccgcctgtcccatccctctccgaagtcaaacccccacctcctccaccaccagcacagacattcctcttccagggccagcccgtcgttaatcgacctctgtcccttaaggaccagcagacgtttgccaggagtgtgggcttgaagtggagaaaggtagggcgaagtctgcagagaggctgtcgcgcacttcgggatcccgctctcgattccttggcctacgaatatgagagagagggcctttacgagcaagctttccagctgcttagacggtttgtgcaggccgaaggtcgcagggcgactctgcagcgcctcgtggaagctctagaggagaatgaactgacatcacttgccgaggatttgctgggattgaccgacccaaatggagggctcgcctag

SEQ ID NO: 316444 - DNA, 1465 bp, Artificial Sequence
  derived and/or modified sequence
gagcggagcctggcgggcgtgggaacccaggccccgccgaggcggccaggaggtgagatggcagctgggcaaaatgggcacgaagagtgggtgggcagcgcatacctgtttgtggagtcctcgctggacaaggtggtcctgtcggatgcctacgcgcacccccagcagaaggtggcagtgtacagggctctgcaggctgccttggcagagagcggcgggagcccggacgtgctgcagatgctgaagatccaccgcagcgacccgcagctgatcgtgcagctgcgattctgcgggcggcagccctgtggccgcttcctccgcgcctaccgcgagggggcgctgcgcgccgcgctgcagaggagcctggcggccgcgctcgcccagcactcggtgccgctgcaactggagctgcgcgccggcgccgagcggctggacgctttgctggcggacgaggagcgctgtttgagttgcatcctagcccagcagcccgaccggctccgggatgaagaactggctgagctggaggatgcgctgcgaaatctgaagtgcggctcgggggcccggggtggcgacggggaggtcgcttcggcccccttgcagcccccggtgccctctctgtcggaggtgaagccgccgccgccgccgccacctgcccagacttttctgttccagggtcagcctgtagtgaatcggccgctgagcctgaaggaccaacagacgttcgcgcgctctgtgggtctcaaatggcgcaaggtggggcgctcactgcagcgaggctgccgggcgctgcgggacccggcgctggactcgctggcctacgagtacgagcgcgagggactgtacgagcaggccttccagctgctgcggcgcttcgtgcaggccgagggccgccgcgccacgctgcagcgcctggtggaggcactcgaggagaacgagctcaccagcctggcagaggacttgctgggcctgaccgatcccaatggcggcctggcctagaccaggggtgcagccagcttttggagaacctggatggccttagggttccttctgcggctattgctgaacccctgtccatccacgggaccctgaaactccacttggcctatctgctggacctgctggggcagagttgattgccttccccaggagccagaccactgggggtgcatcattggggattctgcctcaggtactttgatagagtgtggggtgggggggacctgctttggagatcagcctcaccttctcccatcccagaagcggggcttacagccagcccttacagtttcactcatgaagcaccttgatctttggtgtcctggacttcatcctgggtgctgcagatactgcagtgaagtaaaacaggaatcaatcttgcctgcccccagctcacactcagcgtgggaccccgaatgttaagcaatgataataaagtataacacggattttgatgtgagaaatacaa

SEQ ID NO: 316445 - DNA, 1338 bp, Artificial Sequence
  derived and/or modified sequence
atggagtttcttcaggaacttaatagtgacgttagtggcagttttgtagaagaaagtcccgaaaacctgcttgacaatgatcccagttttttctgcaggtttacggtggttgtggccacccagctccctgaaagcactagtttgaggctggctgacgtgctctggaatagtcaaatcccccttctcatctgcaggacttacggtctggtgggctatatgcgaatcattatcaaggagcaccctgtgatcgaaagccatccggataacgctctggaagatctgcggctggataagcccttccccgaattgagagaacacttccagtcttatgatctcgaccacatggagaaaaaagatcatagccacacaccctggatcgtgatcatcgccaaatacctggcgcaatggtattctgagacaaatggaaggattccaaagacgtataaagagaaagaggactttcgggacttaatccgccaaggtatcctgaagaatgaaaatggggcccctgaggatgaggagaattttgaggaagctatcaaaaacgttaacacagccttgaataccactcagatcccctcttccatagaggacatctttaatgacgaccggtgtattaatatcacaaagcagaccccatctttttggatcttggcaagggctctcaaagaatttgtggccaaggagggccagggcaacctgccagtgcgtgggaccatcccggacatgattgcagatagtggcaagtacatcaaattacagaatgtgtatcgggaaaaagccaagaaggacgctgctgcggtcgggaaccatgtagctaagttgctccagtccattggacaggcgcccgaatctatctctgagaaggagctaaaactcctatgctcaaattccgcgttcctcagagtagtccgctgtcggagtctcgccgaagaatacgggctggatacaatcaacaaagatgagatcattagctctatggataaccctgataacgaaattgttctgtatctgatgctgcgcgcagtggacaggtttcataaacagcaaggcagataccctggagtatccaactatcaggtggaagaagatatagggaagctgaaaagctgtctgaccgggtttctacaggagtatggattaagcgtaatggtaaaggatgattacgtccacgaattctgccgatacggggcggctgagccacatacgatcgccgccttcctcgggggagccgcagcgcaggaagtcatcaagataatcacgaagcagttcgtgatcttcaacaacacttatatttattctgggatgtcccagactagtgcaacctttcaactgtag

SEQ ID NO: 316446 - DNA, 1338 bp, Artificial Sequence
  derived and/or modified sequence
atggagttcctgcaggagctgaacagtgatgtgtctggcagctttgtggaggagagccctgagaacctgctggacaatgaccccagcttcttctgccgcttcaccgtggtggtggccacccagctgcctgagagcaccagcctgcggctggctgatgtgctgtggaacagccagatccccctgctgatctgcaggacctacggcctggtgggctacatgaggatcatcatcaaggagcaccctgtgattgagagccacccagacaatgccctggaggacctgcggctggacaagcccttccctgagctgcgggagcacttccagagctatgacctggaccacatggagaagaaggaccacagccacaccccctggatcgtcatcatcgccaagtacctggcccagtggtacagcgagaccaacggccgcatccccaagacctacaaggagaaggaggacttccgggacctgatccggcagggcatcctgaagaatgaaaatggagccccagaagatgaggagaactttgaggaggccatcaagaatgtgaacacagccctgaacaccacccagatccccagcagcattgaggacatcttcaatgatgaccgctgcatcaacatcaccaagcagacccccagcttctggatcctggcccgggccctgaaggagtttgtggccaaggagggccagggcaacctgcctgtgcggggcaccatcccagacatgattgctgacagcggcaagtacatcaagctgcagaatgtgtaccgggagaaggccaagaaggatgctgctgctgtgggcaaccacgtggccaagctgctgcagagcatcggccaggcccctgagagcatcagcgagaaggagctgaagctgctgtgcagcaacagcgccttcctgcgggtggtgcgctgccgcagcctggccgaggagtatggcctggacaccatcaacaaggatgagatcatcagctccatggacaacccagacaatgagatcgtgctgtacctgatgctgcgggctgtggaccgcttccacaagcagcagggccgctacccaggagtgagcaactaccaggtggaggaggacatcggcaagctgaagagctgcctgaccggcttcctgcaggagtatggcctgtctgtgatggtgaaggatgattatgtgcatgagttctgccgctacggggctgctgagccccacaccatcgccgccttcctgggcggggccgccgcccaggaggtgatcaagatcatcaccaagcagtttgtgatcttcaacaacacctacatctacagcggcatgagccagaccagcgccaccttccagctgtag

SEQ ID NO: 316447 - DNA, 1338 bp, Artificial Sequence
  derived and/or modified sequence
atggagttcctgcaggagctgaacagcgacgtgagcggcagcttcgttgaggaaagccccgagaatctcctggacaatgacccttcattcttttgcaggtttaccgttgtcgtggccacacagctgccggagtcaactagtctgcggttagccgatgtcctctggaacagccagattccactcctgatttgtcgaacctatggcctggttggttacatgcggattatcatcaaggagcatcctgtcattgaaagccacccagacaacgccctggaggacctgcggctcgacaaacccttcccagaactgagagaacatttccagtcatatgaccttgaccacatggaaaagaaggatcacagccacacaccctggattgtgattattgctaaatatctggcccagtggtacagcgagacgaacggaagaattccaaaaacctacaaggaaaaggaagactttcgagatctgatccgccaggggattctgaaaaacgaaaacggcgcccccgaagacgaggagaatttcgaggaagccatcaagaatgtgaataccgccctcaacaccacacaaattccctccagcatagaagacatctttaacgatgatagatgcattaatatcactaaacaaacgccctcattttggatcctggctagagcgcttaaggaattcgtggctaaggagggccagggaaacctcccagtgcggggtaccataccagacatgattgccgacagcgggaagtacataaaactccagaacgtgtacagggaaaaagccaagaaggatgctgctgcggttgggaaccatgtcgccaaattgctgcaaagcattggtcaggcgccagagtcgatctccgagaaggagctgaaactcctgtgcagcaactctgcatttttaagagtggttaggtgtcgctcattagctgaagagtacggtctggacaccatcaataaggatgaaataatctcatcaatggataacccagacaatgaaatcgtactgtatcttatgctacgtgctgtggacaggtttcataagcagcagggcaggtatcccggcgttagtaactaccaggtcgaagaagatatcggaaagctcaaatcctgcctcacagggtttctgcaagagtacggcttgtctgtgatggtgaaagacgactacgtgcatgagttttgtcgctatggggcggcagaaccacacaccatagcagctttccttggcggcgcagcagcacaagaggtgattaaaatcatcacgaagcaattcgtgatatttaacaatacttatatttattcgggcatgtctcaaacgagcgcaacattccaactgtag

SEQ ID NO: 316448 - DNA, 1338 bp, Artificial Sequence
  derived and/or modified sequence
atggagttcctccaagagctcaattcagacgtgagcgggtcttttgtcgaggaatctccagaaaatctcctcgacaatgatcctagcttcttctgtcgcttcacagttgtggtggccacgcagctgcccgagtccacttctctacgcttggctgacgtgctctggaattcccaaatcccacttctgatttgccggacatacggactggtgggatatatgcggattatcatcaaggaacaccctgtgatcgagtcacatccagataatgcattggaggacctgcggctggacaagccattcccagaactgagagaacatttccagagctatgatcttgatcacatggagaaaaaagaccacagtcataccccatggatcgtcatcatagccaagtatttagcccaatggtactccgagaccaacgggaggatccctaaaacttataaagaaaaagaggattttagagatctgatccgccaggggattctcaagaatgagaatggagccccagaggacgaggagaactttgaagaggctattaagaatgttaatacagccctgaataccacacagatacccagtagcatcgaagatatatttaatgatgaccgatgcattaatattacaaagcagactccgagtttctggatcctcgcgagggccctgaaggagttcgtcgccaaggaaggacaagggaacctacctgtgcggggaactatccccgacatgatcgccgacagcgggaagtacattaagttacagaatgtctaccgcgaaaaagccaaaaaggacgcggcagcagtcggcaaccacgtggctaagctgctacagtccatcggccaggcacctgagtcaataagcgagaaggagttgaagctgctgtgcagtaacagcgcgttcctcagagtggtcaggtgtaggagcttggccgaggaatacggactggatacgataaacaaggatgagattatttcatccatggacaatccagataacgaaatagtgctatacctgatgctccgggctgtcgacagattccacaagcaacagggacgatatcccggagtttctaattaccaggtcgaagaggatatagggaagctcaagagctgtctgacgggattcctccaggagtatggtctctctgtgatggtgaaggacgactatgtccatgaattttgtcggtacggagccgcagagcctcatacaatagctgcatttttaggcggagctgccgcacaggaggtaataaagatcatcaccaagcaattcgtgatcttcaacaatacctatatctacagcggcatgtctcagacgtctgccaccttccaattatag

SEQ ID NO: 316449 - DNA, 1338 bp, Artificial Sequence
  derived and/or modified sequence
atggagttcctgcaggagctgaacagcgacgtgagcggcagcttcgtggaggagagccccgagaacctgctggacaacgaccccagcttcttctgcagattcaccgtggtggtggccacccagctgcccgagagcaccagcctgagactggccgacgtgctgtggaacagccagatccccctgctgatctgcagaacctacggcctggtgggctacatgagaatcatcatcaaggagcaccccgtgatcgagagccaccccgacaacgccctggaggacctgagactggacaagcccttccccgagctgagagagcacttccagagctacgacctggaccacatggagaagaaggaccacagccacaccccctggatcgtgatcatcgccaagtacctggcccagtggtacagcgagaccaacggcagaatccccaagacctacaaggagaaggaggacttcagagacctgatcagacagggcatcctgaagaacgagaacggcgcccccgaggacgaggagaacttcgaggaggccatcaagaacgtgaacaccgccctgaacaccacccagatccccagcagcatcgaggacatcttcaacgacgacagatgcatcaacatcaccaagcagacccccagcttctggatcctggccagagccctgaaggagttcgtggccaaggagggccagggcaacctgcccgtgagaggcaccatccccgacatgatcgccgacagcggcaagtacatcaagctgcagaacgtgtacagagagaaggccaagaaggacgccgccgccgtgggcaaccacgtggccaagctgctgcagagcatcggccaggcccccgagagcatcagcgagaaggagctgaagctgctgtgcagcaacagcgccttcctgagagtggtgagatgcagaagcctggccgaggagtacggcctggacaccatcaacaaggacgagatcatcagcagcatggacaaccccgacaacgagatcgtgctgtacctgatgctgagagccgtggacagattccacaagcagcagggcagataccccggcgtgagcaactaccaggtggaggaggacatcggcaagctgaagagctgcctgaccggcttcctgcaggagtacggcctgagcgtgatggtgaaggacgactacgtgcacgagttctgcagatacggcgccgccgagccccacaccatcgccgccttcctgggcggcgccgccgcccaggaggtgatcaagatcatcaccaagcagttcgtgatcttcaacaacacctacatctacagcggcatgagccagaccagcgccaccttccagctgtag

SEQ ID NO: 316450 - DNA, 5074 bp, Artificial Sequence
  derived and/or modified sequence
gcatcctggcggcgccgggccactgggagagtttatgtggccgaggcagacaagtggaattaggccttgctgcaggggacttcatttccttctcagtactggacccatttatgaggaggtggcttatgaaagtgtgatgttcgcgtatttcttgacaggccacagcaaacacaggtgtgcaggaaccgtttgtcatggaagccagggagcctgggaggcccacacccacctaccatcttgtccctaacaccagccagtcccaggtggaagaagatgtcagctcgccacctcaaaggtcctccgaaactatgcagctgaagaaggagatctccctgctgaatggggtcagcctggtggtgggcaacatgatcggctcagggatctttgtctcacccaagggtgtgctggtacacactgcctcctatgggatgtcactgattgtgtgggccattggtgggctcttctctgttgtgggtgccctttgttatgcagagctggggaccaccatcaccaagtcgggagccagctacgcttatattctagaggcctttgggggcttcattgccttcatccgcctgtgggtctcactgctagttgttgagcccaccggtcaggccatcatcgccatcacctttgccaactacatcatccagccgtccttccccagctgtgatcccccatacctggcctgccgtctcctggctgctgcttgcatatgtctgctgacatttgtgaactgtgcctatgtcaagtggggcacacgtgtgcaggacacgttcacttacgccaaggtcgtagcgctcattgccatcattgtcatgggccttgttaaactgtgccaggaaatttgcccttggccattgggatttctatgccaattgtgacgctcatctacatcctgaccaatgtggcctattacacagtgctgaacatttcagatgtccttagcagtgatgctgtggctgtgacatttgctgaccagacgtttggcatgttcagctggaccatccccattgctgttgccctgtcctgctttgggggcctcaatgcatccatctttgcttcatcaaggttgttcttcgtgggctcccgggagggccacctaccggaccttctgtccatgatccacattgagcgttttacacctatccctgctttactgttcaattgcaccatggcactcatctacctcatcgtggaggatgttttccagcttatcaactacttcagcttcagctactggttcttcgtgggcctgtctgttgttggacagctctacctccgctggaaggagcccaagcggccccggcctctcaagctgagcgtgtttttccccatcgtgttctgcatatgctccgtgtttctggtgatagtgcccctcttcactgacaccattaattccctcattggcatcgggattgccctttctggagtccctttctacttcatgggtgtttacctgccagagtcccggaggccattgtttattcggaatgtcctggctgctatcaccagaggcacccagcagctttgcttttgtgtcctgactgagcttgatgtagccgaagaaaaaaaggatgagaggaaaactgactagaggtcagaggtggctttctgaggcctggaaggcaggccaaccagcaaaatcctgataacaagactctgtgggcccaactctcctgaattaaaggagccttttgacccaatcatatagtggggctcagggccagtgctcactcttattggctttgtttacacttggagccaccttggtgtgggtcaccgggacagtgtactcctctcctgccagcctccccttccccgaggtgtggtggctgcagtctcaggaagagcttggtacttgtggggacttctgttttctccctgtggagatcagtgaagactgggaggaaagctgcttcaacctgagtccggctcttcagcaggctgcacaagtggaagcaactaattctggtgctcaggctgggctctccacccaagttaggcctgctctggcctaatggatcttactgtatgagcaggacggctgcattggattgtacaactgttttgtgatgcccccagacactgtcatcctgggccgagaagaacctgctagcttgacataccccatgggcttatccttaggttttggaattggtcaacagtgaggcagtctcccttcctgaccattcttctccacccagtcacagataagggaataaccttggccatatatttgctcaataaagattgaaggaagcatggtcatagttgccctgggttcagagcataatgcatatgtgaagcatggggtgacattcctactgtcatgggtttgggatttgtaacggcaaattcctgcccgacgacagggtgtcttatgcaaaggctgacttgcctgaacgctaagaacatgacttctgtctgagctaagctggcacccatcccagggctcctctggagctaatcctttaagcaaaatgtgcttgccttttaaagatccctgaccccagctttagctttctccaccagataaccagctaatcccaggaatttgctgccccccaccagtggcttctagggaaagcaaggacctcacatgccaggtgccctagtacttgcttagtgagccatgtcatcctcctttcatttttggatggtgacagcatttttcccctctgtgctggatacagacttctcccaggatcctctctttgggagcgaagccagaggatccctacagcactcaagcttcatggtggaattaatttctgccagctctttgttgtctgtctccttaaatccttttcctggtgtgcttattatcccttttgcagtgagtacagtttattaagttgtcagccctttaatattggggaaacttaatgagtataaatagcagggagcacattgtaacagcacagtgttttgtttttttcacccggttgctgtatgagaatggctttcaatcctttgtttctatgcctacagacagaaagcaagatgtctaatattagacatacaagttgctgcctgttataacggtgaattatacctttgtgcatgcctaggatgtttgttgttttaattagctgcaatatatacggcctgtgtacacagaatttaatcacttcggcaggttgaacaactccatgtagataagagcaagtgtaggcaaaggtttagaaaatggacataaagtcaaagaatgatggcaggtaggatgaaggagagatacttaggaaatcctaaaagaggcggcaagaaggtacctccctgtgtaactcaccttcccccatgacagtgagtaagagacactcacaggctatgagggtacacccctagctgaatgttctgtgttgtttccttagacctgtggtgtccgctgcaacagctactagccacgtgtagctaattacattaaaatgaaataaaattaaaagctcagtttctcagttgcgctaatcacatttcaagtgctcagcagccacccgtgtctactactacacagtgcagacacagaacatatcatcactgcagatagttctactggacaatgttacgctagaataaacaccaaggcagtcagttaaggcagctatggtttggaaaggcatacggacagagtctgcttagaagagatacaagttgttaataaaattgatcctgttgatagtagtttgtttttgtggtgggtgctgtgaagagtaaacattactcagtggaaagctaagttcagaaggtactttgtttttcctcccttgccttaagtccttggtatttataatcaatgctgaaccttctatttcactaccgctccctgttttagatattcagatttaaaaggttttcaaagaattactttcttccatgttcaaagctagattttactaaacacatgtatcacattcatatatattgtttcttggccccactgccaaaggaagtcagtcagtaatttcacaaccgttatcagagtttggaagcagaaatagctgttaactaaaatctcccactgctcagactactttctgccctaatggccattactatccagtctgtattgctacaagggacccactggtaccccttttagattctatcaaaaggaacagggttttcctagaggcaggcagcctggtggtatggcacagcagaagcttactgctaatgaaatgggaacctccccctcccttgtggtttcagcacagaacctgaatgccaggaaaaattcctgggccaagaagctaaagctaaagaaaccttccttttttcaacgtttttttttctttcaaactgtagggtcacttttgattgaggcaaaggggtcctactgtaagtggaaaagactcactcccctaacataagttttcactgtggtgggatggtgccgcccgatatgcttgatatgcttttccttccacatgttaagctaggaaacctaacaggatgtcagcagggcagttaactctggactcagagccctcaagggcatgtggcagaacctcatggacatcacaagaccatcagtctgaatccaggtcgtgggggctgtcatagccgaactccttctgcacatccagagggtacttgctccacatccgctgtctgctgctgcctctttcctcctcactcaggctgttgtagtcagcagagcctagaatgacatcccgggagtggattctaaatgtgattttcctaggctactgcaggagccccttctcttctcagaaaggtctgtttttgttcccgattgtaatgcaaaatccttgctcaataaataaaaaagaatatagaattcttttttttttaaagaaggaatcactttcctatcatctaaaccaagttccttcacactggagtattttgtcacttctcccctccgtggagtattttgtcacttctcccctccgtataggattttttgttgttgtaagagttgtagtcatattgtaaatatttttgtacctttctccttttaacgtgttattgacaaacctccccaaaagaatatgcaattgtttgattcatttctctgttatcagacaccaataaattctttttgttgggc

SEQ ID NO: 316451 - DNA, 687 bp, Artificial Sequence
  derived and/or modified sequence
atgtaccacctgatgaagttcatccccctgtacagcaaggtgcagagaccctgcaccagcacccccatgatcgacagcttcgtgagactgatgaacgagttcaccaacatgcccgtgccccccaagcccagacaggccctgggcgacaagatcgtgagagacatcagacccggcgccgccttcgagcccacctacatctacagactgctgaccgtgaacaagagcagcctgagcgagaagggcagacaggaggacgccgaggagtacctgggcttcatcctgaacggcctgcacgaggagatgctgaacctgaagaagctgctgagccccagcaacgagaagctgaccatcagcaacggccccaagaaccacagcgtgaacgaggaggagcaggaggagcagggcgagggcagcgaggacgagtgggagcaggtgggccccagaaacaagaccagcgtgaccagacaggccgacttcgtgcagacccccatcaccggcttctggtggacccaccaggtgtgcggcctgcccgccgagttcaagagaatctgccacttcgccgccatcttccacgtggccgtgggctaccccgtgagacaggacacccacagccccggctgcaccggcgagctgggcggcaagagaatctgccccagactgtaccacaagaaccagaccagaggctag

SEQ ID NO: 316452 - DNA, 687 bp, Artificial Sequence
  derived and/or modified sequence
atgtaccatttgatgaagtttatccctctctactcgaaggtgcagcgtccctgcactagcacaccaatgattgactcctttgtgagactgatgaacgagtttaccaacatgccggtcccacctaaaccacggcaggctttgggcgacaagatcgtgcgggatattcgtccaggggccgcgttcgaacccacatatatttatcgactattgacagtgaacaagtcctccctgagcgagaaagggaggcaggaagacgccgaggagtacttgggctttattcttaacggactccacgaagagatgctgaacctgaagaagctcttgtcgccctccaatgagaagcttaccatctcaaatggccccaagaatcactctgttaatgaggaggaacaggaggagcagggtgaaggcagcgaggatgaatgggagcaggtaggtccacgtaataaaacaagcgtgaccagacaagctgatttcgtgcagacccctatcaccggattttggtggacacaccaggtgtgcggactgccagcagaatttaaaagaatatgtcattttgccgctatttttcacgtagcagttgggtacccggtgcgccaggacactcactctcccgggtgcaccggagagctgggaggtaaacgtatttgccctagactgtatcacaagaatcagaccagagggtag

SEQ ID NO: 316453 - DNA, 687 bp, Artificial Sequence
  derived and/or modified sequence
atgtaccacctgatgaagttcatccccctgtacagcaaggtgcagaggccctgcaccagcacccccatgattgacagctttgtgcggctgatgaatgagttcaccaacatgcctgtgccccccaagccccggcaggccctgggggacaagatcgtgcgggacatccggcctggagctgcctttgagcccacctacatctaccgcctgctgactgtgaacaagagcagcctgtctgagaagggccggcaggaggatgctgaggagtacctgggcttcatcctgaatggcctgcacgaggagatgctgaacctgaagaagctgctgagccccagcaatgagaagctgaccatcagcaatggccccaagaaccacagcgtgaatgaggaggagcaggaggagcagggcgagggctctgaagatgagtgggagcaggtgggccccaggaacaagacctctgtgacccggcaggccgactttgtgcagacccccatcaccggcttctggtggacccaccaggtgtgtggcctgcctgctgagttcaagaggatctgccactttgctgccatcttccacgtggccgtgggctaccctgtgcggcaggacacccacagccctggctgcaccggggagctgggcggcaagaggatctgcccccggctgtaccacaagaaccagacccggggctag

SEQ ID NO: 316454 - DNA, 687 bp, Artificial Sequence
  derived and/or modified sequence
atgtaccacctgatgaagttcatccccctgtacagcaaggtgcagcgcccatgcaccagcacacccatgatcgactccttcgtgcggctcatgaatgagtttacaaacatgcccgtgccacctaaaccaagacaggctctgggggacaagattgtgagagacattcgtcctggtgcagcctttgaacctacctacatatacagactcctaacagttaacaagagcagcctttcagagaaaggccgccaggaggacgctgaagaataccttggcttcattctcaatggcctgcacgaagagatgctgaatctcaagaagctgctcagtccaagcaacgagaagctgaccattagcaatgggcctaagaaccattctgtgaatgaagaagagcaagaggagcagggcgagggttcggaggatgaatgggagcaggtaggcccaagaaacaaaaccagcgttacccggcaggctgactttgtgcagacgcccatcaccgggttctggtggacacatcaggtatgtggtctgccagctgaattcaagcgcatctgtcacttcgctgcgatattccatgttgcggtcggttaccctgtgcgtcaggatacccacagcccaggatgcactggcgaacttggcgggaagcggatttgcccgcggctgtaccacaaaaatcaaacacgcgggtag

SEQ ID NO: 316455 - DNA, 687 bp, Artificial Sequence
  derived and/or modified sequence
atgtaccatctaatgaagttcataccattatactccaaagtacagaggccttgtacctccacgcccatgatcgattcattcgtgcgactgatgaacgaatttaccaacatgccagtaccccctaaacctcgccaagccctaggcgataaaatcgttagggatatccgccctggtgccgctttcgagcccacctacatctacaggctgctcaccgtgaacaagtctagcctttcagagaagggcagacaggaggatgctgaagagtatctgggtttcattctcaacggccttcatgaagagatgctcaatctgaagaaattgctctcacctagcaacgagaagctcaccatctccaatggaccaaaaaaccactcagtcaatgaagaggaacaggaagagcagggcgagggctctgaggacgagtgggaacaggtgggccctcggaacaagacatccgtcaccaggcaggcagacttcgtacagacaccgatcaccggattttggtggacccatcaggtgtgcggcctgcctgccgaatttaaacgaatttgtcacttcgcagctatctttcacgtggccgtgggctatcctgtgaggcaggacacacattcacccggttgtaccggagagctggggggaaagcgcatctgccctcgcctgtaccataagaatcagactcgtggctag

SEQ ID NO: 316456 - DNA, 825 bp, Artificial Sequence
  derived and/or modified sequence
atggtggtggaattcaggcacatgagaaaccacgcctatgaacctcttgcctcctttttggatttcataacttactcatatatgattgataacgtcatactgctcatcacaggcactctccaccaaaggagcatcgctgagctggtgccaaaatgtcaccctcttggtagtttcgaacagatggaagctgtaaacattgcacagactccagccgagctctacaacgcaatactcgttgatacacctctggcagcatttttccaggactgtatttccgaacaggaccttgacgagatgaatattgagattattcggaatacactctataaggcctatctggaatccttttacaagttctgtacgttgctgggcggcactacagctgacgccatgtgcccaatcctggagtttgaggctgaccgcagagcttttatcattaccattaattcatttggtaccgagttatcgaaagaggaccgtgcaaagttattcccccactgtggccgactttacccggagggtcttgcccagctggccagggccgatgactatgagcaggtgaagaacgttgcagactattatcccgagtacaaactgctgtttgagggagccggatccaatccaggggataagacactcgaagacaggtttttcgaacatgaggtgaagctcaataagctggcatttcttaatcaattccactttggcgtgttttacgcatttgtcaagctaaaggaacaagagtgtagaaatatcgtctggattgctgagtgcatagcccagcgtcacagagcgaagatcgacaactatatacccattttctag

SEQ ID NO: 316457 - DNA, 825 bp, Artificial Sequence
  derived and/or modified sequence
atggtggtggagttccgccacatgagaaatcatgcctatgagcccctggccagcttcctggacttcatcacctacagctacatgattgacaacgtcatcctgctgatcaccggcaccctgcaccagaggagcattgctgagctggtgcccaagtgccaccccctgggcagctttgagcagatggaggccgtgaacatcgcccagaccccagctgagctgtacaatgccatcctggtggacacccccctggccgccttcttccaggactgcatcagcgagcaggacctggatgagatgaacatcgagatcatccggaacaccctgtacaaggcctacctggagagcttctacaagttctgcaccctgctgggcggcaccacagcagatgccatgtgccccatcctggagtttgaagctgacagaagagccttcatcatcaccatcaacagctttggaacagagctgagcaaggaggaccgggccaagctgttcccccactgcggccgcctgtacccagagggcctggcccagctggcccgggcagatgattatgagcaggtgaagaatgtggccgactactacccagagtacaagctgctgtttgaaggagctggcagcaaccctggggacaagaccctggaggaccgcttctttgagcacgaggtgaagctgaacaagctggccttcctgaaccagttccactttggagtcttctacgcctttgtgaagctgaaggagcaggagtgcaggaacatcgtgtggattgctgaatgtattgcccagaggcaccgggccaagattgacaactacatccccatcttctag

SEQ ID NO: 316458 - DNA, 825 bp, Artificial Sequence
  derived and/or modified sequence
atggtggtggagttccggcacatgcggaaccacgcctacgagcccctggccagttttttggattttattacatatagctacatgatcgataacgtgattctcctgattactgggacgctgcatcaaaggtcaatcgccgagctggtgccaaagtgccacccactgggatccttcgaacagatggaagctgttaacattgctcagaccccggctgagttgtacaacgcaatcctggtggacacccccctggctgcattcttccaagactgcatttcagagcaagacctcgacgagatgaatattgagattatcaggaatactctgtacaaggcttacctagagtccttctacaagttctgcactcttctgggaggcaccacagctgatgccatgtgtccaatcctcgagttcgaagcagaccgacgagcattcatcatcacgataaactcctttgggactgaactgtctaaggaagatcgcgctaaactgtttcctcattgtggaaggctttatccagaagggctggcgcaactagcccgcgctgatgattatgaacaggtgaaaaatgtggcagattattatcccgagtataagctactgttcgagggcgccggaagtaacccgggagacaagacgctggaagaccggttttttgaacatgaagttaaactaaacaaactggcttttttgaatcagtttcatttcggcgtcttctacgcttttgtgaagctgaaagagcaggagtgtcgcaatattgtatggattgccgagtgtatcgcccagcgtcaccgtgctaagatcgataattacatccccattttctag

SEQ ID NO: 316459 - DNA, 825 bp, Artificial Sequence
  derived and/or modified sequence
atggtggtagaattccggcatatgcgcaatcacgcctatgaacctctggccagctttcttgatttcataacctattcttatatgatcgataatgtgatactactaataacagggacattgcatcagcggtccatcgccgagctggtcccaaagtgccaccctttgggcagtttcgaacaaatggaggctgtaaacatcgcccagactccagcggaattgtataacgccattctcgtggatacccccctcgccgcttttttccaagactgcattagcgagcaggacctcgatgagatgaatatagaaattatcaggaataccctttacaaagcctatcttgaaagtttttacaaattttgcacccttttggggggtaccacagctgacgcaatgtgccccattctggagtttgaagcagaccgccgagcgttcatcattacaatcaacagctttggtaccgagttatcgaaggaggatagagccaagctcttcccacactgtggaaggctttacccggaggggctggctcagctagcacgggcagacgattatgaacaggtcaagaacgtggccgactactatcctgagtacaagctgctttttgaaggcgcaggaagtaaccctggagacaaaacccttgaggacaggttctttgaacacgaagtcaagttaaacaagcttgccttcctgaaccagtttcattttggggtgttttacgcctttgttaagctcaaggagcaggagtgtcgcaacattgtgtggattgccgagtgtattgcacagcgacatcgcgctaagatcgacaattatattcccattttttag

SEQ ID NO: 316460 - DNA, 825 bp, Artificial Sequence
  derived and/or modified sequence
atggtggtggagttcagacacatgagaaaccacgcctacgagcccctggccagcttcctggacttcatcacctacagctacatgatcgacaacgtgatcctgctgatcaccggcaccctgcaccagagaagcatcgccgagctggtgcccaagtgccaccccctgggcagcttcgagcagatggaggccgtgaacatcgcccagacccccgccgagctgtacaacgccatcctggtggacacccccctggccgccttcttccaggactgcatcagcgagcaggacctggacgagatgaacatcgagatcatcagaaacaccctgtacaaggcctacctggagagcttctacaagttctgcaccctgctgggcggcaccaccgccgacgccatgtgccccatcctggagttcgaggccgacagaagagccttcatcatcaccatcaacagcttcggcaccgagctgagcaaggaggacagagccaagctgttcccccactgcggcagactgtaccccgagggcctggcccagctggccagagccgacgactacgagcaggtgaagaacgtggccgactactaccccgagtacaagctgctgttcgagggcgccggcagcaaccccggcgacaagaccctggaggacagattcttcgagcacgaggtgaagctgaacaagctggccttcctgaaccagttccacttcggcgtgttctacgccttcgtgaagctgaaggagcaggagtgcagaaacatcgtgtggatcgccgagtgcatcgcccagagacacagagccaagatcgacaactacatccccatcttctag

SEQ ID NO: 316461 - protein, 393 aa, Artificial Sequence
  derived and/or modified sequence
MDPKRSQKESVLITGGSGYFGFRLGCALNQNGVHVILFDISSPAQTIPEGIKFIQGDIRHLSDVEKAFQDADVTCVFHIASYGMSGREQLNRNLIKEVNVRGTDNILQVCQRRRVPRLVYTSTFNVIFGGQVIRNGDESLPYLPLHLHPDHYSRTKSIAEQKVLEANATPLDRGDGVLRTCALRPAGIYGPGEQRHLPRIVSYIEKGLFKFVYGDPRSLVEFVHVDNLVQAHILASEALRADKGHIASGQPYFISDGRPVNNFEFFRPLVEGLGYTFPSTRLPLTLVYCFAFLTEMVHFILGRLYNFQPFLTRTEVYKTGVTHYFSLEKAKKELGYKAQPFDLQEAVEWFKAHGHGRSSGSRDSECFVWDGLLVFLLIIAVLMWLPSSVILSL

SEQ ID NO: 316462 - DNA, 1182 bp, Artificial Sequence
  derived and/or modified sequence
atggaccccaagagaagccagaaggagagcgtgctgatcaccggcggcagcggctacttcggcttcagactgggctgcgccctgaaccagaacggcgtgcacgtgatcctgttcgacatcagcagccccgcccagaccatccccgagggcatcaagttcatccagggcgacatcagacacctgagcgacgtggagaaggccttccaggacgccgacgtgacctgcgtgttccacatcgccagctacggcatgagcggcagagagcagctgaacagaaacctgatcaaggaggtgaacgtgagaggcaccgacaacatcctgcaggtgtgccagagaagaagagtgcccagactggtgtacaccagcaccttcaacgtgatcttcggcggccaggtgatcagaaacggcgacgagagcctgccctacctgcccctgcacctgcaccccgaccactacagcagaaccaagagcatcgccgagcagaaggtgctggaggccaacgccacccccctggacagaggcgacggcgtgctgagaacctgcgccctgagacccgccggcatctacggccccggcgagcagagacacctgcccagaatcgtgagctacatcgagaagggcctgttcaagttcgtgtacggcgaccccagaagcctggtggagttcgtgcacgtggacaacctggtgcaggcccacatcctggccagcgaggccctgagagccgacaagggccacatcgccagcggccagccctacttcatcagcgacggcagacccgtgaacaacttcgagttcttcagacccctggtggagggcctgggctacaccttccccagcaccagactgcccctgaccctggtgtactgcttcgccttcctgaccgagatggtgcacttcatcctgggcagactgtacaacttccagcccttcctgaccagaaccgaggtgtacaagaccggcgtgacccactacttcagcctggagaaggccaagaaggagctgggctacaaggcccagcccttcgacctgcaggaggccgtggagtggttcaaggcccacggccacggcagaagcagcggcagcagagacagcgagtgcttcgtgtgggacggcctgctggtgttcctgctgatcatcgccgtgctgatgtggctgcccagcagcgtgatcctgagcctgtag

SEQ ID NO: 316463 - DNA, 1182 bp, Artificial Sequence
  derived and/or modified sequence
atggacccaaaaagatcccagaaggagtctgtgctgatcacagggggctctggttattttgggtttcgtctgggatgcgccttaaaccagaatggcgtgcatgtcatcctcttcgacatttcaagcccggctcagacgattcctgaaggcatcaagttcatacagggagacattcggcatctatcagatgtggagaaagcattccaggatgcagatgtgacttgtgtgtttcacattgcttcctacggaatgtccggaagagaacagttgaaccgtaacctgatcaaggaggtgaacgttaggggcacagataacatattgcaggtgtgtcagcggcgacgcgtcccacgattggtttatacgtccactttcaacgtcatattcgggggacaagtcattaggaatggcgatgaatcgctcccatacttgccactccacctacatcctgatcactactctaggactaaaagcatagccgagcagaaagtgcttgaggctaatgctaccccactggaccgcggtgacggagtgttgagaacctgtgccctgaggcccgctgggatttacggaccgggcgaacagaggcacctgcctagaatcgtttcttatattgaaaaggggctgtttaaattcgtctacggcgacccaagatctctggtggaattcgtccatgtcgataatcttgtccaggcccacatactggcttccgaggccctgagggcagataaaggccacattgccagtgggcagccctatttcattagcgacggccgccctgttaataattttgagttctttcgtccgcttgttgaggggctgggatacacattcccatcaacgaggctgcctctaaccttagtgtactgcttcgctttcctaaccgagatggttcattttatcctgggtcgtttgtacaatttccagccgttcttaactagaacagaggtgtacaaaaccggcgtgacacactacttttcgctggagaaagccaagaaggagctgggctataaggcccagccattcgacctccaagaggctgtggagtggttcaaggcccacggccacgggcgaagtagcgggtctagagactcagagtgctttgtttgggacggactcttagtattcctgctgatcattgccgtgctaatgtggctcccatcttcagtgatcttgagtctttag

SEQ ID NO: 316464 - DNA, 1182 bp, Artificial Sequence
  derived and/or modified sequence
atggaccccaagaggagccagaaggagagcgtgctgatcaccggcggcagcggctacttcggcttccggctgggctgtgccctgaaccagaatggagtgcacgtgatcctgtttgacatcagcagccctgcccagaccatccctgagggcatcaagttcatccagggcgacatccgccacctgagtgatgtggagaaggccttccaggatgctgatgtgacctgtgtgttccacatcgccagctatggcatgagcggccgggagcagctgaacagaaacctgatcaaggaggtgaatgtgcggggcacagacaacatcctgcaggtgtgccagaggagaagagtgccccggctggtgtacaccagcaccttcaacgtcatctttggaggccaggtgatcagaaatggagatgagagcctgccctacctgcccctgcacctgcacccagaccactacagcaggaccaagagcattgctgagcagaaggtgctggaggccaatgccacccccctggacagaggagatggagtgctgcggacctgtgccctgcggcctgctggcatctacggccctggagagcagaggcacctgccccgcatcgtgtcctacatcgagaagggcctcttcaagtttgtgtatggagaccccaggagcctggtggagtttgtgcacgtggacaacctggtgcaggcccacatcctggccagcgaggccctgcgggctgacaagggccacatcgccagcggccagccctacttcatcagtgatggccggcctgtgaacaactttgagttcttccggcccctggtggagggcctgggctacaccttccccagcacccggctgcccctgaccctggtgtactgctttgccttcctgacagagatggtgcacttcatcctgggccgcctgtacaacttccagcccttcctgaccaggacagaggtgtacaagacaggagtgacccactacttcagcctggagaaggccaagaaggagctgggctacaaggcccagccctttgacctgcaggaggccgtggagtggttcaaggcccacggccacggccgcagcagcggcagccgggacagtgaatgttttgtgtgggatggcctgctggtgttcctgctgatcatcgctgtgctgatgtggctgcccagcagcgtcatcctgagcctgtag

SEQ ID NO: 316465 - DNA, 1182 bp, Artificial Sequence
  derived and/or modified sequence
atggaccccaagcggagccagaaggagagcgtgctgatcaccggcggcagtggctatttcggttttcgtctaggatgcgcacttaatcaaaacggagtgcatgttatactcttcgatatcagttctcccgcgcaaacgatccccgaaggcataaaattcattcaaggggacatacgccatctctcggacgtggaaaaggcattccaggacgctgacgtcacttgcgttttccacatcgcctcttatggaatgtcgggcagagagcagctgaatagaaatctgattaaagaggttaatgttagggggacggataacatcctgcaagtctgccagcggcgacgggtccccaggttggtgtacacttccacattcaacgtaatcttcggcggacaggtcatccgcaatggagatgaaagcctgccgtatctccccctgcacttgcatccagaccactactcaagaaccaagtcaatagccgagcaaaaagtgttagaggccaacgcaaccccactcgaccgaggggacggggtgctccgcacttgtgccctgcgccctgctgggatatatggccctggagagcagcggcatcttccccggattgtgtcgtatattgaaaaaggcctctttaaatttgtgtacggtgacccacggtccctcgtggagtttgtccacgttgataatctggtccaagcgcacatcctggcctccgaggctcttcgcgcggacaaagggcatatagccagcggccagccatattttatctccgatggacgccctgtgaacaactttgagttctttagaccactagtggaggggctggggtatacatttccaagcacccgcctcccgctgacactggtctactgcttcgcgtttctgacagaaatggttcacttcattctgggtcgcctctacaatttccagccattcttgacaaggacggaggtgtacaaaactggtgttacgcattacttctctctggaaaaagccaagaaagagctcggctataaagcacagcccttcgacctgcaggaggctgtcgaatggtttaaagcacatggtcatggaaggagcagcggaagtagagattctgaatgcttcgtctgggacggcctactcgttttcttgctaatcattgctgtgttaatgtggcttccgtcatcggtgatcctgagcctgtag

SEQ ID NO: 316466 - DNA, 1182 bp, Artificial Sequence
  derived and/or modified sequence
atggaccccaaacgtagccagaaggagtcagtccttattaccgggggttctggctatttcggcttcagactgggttgcgcactgaaccagaacggcgtgcacgttatcctgtttgatatttcgtccccagcccagacaatccccgaagggatcaaatttatccagggagacatccgccatctctctgacgtggagaaggccttccaagacgccgacgtgacctgcgtgtttcatattgcctcgtacggcatgtctggtcgcgagcagcttaacagaaacctcattaaagaagtgaatgttagagggacagataacatcctccaggtgtgtcagcgcaggagagtgccacggttggtgtacacctccacatttaatgtgatttttggcggacaagtgatcagaaatggggacgagtccctgccttatttgccccttcacctgcacccagaccactacagtcgcactaaatcaatcgcagaacagaaagtccttgaagctaacgcgacaccgctggaccgaggggatggagtgctgcggacatgcgctctgaggcccgctggcatttacggacccggagaacaaagacacctcccacggatcgtcagctatatcgagaagggcctctttaaatttgtgtacggggacccacgaagtttagttgagtttgttcacgtggacaatttggtccaggcacacattctcgcaagcgaagccctacgggcagataagggccatattgccagtgggcagccctatttcatatccgatggccgaccggtgaacaattttgaattctttcgccctctcgtggagggactggggtacacatttccctctacaagattgcccctcaccctggtgtattgctttgcctttctaaccgaaatggtacacttcattctcggcaggctatacaatttccaaccattcctgacccgtaccgaggtgtacaagacaggagtgacccattatttcagccttgaaaaagcgaagaaagaactgggttacaaagcacaacccttcgacctacaagaggctgtcgaatggttcaaggcccacggacacgggaggagtagcggcagtcgggactcagaatgtttcgtttgggacgggttgctcgtgttcttgcttattattgccgttctgatgtggctaccttcttcagttatcctctccctgtag

SEQ ID NO: 316467 - DNA, 2769 bp, Artificial Sequence
  derived and/or modified sequence
aggtccgacggcttcggcgccccagctgtggtgatgggtagctaggaggcctgggcctctctgcctgctgtagccgtctgccgcgcccttgttcctgcagctgtccagttatcttttgactgccacatatggaccccaaaagatctcaaaaggaaagtgtcctcattacaggaggaagtggctattttggttttcgcctgggctgtgccctgaaccaaaatggagtccatgtgattctgtttgacatcagcagccctgctcaaaccattccagaaggaatcaagtttatacaaggagacatccgccacctgtctgacgtagagaaagccttccaggatgcagacgtcacttgtgtgttccatattgcctcttatggtatgtcagggcgggagcaactcaatcgaaacctgatcaaagaagtcaacgtcaggggcacagacaacatcctccaggtttgccaaaggagaagggtgcccaggttagtttacaccagcactttcaatgtcatctttggaggtcaagttatcagaaatggggatgaatctctgccctacctgcctcttcacctccaccctgatcactactctcggacaaagtcaattgcagagcagaaggtgctggaggcgaatgctacacccctggacagaggcgacggtgtcttaagaacctgcgctctgaggccagctggcatctatgggcctggagaacaaagacaccttcccaggatagtcagctacatcgagaagggtctgttcaagtttgtctacggggaccccaggagcctggttgagtttgtccacgtggataacttggtgcaggctcacattctggcctcagaagccctgagagctgacaagggccatattgcctctgggcagccctacttcatctcagatggcagacccgtgaacaactttgagttcttccggcctctggttgagggcctgggctacacattcccgtctacccgcctgccattgaccttggtctactgctttgcttttctaacagagatggttcacttcattttgggtcgactctacaacttccagcccttcctcactcgcactgaagtttacaaaactggtgtcacacattattttagcttagagaaagccaagaaagagctaggttataaggctcagccatttgacctccaggaagcagtggaatggtttaaagcccatggtcatggcagaagttctggaagtcgtgactcggagtgttttgtttgggatgggctattggtcttcctcctgattatagcagttctcatgtggctgccttcttctgtgattctgtcactgtgaaggaggggccagaaataaggtgatcacagttggctgagatggttctcaagaaacatgggttttaaaatgtgtacagtgatatctggtgccaaacattggctcttcaaattgctacttaagaataggttcttggattgaatctttatgtcttatttccttgcactaatccagatgggaatgaaaaagcagaagcagagattagtttgaaatttgatttgttatgtgcttctgttttaggtgggtacaatagaagtcagtttggagccatagaagtaggcttagttgagttggagatgcccatcttgaatttctgagagggcaagatatacttatttccattttatgcagtctgcatctacctaaaacctctgactgatgtgggaatggcgaaacactatcaggcttgaatgcgtgtgaaaaacaccaaattggcccagatccctaacagagcaatcctcgaggggatggtggctattgctggagaggcattagctattcacagggtacgttttaggtgttaacttttgccctttatgatatcagggcattatgcctatgtgaacacatggtaatgtttgatgtttaggcctttattctacctcataggattcttttgaggattaaattcaagcatacaaagcgctcctcaacacacatagccattctttttatcagaattgtcatggtacattccttatgagggctttcttcctcagtgttctctttagagggctattgctactggactttctgcaatgtctttgggtgtgccctcagagcctgcaacaagtgtatttggatatactctatttgtaaagtttaggcctctaagaaggccacaatgaagcaactaaaaatctgatgattaagggagtcaatcaagctgatgccatttttagtttaaaaatgaagcagagctctaaactcatagatgggttttcttactgggaagaagattggctctctgaagacagcttccaatgaggaatgtattgaacaatggcagcactgtctggccacccacaaactgttacagatgatccagttacactgttgcataggaacccaagtggaaagaagacagagtccatgtctgtccatggctccagctacagaaaggatagtatgggaacattacaagggggatacattactgtggaaagttctgctagagttagtcttgagagtatctgtaaaatacaaatagatgagcaatccctgtggaatgctgcctggatattttcagaaaagctctgaacttgatgtcataataccaacaccgtgaatatcgtgtgtggccttaaccaaggaacagaagccctttagaacttagcttcctcacttgggagctgggactgactgcatttgccctttgtataaacccacccaccccatagggttcactgggagcataaagcaagatgtggtgaaagtacttctaatataaattgcaacatca

SEQ ID NO: 316468 - DNA, 2526 bp, Artificial Sequence
  derived and/or modified sequence
atgacagtgctggaacaggatacccagggacttgatggttggtggctgtgctccctgcacggaagacaaggcatagtaccggggaatagacttaagatactggttggcatgtacgataaaaaaccagctgggccaggacctggtcctcctgccacacctgcccagccccagcctggcctgcacgcccccgccccacccgcatctcagtacacaccaatgctgcccaacacatatcaaccccagccagatagcgtgtacctggtgccaaccccctctaaggcccaacagggcctatatcaagtccccggccctagcccacaattccagtccccacctgcaaagcagaccagcacctttagcaagcagaccccccaccacccttttccctcgccagcaaccgacttgtaccaggtgccacctgggccgggcggacctgcacaggacatttaccaagtgcctccatctgccggaatgggacacgatatttatcaagtgccccctagcatggatactaggtcctgggagggaactaagccacctgccaaggtagttgttcctaccagggtggggcagggatatgtttacgaggcagcccaaccagagcaggatgagtatgacatcccccgacacctactcgctcccggaccccaggatatttatgacgtcccgcctgtaaggggcctcctgccaagccagtacgggcaggaggtctatgatacacctccaatggcagtaaaggggcccaacggcagggaccccctactggaggtgtatgacgtccctccaagcgtggaaaagggactgccacctagtaaccatcacgcagtatacgatgtccctccgtcagtgtccaaagacgttccagacggtcccctgctccgcgaggaaacctatgatgtgcctcccgcttttgctaaggctaaacctttcgaccccgctcggactcccctggtcttagctgcgccccctcccgactcccctcccgccgaggacgtttacgatgtaccaccaccagcccccgacctgtatgatgtgcctcccggtctccgtaggcctggcccaggaacattatatgatgttcctcgggagcgcgttttgcccccggaagtggccgacggaggtgtggtggactctggagtctacgcggtgccgcccccagccgaacgcgaagcccctgccgaaggaaaaagactctctgcttccagtactgggagcacgcgatccagccagtcagcatcatccctcgaagtcgctggccctgggcgggaaccgctcgaactcgaggtggctgtagaagccctagctcgcctgcagcagggagtgagcgccaccgtggcacacctcctggatcttgccggctctgccggggcaaccggatcttggagatcacctagcgagccccaggagcccttggtgcaagacctccaggccgctgttgctgcagtgcaatctgccgtacacgagctacttgagttcgcaagaagcgcagtgggcaacgccgcacatacctctgatcgtgctctccatgccaagctgagtaggcagctacaaaaaatggaggatgtccaccagaccctggtagctcatggacaagctcttgatgccggtcggggtgggagtggggcgaccctggaagacctggacagactggttgcgtgctcccgtgctgtgccagaggatgctaaacagcttgcctcattcctgcatgggaacgcttctctgttgtttagaaggacaaaagctacagcaccaggcccagaaggcggtggaacattacatcctaatccgacagataaaacctcctctatacagtcccggcccctgccctcccccccaaagtttacatctcaggattctccggacggacaatatgaaaactctgagggcggatggatggaggactatgactatgttcacctgcagggaaaggaggaatttgaaaaaacgcagaaagagctgctggagaagggttcaataacccggcaggggaaatcacagcttgagctgcagcagctgaagcaattcgaaagactcgagcaggaggtgagccgccccattgaccacgacctggctaactggaccccagcccagcctctggcacctggcaggacaggtggcctcggtccatctgaccggcagttactgctgttctaccttgagcagtgcgaagccaacctcaccacacttacaaatgcggtcgacgccttcttcacagccgttgccaccaatcagccaccaaagattttcgtggcgcactcaaagttcgtgatcctgtctgcccacaagctcgtgttcatcggtgacactttatctagacaagcgaaggccgccgacgttagatcacaggttacccactactcgaatttactgtgcgacctgctgcgaggcattgtagctacaaccaaagcagctgctcttcagtaccccagccccagcgcggcacaagacatggtcgagcgcgtcaaggagctgggccattccacccagcaatttcgcagagttttagggcagcttgctgccgcctag

SEQ ID NO: 316469 - DNA, 2526 bp, Artificial Sequence
  derived and/or modified sequence
atgacagtgctggagcaggacacccagggcctggatggctggtggctgtgcagcctgcacggccggcagggcatcgtgcccggcaaccggctgaagatcctggtgggcatgtatgacaagaagccagctggccctggccctggccccccagccaccccagcccagccccagcccggcctgcacgccccagcccccccagccagccagtacacccccatgctgcccaacacctaccagccccagcctgacagcgtgtacctggtgcccacccccagcaaggcccagcagggcctgtaccaggtgcccggccccagcccccagttccagagccccccagccaagcagaccagcaccttcagcaagcagaccccccaccaccccttccccagccctgccacagacctgtaccaggtgcccccaggccctgggggccctgcccaggacatctaccaggtgcccccatctgctggcatgggccatgacatctaccaggtgccccccagcatggacaccaggtcctgggagggcaccaagcccccagccaaggtggtggtgcccaccagggtgggccagggctacgtgtatgaagctgcccagcctgagcaggatgaatatgacatccccaggcacctgctggcccctggcccccaggacatctatgatgtgccccctgtgcggggcctgctgcccagccagtatggccaggaggtgtatgacaccccacccatggctgtgaagggccccaacggccgggaccccctgctggaggtgtatgatgtgcccccatctgtggagaagggcctgccccccagcaaccaccacgctgtgtatgatgtgccccccagcgtgtccaaggatgtgcctgatggccccctgctgcgggaggagacctatgatgtgcccccagcctttgccaaggccaagccctttgatcctgcccggacccccctggtgctggccgcccctcctccagacagccccccagcagaagatgtgtatgatgtgcccccaccagccccagacctgtatgatgtgcccccaggcctgcggcggcccggccctggcaccctgtatgatgtgccccgggagcgggtgctgcccccagaggtggctgatggcggcgtggtggacagcggcgtgtatgctgtgcccccacctgctgagcgggaggccccagctgagggcaagaggctgagcgccagcagcacaggcagcaccaggagcagccagagcgccagcagcctggaggtggccggccctggccgggagcccctggagctggaggtggccgtggaggccctggcccggctgcagcagggcgtgtctgccaccgtggcccacctgctggacctggccggcagcgctggggccaccggctcctggaggagccccagcgagccccaggagcccctggtgcaggacctgcaggccgctgtggccgctgtgcagagcgctgtgcatgagctgctggagtttgcccggtctgctgtgggcaatgctgcccacaccagtgaccgggccctgcacgccaagctgagccggcagctgcagaagatggaggatgtgcaccagaccctggtggcccacggccaggccctggatgctggccggggcggcagcggggccaccctggaggacctggaccggctggtggcctgcagcagagctgtgcctgaagatgccaagcagctggccagcttcctgcatggaaatgccagcctgctcttccggaggaccaaggccacagcccctggccctgagggcggcggcaccctgcaccccaaccccacagacaagaccagcagcatccagagccggcccctgcccagcccccccaagttcaccagccaggacagcccagatggccagtatgaaaattctgagggcggctggatggaggactatgactatgtgcacctgcagggcaaggaggagtttgagaagacccagaaggagctgctggagaagggcagcatcacccggcagggcaagagccagctggagctgcagcagctgaagcagtttgagcggctggagcaggaggtgtcccggcccatcgaccatgacctggccaactggaccccagcccagcccctggcccctggccgcactggaggcctgggccccagcgaccggcagctgctgctcttctacctggagcagtgtgaggccaacctgaccaccctgaccaatgctgtggatgccttcttcaccgctgtggccaccaaccagccccccaagatctttgtggcccacagcaagtttgtgatcctgagcgcccacaagctggtgttcatcggggacaccctgagccggcaggccaaggctgctgatgtgcgcagccaggtgacccactacagcaacctgctgtgtgacctgctgcggggcatcgtggccaccaccaaggccgccgccctgcagtaccccagccccagcgctgcccaggacatggtggagcgggtgaaggagctgggccacagcacccagcagttccggcgggtgctgggccagctggccgccgcctag

SEQ ID NO: 316470 - DNA, 2526 bp, Artificial Sequence
  derived and/or modified sequence
atgaccgtgctggagcaggacacccagggcctggacggctggtggctgtgttcccttcacggtagacaaggaattgtgccgggcaatcggttgaagattctggtgggcatgtacgataagaagcctgccggcccagggccaggacctcctgctaccccagcacagccccaacccggtctgcacgcccctgcacccccagcatcccagtacacaccaatgctgccaaacacctaccagcctcagcctgactccgtgtacctagtgcccacaccttccaaagcccagcagggattgtatcaggtgcccggcccctctccgcagtttcagtccccccctgctaagcaaacctccactttcagcaaacagacaccccatcacccattcccgtcaccagcgactgatctctaccaggtccctcctggacctggaggtccagcacaagacatttaccaagtgcctccaagtgcaggcatgggccatgacatttaccaggtacctcccagtatggataccaggagttgggaaggaaccaagccgcctgccaaggtggtggtccccaccagggtcggacagggttacgtttacgaggccgcccagccagagcaagacgaatatgacattccccgccatttattagctccgggccctcaagatatctacgatgtgccgcccgtgcggggcctccttccatcgcagtacggtcaagaggtatatgacactccacctatggccgtgaagggccccaacggccgggaccccctcctggaagtgtacgatgttccaccatctgtggaaaaggggctgccaccatccaatcaccacgccgtgtacgatgtgccaccgtctgtatccaaagacgtgccggatggtcctttgttaagggaagagacatacgacgtccccccagcttttgctaaggcaaaaccatttgacccggcccgtacgcccctggtacttgctgcccccccccctgactctcccccagccgaggacgtgtacgatgtgcctcctccagcgcccgacctgtatgatgtgccccccggccttcgcagacctggacccggaacactctacgacgtcccacgagagagagttttgcccccggaggtcgctgacggaggggttgtggattcaggcgtctatgccgtgcccccccccgccgaacgtgaggcccctgcagagggtaaaaggctctcagcatcaagcactggtagtaccagatcctcccagagtgctagcagtctagaggtggccggccccggccgtgagcctctagagctggaggtggccgtggaagctctcgcccgcctgcagcagggcgtcagtgccaccgtcgctcacctgcttgacctcgccggctcagctggagccactgggtcttggcgatctccttctgaaccccaggagcctttggtgcaagacctgcaggctgcggtggcagcagtacagtctgccgtgcacgaactcctggagtttgcacgtagcgcagtgggaaatgctgcgcatacatctgatagggcgctgcatgcgaagctcagtaggcagttgcagaagatggaggacgtccatcagaccctggtcgcgcatggtcaggcgctcgacgccgggcggggaggaagtggggctactctggaggacctggatcggctggtagcctgcagccgtgctgtccccgaagatgctaaacagctggcttcattcctccatggcaacgcctcccttctgttccgccggaccaaagctacagcgcctggccccgaagggggaggcactctgcaccccaatcccactgacaagaccagctctatccagagtcgcccactcccatcaccacctaaattcacgtcccaagactctcccgacggacagtatgaaaactctgagggcggctggatggaggattatgactacgtacacctccaggggaaggaggagttcgaaaaaacgcagaaggagctgctggagaaagggtccatcacaagacagggtaagtctcagctggagttgcagcaattaaaacaatttgaacgtctggagcaggaagtgagccggcccattgaccacgatctggctaattggaccccggcgcagccactcgctccaggaaggactggcggccttggtcctagtgaccgacaactcctccttttctacctcgagcagtgcgaagctaacctaactacactcacaaacgccgtcgatgctttcttcacagccgtggctactaatcagccccccaaaatattcgtcgcacattctaagtttgtcatcttgtccgcccataagctggtttttatcggggacacgctgagccggcaagctaaggccgcagacgtacggtcgcaggttacacactatagtaatctgttgtgtgacctgctcagaggcatcgtggccacaactaaagcagccgctcttcaatacccttctccaagcgctgctcaagatatggtggaaagagtcaaagaattaggccattccactcagcaatttcggcgcgtgctgggacagctcgccgccgcctag

SEQ ID NO: 316471 - DNA, 2526 bp, Artificial Sequence
  derived and/or modified sequence
atgaccgtcctggaacaggacactcagggtttggatggctggtggttatgctcgcttcatggtcgccaaggaattgtcccgggtaacaggttaaagatcctcgttgggatgtatgataagaaaccggcaggcccaggccctggtccaccagccacccctgcacagcctcagcccggattacatgcccctgcaccacctgcgtctcagtatacgcctatgctacccaacacctatcaaccgcagcccgattccgtgtatctggtccccactccgtccaaggcccagcaaggactctatcaggttccaggacccagtccccagttccagtcacccccagctaagcagactagtacattctccaaacagactccgcaccatccatttcccagccccgctaccgacctgtatcaggtgcctccaggtcctggcggacccgcacaggacatataccaggtgcctccctccgctggcatggggcacgatatctatcaggtgccacccagcatggatacccgcagctgggagggcaccaagcctcctgccaaagtggtggttccaaccagagtggggcagggttacgtttacgaagccgctcagccggagcaagacgagtatgatattcctagacatttgcttgcaccgggacctcaggatatctatgatgtgcccccagttcggggactgttgccaagccagtatggacaggaagtttatgacactccaccgatggcagtgaaagggccaaatgggagggaccccctgctcgaggtgtacgacgtgcctccatcagtcgagaaggggctccccccttcaaaccaccacgctgtctacgatgtgcctccgtccgtcagtaaggacgtgccagacggacctttgctgcgcgaagaaacgtacgatgtccccccagcttttgcaaaggcaaagcctttcgaccccgcacgtacccctctggtcctagcggctccgcctcctgattctccaccagcagaggacgtgtatgatgtgccacctccagcccctgacctgtacgacgtgccgccagggttgcgtcggccaggccctgggactctgtacgacgttcccagggaaagagttctgcctccggaagtggcagacggcggagtcgtggactcaggtgtgtacgctgtgccaccaccagcagaacgagaagctcctgccgaagggaaaaggttgtccgcgtcttccacggggtccacacgcagctctcagagcgccagtagcctcgaggttgccggtcctgggcgtgagcctctcgagctcgaagtggccgtggaagcactagctcgcctgcaacagggcgtctccgctacggtggcccacttgctggacttagccggaagcgccggagccacaggcagttggcgtagcccctccgagccccaagaacccttggtccaagatttgcaagcagcagtcgcggctgtgcagtctgctgtccatgagctcctcgagtttgcaaggagcgctgtggggaatgccgctcacacaagtgatcgagcccttcacgccaagctgtcaagacaactgcaaaagatggaggacgtacaccagactctcgtggctcacgggcaggcactggacgccggtcgcggaggaagtggggctactctggaggacctggatcgcctggtcgcttgcagccgggctgtcccggaggatgccaaacagctggcttctttcctgcatgggaacgcgtctttactgttcaggagaactaaggcaacagcaccaggccctgagggcggagggaccctgcaccctaatccgacggataagactagctctatccagagtagacctctgcctagcccacctaagttcacctcccaggattcacccgacgggcaatatgaaaattcagagggcggatggatggaggattatgactacgtccatctacaggggaaggaggagttcgaaaaaacacagaaggagctgctagagaaagggagcataaccagacaaggcaagagccaacttgaactgcaacagctcaagcagttcgagagactagaacaggaagtctcaaggccaattgatcacgatctggcaaattggacgcccgcacagcccctggcccctggcagaaccggcggtctgggcccttccgacagacagttattattgttttacctggagcaatgtgaggctaatctgacaaccctcaccaacgccgtggacgcctttttcactgccgtggctacaaaccagccccctaaaatcttcgtggcccattctaagttcgtgatcctctctgctcacaagctagtgtttatcggtgacacactgagtcggcaggcaaaagctgctgatgtacgctctcaggtcactcactactcaaatctgctgtgtgatttactaagaggtatcgtggcaacgactaaggcggctgccctccagtacccaagtccctcggctgctcaagacatggtagagcgggtaaaagaactggggcatagcacccagcagttccggagagtgctaggacagctcgctgccgcttag

SEQ ID NO: 316472 - DNA, 2526 bp, Artificial Sequence
  derived and/or modified sequence
atgaccgtgctggagcaggacacccagggcctggacggctggtggctgtgcagcctgcacggcagacagggcatcgtgcccggcaacagactgaagatcctggtgggcatgtacgacaagaagcccgccggccccggccccggcccccccgccacccccgcccagccccagcccggcctgcacgcccccgccccccccgccagccagtacacccccatgctgcccaacacctaccagccccagcccgacagcgtgtacctggtgcccacccccagcaaggcccagcagggcctgtaccaggtgcccggccccagcccccagttccagagcccccccgccaagcagaccagcaccttcagcaagcagaccccccaccaccccttccccagccccgccaccgacctgtaccaggtgccccccggccccggcggccccgcccaggacatctaccaggtgccccccagcgccggcatgggccacgacatctaccaggtgccccccagcatggacaccagaagctgggagggcaccaagccccccgccaaggtggtggtgcccaccagagtgggccagggctacgtgtacgaggccgcccagcccgagcaggacgagtacgacatccccagacacctgctggcccccggcccccaggacatctacgacgtgccccccgtgagaggcctgctgcccagccagtacggccaggaggtgtacgacaccccccccatggccgtgaagggccccaacggcagagaccccctgctggaggtgtacgacgtgccccccagcgtggagaagggcctgccccccagcaaccaccacgccgtgtacgacgtgccccccagcgtgagcaaggacgtgcccgacggccccctgctgagagaggagacctacgacgtgccccccgccttcgccaaggccaagcccttcgaccccgccagaacccccctggtgctggccgcccccccccccgacagcccccccgccgaggacgtgtacgacgtgcccccccccgcccccgacctgtacgacgtgccccccggcctgagaagacccggccccggcaccctgtacgacgtgcccagagagagagtgctgccccccgaggtggccgacggcggcgtggtggacagcggcgtgtacgccgtgcccccccccgccgagagagaggcccccgccgagggcaagagactgagcgccagcagcaccggcagcaccagaagcagccagagcgccagcagcctggaggtggccggccccggcagagagcccctggagctggaggtggccgtggaggccctggccagactgcagcagggcgtgagcgccaccgtggcccacctgctggacctggccggcagcgccggcgccaccggcagctggagaagccccagcgagccccaggagcccctggtgcaggacctgcaggccgccgtggccgccgtgcagagcgccgtgcacgagctgctggagttcgccagaagcgccgtgggcaacgccgcccacaccagcgacagagccctgcacgccaagctgagcagacagctgcagaagatggaggacgtgcaccagaccctggtggcccacggccaggccctggacgccggcagaggcggcagcggcgccaccctggaggacctggacagactggtggcctgcagcagagccgtgcccgaggacgccaagcagctggccagcttcctgcacggcaacgccagcctgctgttcagaagaaccaaggccaccgcccccggccccgagggcggcggcaccctgcaccccaaccccaccgacaagaccagcagcatccagagcagacccctgcccagcccccccaagttcaccagccaggacagccccgacggccagtacgagaacagcgagggcggctggatggaggactacgactacgtgcacctgcagggcaaggaggagttcgagaagacccagaaggagctgctggagaagggcagcatcaccagacagggcaagagccagctggagctgcagcagctgaagcagttcgagagactggagcaggaggtgagcagacccatcgaccacgacctggccaactggacccccgcccagcccctggcccccggcagaaccggcggcctgggccccagcgacagacagctgctgctgttctacctggagcagtgcgaggccaacctgaccaccctgaccaacgccgtggacgccttcttcaccgccgtggccaccaaccagccccccaagatcttcgtggcccacagcaagttcgtgatcctgagcgcccacaagctggtgttcatcggcgacaccctgagcagacaggccaaggccgccgacgtgagaagccaggtgacccactacagcaacctgctgtgcgacctgctgagaggcatcgtggccaccaccaaggccgccgccctgcagtaccccagccccagcgccgcccaggacatggtggagagagtgaaggagctgggccacagcacccagcagttcagaagagtgctgggccagctggccgccgcctag

SEQ ID NO: 316473 - DNA, 198 bp, Artificial Sequence
  derived and/or modified sequence
atgggaaatcctaggctgcctagactgctttgtgctctgaagttcagcggttttctatccaatatccggggacccctggctggagaggatggtatgggtgatacacagctggctcgagtgcgggattcggccctgaagacaccctggaggcccgctccctgccctcctccagcacattctctagacgattggaaatag

SEQ ID NO: 316474 - DNA, 1158 bp, Artificial Sequence
  derived and/or modified sequence
ccgcgcgtgctcccgcccctcgccgccgctcgctcgctcgccggccggcggcctccgctcggccccctccctcagctccggtgcgcggcggccgacgacccgcgcggcctgggcctcggcccgcgccaccggcgcccgcgcggagcggcccgggggccctcacgcaggcccatggcggcggccgcggcggcgctctcgggcgcgggcacgccacccgcgggcggcggggccgggggcggcggggccgggggcggcgggtccccgccgggcggctgggccgtggcgcgcctggagggccgcgagttcgagtatctgatgaagaagcgctcggtgaccatcggccgcaactcgtcgcagggctcggtggacgtgagcatgggccactcgagcttcatctcccggcgccacctcgagatcttcacgcccccgggcggcggcggccatggcggggccgctccggagctgccgcccgcgcagcccaggcccgacgccggcggcgacttctacctgcgctgcttgggcaagaacggggtattcgtggacggcgtgttccagaggcgcggggcgccgccgctgcagctgccgcgcgtgtgcacattcaggttcccgagcacaaacatcaagataacgttcactgccctgtccagcgagaagagagagaagcaggaggcgtctgagtctccagtgaaggccgtacagccacacatctcgcccctgaccatcaacattccagacaccatggcccacctcatcagccctctgccctcccccacgggaaccatcagcgctgcaaactcctgcccctccagcccccggggagcggggtcttcagggtacaaggtgggccgagtgatgccatctgacctcaatttaatggctgacaactcacagcctgaaaatgaaaaggaagcttcaggtggagacagcccgaaggatgattcaaagccgccttactcctacgcgcagctgatagttcaggcgattacgatggctcccgacaaacagctcaccctgaacgggatttatacacacatcactaaaaattatccctactacaggactgcggacaagggctggcagcgcggcgagtcctttgcacatgttggcaacacacgcatccgcatcggcctccctgcccacaaagcgccacaacggtga

SEQ ID NO: 316475 - DNA, 987 bp, Artificial Sequence
  derived and/or modified sequence
atggcagcagcagccgctgctttgagtggagcaggaaccccccctgctggaggcggagccggcgggggtggggctggtgggggagggtcgcctccaggaggttgggcagtggctaggctcgagggcagagaatttgaatacctgatgaaaaagcggtcagttacgatcggacgcaacagcagccaaggatccgttgatgttagtatggggcactcctccttcatttcgagacgccacctggagatcttcacaccacccgggggaggcgggcatggcggagctgctcccgagcttcctcccgcccagccccggccagacgctggcggagacttctacctcagatgcttgggtaagaacggagtattcgttgatggtgtgtttcaacgccgaggcgcaccccccttacagctgccccgggtctgtacgttccgcttcccctctacaaatattaagataaccttcactgcgttatccagcgaaaagcgagagaaacaggaagctagcgagtccccagtgaaagccgtccagccccatattagcccattgaccattaacatacctgatactatggcgcatctcatcagccccctgcccagccccacagggacaatcagtgcagccaatagctgccctagctcccccagaggagccggtagctcaggctataaggtggggcgagtcatgccaagcgatctgaatctcatggccgataactcccaaccggaaaacgagaaagaggctagtgggggggattctccgaaggatgactcaaaacctccttattcctacgcccagttgattgtacaagctattaccatggctcctgataagcagctgacccttaatggaatatatacccacatcacaaagaattacccctactaccggaccgctgacaaaggttggcaacggggggagagctttgcccacgtgggaaacacacgaattagaatcggcttgccagcccacaaagcaccccaaagatag

SEQ ID NO: 316476 - DNA, 987 bp, Artificial Sequence
  derived and/or modified sequence
atggctgctgctgctgctgccctgtctggagctggcaccccacctgctgggggcggggccggcggcggcggggccggcggcggcggcagccccccaggcggctgggccgtggcccggctggagggccgggagtttgagtacctgatgaagaagaggtctgtgaccatcggcaggaacagcagccagggctctgtggatgtgtccatgggccacagcagcttcatcagcagaagacacctggagatcttcaccccacctgggggcggcggccatggaggagctgcccctgagctgcccccagcccagcccaggccagatgctggaggagacttctacctgcgctgcctgggcaagaatggagtgtttgtggatggagtcttccagaggagaggagccccacccctgcagctgccccgggtgtgcaccttccgcttccccagcaccaacatcaagatcaccttcaccgccctgagcagcgagaagcgggagaagcaggaggccagcgagagccctgtgaaggctgtgcagccccacatcagccccctgaccatcaacatcccagacaccatggcccacctgatcagccccctgcccagccccaccggcaccatctctgctgccaacagctgccccagcagccccagaggagctggcagcagcggctacaaggtgggccgggtgatgcccagcgacctgaacctgatggctgacaacagccagccagaaaatgagaaggaggccagcggcggggacagccccaaggatgacagcaagccaccctacagctatgcccagctgattgtgcaggccatcaccatggccccagacaagcagctgaccctgaatggcatctacacccacatcaccaagaactacccctactacagaacagctgacaagggctggcagagaggagagagctttgcccacgtgggcaacacccgcatccgcatcggcctgcctgcccacaaggccccccagaggtag

SEQ ID NO: 316477 - DNA, 987 bp, Artificial Sequence
  derived and/or modified sequence
atggccgccgccgccgccgccctgagcggcgccggcaccccccccgcgggaggcggggcggggggtggtggcgcaggcggtggcggttccccgcctggggggtgggcagttgctcggctcgaggggagggagtttgagtacttaatgaagaaacgcagcgtgaccataggccggaacagctcccaaggaagcgtcgacgtgagcatgggccattcttctttcatctcaagacgccatctggagatattcacccctcctggcggtggagggcatgggggtgccgccccggaacttcctccagcccagcctaggccagatgccggtggcgatttttacctgcgatgtctggggaaaaacggagtattcgtggacggggtgttccagcgacggggcgctccccctttgcagctccccagggtttgtaccttccgtttcccttctaccaacattaagatcaccttcaccgccctgtcctctgaaaagagggagaaacaggaggcctcggagtcgccagtcaaagcagtgcagcctcacatttcgccccttaccattaacattcctgatactatggcccaccttattagcccattgccatcccccactggtacaattagcgcagctaatagttgtcctagctccccacgtggtgcgggatctagcggatacaaggtgggtcgtgtcatgccctctgacttaaatttgatggctgacaactcccagcccgagaatgagaaggaagcttccgggggtgactctccgaaggacgattcaaagcctccctatagttatgcgcagttgatcgttcaggctattacgatggctcctgataaacagcttacacttaatgggatctatactcatattacaaagaactatccttactaccgtactgcggacaagggttggcaaaggggagaatcattcgcccacgttggcaatacccggatcaggatcggtttgcccgcacacaaggccccgcaacgttag

SEQ ID NO: 316478 - DNA, 987 bp, Artificial Sequence
  derived and/or modified sequence
atggctgcggctgcagccgcactcagcggagccggtacacccccagctgggggaggcgctggaggcggaggagctggagggggtggatcgcccccaggtgggtgggccgtggctcgtctggagggtcgggaattcgaatacctgatgaagaagcggagcgtgaccatcggtcgcaactcctcccagggcagtgtggacgtgagcatgggccacagtagctttataagtcggcgtcacctggagattttcactcctccagggggaggaggacatggaggagctgcccctgagttgcctccagcccaacctagaccagacgccggtggagacttctatctgcgctgcctcggcaaaaacggagtttttgtggatggcgtttttcagcggcgtggggcaccccctctgcaactgccacgtgtctgcacctttcgatttccaagcacaaatatcaagatcacctttacagctctaagctccgagaaaagggaaaagcaggaggcttcagagtctcctgtgaaagctgtgcagcctcacattagccctctgacaataaatataccagacactatggcccatctcatatccccactgcctagcccaactggaaccatcagcgccgcaaattcatgcccatcttcccctagaggtgccggatcgtcagggtacaaagtgggcagggtcatgcccagcgacttaaaccttatggcagacaactctcagccagaaaacgagaaagaggcaagtggtggtgacagtcccaaagacgattccaagcctccttactcctacgcccagctaattgtacaagcgattacgatggcccctgataagcagctcacattgaacggaatctacacccacatcacgaagaactacccatattacaggactgccgataaaggctggcagaggggcgagagctttgctcatgtgggaaatactcggatacggatcggcctgcctgctcacaaagcaccacagcgatag

SEQ ID NO: 316479 - DNA, 987 bp, Artificial Sequence
  derived and/or modified sequence
atggccgccgccgccgccgccctgagcggcgccggcaccccccccgccggcggcggcgccggcggcggcggcgccggcggcggcggcagcccccccggcggctgggccgtggccagactggagggcagagagttcgagtacctgatgaagaagagaagcgtgaccatcggcagaaacagcagccagggcagcgtggacgtgagcatgggccacagcagcttcatcagcagaagacacctggagatcttcaccccccccggcggcggcggccacggcggcgccgcccccgagctgccccccgcccagcccagacccgacgccggcggcgacttctacctgagatgcctgggcaagaacggcgtgttcgtggacggcgtgttccagagaagaggcgccccccccctgcagctgcccagagtgtgcaccttcagattccccagcaccaacatcaagatcaccttcaccgccctgagcagcgagaagagagagaagcaggaggccagcgagagccccgtgaaggccgtgcagccccacatcagccccctgaccatcaacatccccgacaccatggcccacctgatcagccccctgcccagccccaccggcaccatcagcgccgccaacagctgccccagcagccccagaggcgccggcagcagcggctacaaggtgggcagagtgatgcccagcgacctgaacctgatggccgacaacagccagcccgagaacgagaaggaggccagcggcggcgacagccccaaggacgacagcaagcccccctacagctacgcccagctgatcgtgcaggccatcaccatggcccccgacaagcagctgaccctgaacggcatctacacccacatcaccaagaactacccctactacagaaccgccgacaagggctggcagagaggcgagagcttcgcccacgtgggcaacaccagaatcagaatcggcctgcccgcccacaaggccccccagagatag

SEQ ID NO: 316480 - protein, 162 aa, Artificial Sequence
  derived and/or modified sequence
MTTPNKGNKALKVKREPGENGTSLTDEELVTMSVRELNQHLRGLSKEEIVQLKQRRRTLKNRGYAASCRVKRVTQKEELEKQKAELQQEVEKLASENASMKLELDALRSKYEALQTFARTVARSPVAPARGPLAAGLGPLVPGKVAATSVITIVKSKTDARS

SEQ ID NO: 316481 - DNA, 5043 bp, Artificial Sequence
  derived and/or modified sequence
cggcggcggcggatcccgagcctggtccggcccggccttcccagtgcgctcggcccggcccgcgcaggcggcgagtcctccgagccccgggcccggacccctcgcgccggtccctgccccgcgcggcctcggagcgcgcgcggccccgccccgccccggcctcggcccgccgggcccgcagtgtgagagcgcctgctcgctgtgcccccgggttatgacgacccccaataaaggaaacaaggccttgaaggtgaagcgggagccgggtgagaatggcaccagcctgacggatgaggagctggtgaccatgtcggtgcgggagctgaaccagcacctgcggggcctgtccaaggaggagatcgtccagctgaagcagcgccggcgcacgctcaagaaccgcggctacgctgccagctgccgcgtgaagcgggtgacgcagaaggaggagctggagaagcagaaggcggagctgcagcaggaggtggagaagctggcctcagagaacgccagcatgaagctggagctcgacgcgctgcgctccaagtacgaggcgctgcagaccttcgcccggacggtggcccgcagccccgtggcgccagcccggggcccccttgccgccggcctggggcccctcgtcccaggcaaggtggccgccaccagcgtcatcacaatagtaaagtccaagacggatgcccgatcgtagggacgcgcgtctgcccaggcgggtctttgcggggccactaggcacatggcgaatttggctgccctgtccctctgtttccttctcttctctttcctccctctcttccccacccttctctcttccctgcaaagcacaacctgtaccccaggggcgccgggctgagcccctttgatctcgtcattgtcgtcgtgtgttttgtatgttgggattggtcagttcggcggtgacgtggggtcgccccaaccccttttgtaccagggccatgcaggcttggagtccagagttggtgctgtgggaacggactagagagagttgcgggagagagaaggagcaggcacgctgggcctcgcgtgtccccgagcagtgagggtcccagtgttccctccactcccgagtggccacaggctcgcgggctgggaaggattcactctctttagccccaggggagcagctcagcttagcccagcatgaagagatgggctctgctctgagagtagggcgggcttgaaggccctgatgggtggaccaccagcctgggcgcagtggtgctgggggcgtgcagctgggcccaggggctgtgcactcaggcctgacccgttgcactgaacaagaccaaatcgctggttgtgcgcttaacgtgagggtgggtccagtgtgccctgcgatgggtcccgtgtcactgtttacatgacctatttgtgtggttatatagccctttatttaaaagagagaagttccttttacaaagttattaaattaattatatgtttaaaagttaaagaaaaaagagctgcagagtatttataaaactgtcttttagaaaaaaaacaagcaagaagaccatttgaccatatgaatggaaaagggaagaaagtataatagaaactttgctagttaaaaaaaaaagaaaaaaaaagaaaaaaaatccctttcttgtaaacttacggacacctctttgtggctgttggagtttagtttttatatacacagagttatcagacattatttataaaacttagtttaaaaaaaagacaaaaaaaaaaaagccaagccgtgagccgaccagaaggccgtcctctttgatatcttttgcaattgtaccgaaagtgacttactcctctgcccttcctgcttccgtctcttgccggtgccgtggtgtcgtccgtgcctggtgaggttttgtgcagcggtaaagtgctggtgcttctggtgacctttgacctgtgggtgtcacttcttgtgtctgttttcccgtgttcgttttttgggtttagttgtgcttttgcttctgctggcttgctggacctgggctggggtgccaagtggcgcctgctgcgtcagagctcaaggaatctgtgcccaccaccagctcctggtccgtaggaggtgagacatggggttctgtcatgcccccctccactgagccttggctacatctgtgtctagggcttgggctgatctagtggcggggtaggtgaaactggggtcccttggggcgccccacgctgcttccacacccaccacctctggccttgggtggtggcattacagggatgagggagtcactgtgggtggccacagggctatggccaagcgttccctggccgtcttcctctggcctcagctttgttcctataggctgcccgcgccgtgggctgcaggtctcgccgcccgcttgatccctgaggtgtttccatgctgcgggtggtgcttccaggcagagtgggtgggggcccaccgggcaccgccctttcttccttgtccctgcctcactctgagagccttgggggtctccaccagtgcagacaagggctacagtctccagggccgggtcttgtccctcttctccgctggtccacgctggcagctcttggcttcgggcctgccttctgcctccctttgggatctgtgtcttccagggatcagctgcttggcttctgctggaggtgcctccctgtgggggcgcagcctgcctcctgctctcagttcctcgccagaggctgctgcccttcctggctgggctcaggaggctccttgtaggcatatgatggggagggggtgcccctacccacctccaagaggctacagccctgtgtctggccatgtgagccctggcctttcaccgggttgctggtttcttttctgtggggcccagacttctgtaaagcacacagatgtgggtaagatgaaaaactgtggcccaacagggcttaaccctatggatggtgggatttttatccaatagtttggcctggtgtgcccacaggatgggaacagggaggcaccatcaacacttgtcatgttaatgagcttttctttgctcgaggtgttcagagacaagtcctgtgtctacctgcgtcagcctgaaaatggaaatattggctgttgactcttgtcatttagtgacttcatccccctcccctcagtctgatcttgtctaagtagaatccaggcgttagttggaatcatatcataagtatccatgaagaaaacgtcatgatctgcctcggagtggggagaaacaggccctccttgtccttgtgcagcccccacttttgtcctggctgtgggtggccatccattttgagcacctctgccaggctgcagacctggaggcgaagggagtgtggaagaggagggtgtaagggtcgacgcgtgctgaatgggaggtgcaggtcctcggtgcgttggcagaagaggcttctggagtttcgaggccatacctcctttcaagagctttggatttggggcgacttccctgggtctaggggagtgttcctgtcccctgtcaggtcagccctgcggagccactccacccctcttccccttcccctggatttcctgacatagatggtgtgttcatgtgcaggtgtgagtgtgctgtccttctgatctctgttgatcccgctttcctactgagagggtggtggagagggtggtggtctcttctcacctcagtttttctgacacagcgaatcgagggctttggccaaggccaggtctctcaaacttgtccgccaagtaaaccatgatatatgtcttcccttccaccttaactttgccccaactcctcttttatcctaacatggacgctcagatttcagaggaatacccagcagggacaggtcagctctcaccaggagagtgaggcccctggctgctgctcggggtggcactggtgttgctggctcagctcttggtgcatgtttcagatatgtgtgtacacttctgactggtgatcagggcccggcccacggccctgagcggctgcagcctgctttgggacgatggtcaggtcccatgttgtccctgctgcctccctctggagtggccacttggccaaagcgcccatccacatctggaaagtcggagccgcagcctgctgcaccgtttccgctctgggatcttgtgagttacttttttaggctgtggtttggtgaaaggaaccaacacattaacgatttttcccccagaagccactgaataattctttttggtgtatttttgccttcctgttggctgtctggccttggagcaggtcgggagagtagagtacataatcagtgccacacagaggcagggcgtgtctgagagactaatgcctgtcctgcctctggcctgtgtcctgggtgtgtaccatacctgctgggccagtcccacacatttccaccctgcccctggagcagcagctttgataccatgggtgtcccttgagtctgagctagagtgtgtccccgataaactgtgagacctccctgttcttggtgaccccagttgggctttggcccctccagcaaccttgtgtcccagccctgcccttcttcccaccccctcaatctgctagtccctgaagcctttaaccaaacgggagtgggcacagaaagccttctcctggcaacaggacaagggctgcccgcgtgtccagccctgttgctctcctggcgctgagaggtgggtccaagcagagttgatcagtccctgcctgccctgcctaggtctagccaggggaggttgtgtgtgtgggagaagaccccgggatctgctggggtgggatggaggttattaaagatctaagtgaggaggggctggggtttggatgcggggtgaggcccgagcgctcacacttcgtgtagggcgggcaggggcctgacctcttgcagggcagtggccttggtgccctacccctgccctgcgcagtatttattgctaaattattgtccaggaggggcagcactgggcctggccccccgggtatttattgctgtacatagtgtatgtttgtgatatataaggttttctttattttgtatatgatcaataaaccttttaaagagaaaaaa

SEQ ID NO: 316482 - DNA, 489 bp, Artificial Sequence
  derived and/or modified sequence
atgaccacccccaacaagggcaacaaggccctgaaggtgaagagagagcccggcgagaacggcaccagcctgaccgacgaggagctggtgaccatgagcgtgagagagctgaaccagcacctgagaggcctgagcaaggaggagatcgtgcagctgaagcagagaagaagaaccctgaagaacagaggctacgccgccagctgcagagtgaagagagtgacccagaaggaggagctggagaagcagaaggccgagctgcagcaggaggtggagaagctggccagcgagaacgccagcatgaagctggagctggacgccctgagaagcaagtacgaggccctgcagaccttcgccagaaccgtggccagaagccccgtggcccccgccagaggccccctggccgccggcctgggccccctggtgcccggcaaggtggccgccaccagcgtgatcaccatcgtgaagagcaagaccgacgccagaagctag

SEQ ID NO: 316483 - DNA, 489 bp, Artificial Sequence
  derived and/or modified sequence
atgactacaccaaacaaaggaaacaaagcgcttaaggtgaaaagagaaccaggtgagaacgggacgagtctgactgatgaagagttggtgaccatgtccgtgcgcgaactcaatcagcacctgcgggggctgagcaaagaggaaatcgtccaactgaagcaaaggcggcggaccctgaagaatcgcggctatgccgcctcctgtagggtcaagagagtcacccagaaggaggagctggagaaacaaaaggctgaactgcagcaggaagtggagaagctggcgtccgagaacgcatccatgaaactggagctggatgccctgagatccaaatacgaagctctgcagacatttgctaggaccgtcgccaggagccccgtagcgccggcacgtggacctctggccgctggattggggccactggtgccaggtaaggtggccgcgacaagtgtgatcacgatcgttaaatccaagaccgatgcccgcagctag

SEQ ID NO: 316484 - DNA, 489 bp, Artificial Sequence
  derived and/or modified sequence
atgaccaccccaaacaaaggcaacaaggctctgaaggtgaagcgcgagccaggcgaaaacggcacgtctctgaccgatgaagaactggtaaccatgagtgtccgcgagctgaatcagcatctgcgcggcctgagcaaggaggagatcgttcagctcaagcagaggagaaggactctcaagaatcgcggttacgctgcatcgtgcagagtgaagagagttactcaaaaggaggagctcgagaaacagaaggccgagcttcagcaggaggtcgaaaaactggccagtgagaatgcttccatgaagctggaattagatgctttgcgaagcaaatatgaagccttacaaaccttcgcccgtacagttgcccgatcccccgtcgctcccgccagagggcccctggcggccggcctggggccgctcgtccctggaaaagtcgcagcaactagcgtaatcacaatcgtcaaatcgaaaactgacgcgcgttcgtag

SEQ ID NO: 316485 - DNA, 489 bp, Artificial Sequence
  derived and/or modified sequence
atgaccacccccaacaagggcaacaaggccctgaaggtgaagcgggagcctggagaaaatggcaccagcctgacagatgaggagctggtgaccatgtctgtgcgggagctgaaccagcacctgcggggcctgagcaaggaggagatcgtgcagctgaagcagaggaggaggaccctgaagaacagaggctatgctgccagctgccgggtgaagagggtgacccagaaggaggagctggagaagcagaaggccgagctgcagcaggaggtggagaagctggcctctgaaaatgcctccatgaagctggagctggatgccctgcggagcaaatatgaggccctgcagacctttgccaggacagtggcccggagccctgtggccccagcccggggccccctggccgccggcctgggccccctggtgcctgggaaggtggccgccaccagcgtcatcaccatcgtgaagagcaagacagatgcccggagctag

SEQ ID NO: 316486 - DNA, 489 bp, Artificial Sequence
  derived and/or modified sequence
atgaccacccccaacaagggcaacaaggccctgaaggtgaagcgggaacctggtgaaaacggcaccagcctcactgacgaggagctcgtgacgatgtccgtaagggaactgaatcagcatcttaggggcttgagcaaagaagagatcgtacagttgaaacaacggcggcgtacactcaagaaccggggctacgccgctagctgtcgagttaaacgagtcacacagaaagaggaactggaaaagcagaaggctgaactacagcaggaagtcgaaaagctcgcaagtgagaacgcatccatgaagctggaactggacgcactgaggtctaagtacgaggccctccagacctttgccagaaccgtggcccgaagcccagttgcccctgccaggggcccactggccgcgggactgggccctctggtcccaggcaaagtcgctgcaacttccgttatcactattgtgaaatcaaagacagacgccagatcctag

SEQ ID NO: 316487 - DNA, 489 bp, Artificial Sequence
  derived and/or modified sequence
atgaccacccccaacaagggcaacaaggccctgaaggtgaagcgggagcctggagaaaacgggacaagcctgacagatgaagagttggttacgatgagcgtgcgcgagctgaaccagcacctcagaggcctgagcaaggaggaaatcgtccagttgaagcaacggcgtcgcacccttaagaaccgcggctatgctgcatcctgtcgggtgaaaagagtcactcagaaagaggaactggagaagcaaaaggcagagttgcaacaggaagtggaaaaactggctagtgaaaacgcatcaatgaaattggagctcgatgcattgagaagtaaatacgaagccctgcagacattcgctcgaaccgtggctcggtccccagtggcccccgcccgagggccactcgcagccggcctcggccccctcgttcccggaaaggtggcagcaacttcggttatcaccatagtgaagtccaagacagacgcaaggtcttag

SEQ ID NO: 316488 - DNA, 489 bp, Artificial Sequence
  derived and/or modified sequence
atgactacacctaataagggcaataaagccctcaaagtcaaaagagaaccgggagagaacggcaccagcttaaccgacgaggaactcgtgacaatgagtgtccgtgaactaaaccagcatttgagggggctatctaaggaggaaattgttcagctgaagcaaaggaggcgcacactcaagaataggggctatgcagcatcgtgcagggttaagcgcgtaacgcagaaggaggaactggaaaagcagaaggcagaattgcagcaggaggtcgaaaagcttgccagtgagaatgctagcatgaaactggagctagacgcactaagaagtaaatatgaggccctgcagacttttgctagaaccgtggcgcgatccccagtagcccctgctcggggtccactggccgctggtcttggccctctggtgccaggtaaggtcgcggcaaccagcgtgataacgatagtcaagagcaaaaccgacgcacggagctag

SEQ ID NO: 316489 - DNA, 489 bp, Artificial Sequence
  derived and/or modified sequence
atgactacgcctaataagggaaataaggcactgaaggttaaaagggagcctggggagaatggcaccagtctgacagacgaagagctggtgactatgtctgtgagggagttgaatcagcatctccgcggtttgagcaaagaggagatagttcagctaaaacagaggcgaagaacactaaaaaatagaggctacgcggcatcgtgccgcgttaaacgtgtgacacagaaggaggagctggagaagcagaaggccgaactgcagcaagaggtagaaaagttggctagtgaaaatgcaagtatgaaacttgagttggacgccctccgttctaaatatgaggcacttcagacctttgccaggaccgtcgcaagaagccccgttgccccagctagggggcctctcgccgcaggcctgggccctctggtgccaggaaaggtggctgcaacgtcagtgatcacaattgtgaaatcaaaaacagacgccaggtcctag

SEQ ID NO: 316490 - DNA, 5035 bp, Artificial Sequence
  derived and/or modified sequence
cggcggcggcggatcccgagcctggtccggcccggccttcccagtgcgctcggcccggcccgcgcaggcggcgagtcctccgagccccgggcccggacccctcgcgccggtccctgccccgcgcggcctcggagcgcgcgcggccccgccccgccccggcctcggcccgccgggcccgcagtgtgagagcgcctgctcgctgtgcccccgggttatgacgacccccaataaaggaaacaaggccttgaaggtgaagcgggagccgggtgagaatggcaccagcctgacggatgaggagctggtgaccatgtcggtgcgggagctgaaccagcacctgcggggcctgtccaaggaggagatcgtccagctgaagcagcgccggcgcacgctcaagaaccgcggctacgctgccagctgccgcgtgaagcgggtgacgcagaaggaggagctggagaagcagaaggcggagctgcagcaggaggtggagaagctggcctcagagaacgccagcatgaagctggagctcgacgcgctgcgctccaagtacgaggcgctgcagaccttcgcccggacggtggcccgcagccccgtggcgccagcccggggcccccttgccgccggcctggggcccctcgtcccaggcaaggtggccgccaccagcgtcatcacaatagtaaagtccaagacggatgcccgatcgtagggacgcgcgtctgcccaggcgggtctttgcggggccactaggcacatggcgaatttggctgccctgtccctctgtttccttctcttctctttcctccctctcttccccacccttctctcttccctgcaaagcacaacctgtaccccaggggcgccgggctgagcccctttgatctcgtcattgtcgtcgtgtgttttgtatgttgggattggtcagttcggcggtgacgtggggtcgccccaaccccttttgtaccagggccatgcaggcttggagtccagagttggtgctgtgggaacggactagagagagttgcgggagagagaaggagcaggcacgctgggcctcgcgtgtccccgagcagtgagggtcccagtgttccctccactcccgagtggccacaggctcgcgggctgggaaggattcactctctttagccccaggggagcagctcagcttagcccagcatgaagagatgggctctgctctgagagtagggcgggcttgaaggccctgatgggtggaccaccagcctgggcgcagtggtgctgggggcgtgcagctgggcccaggggctgtgcactcaggcctgacccgttgcactgaacaagaccaaatctctggttgtgcgcttaacgtgagggtgggtccagtgtgccctgcgatgggtcccgtgtcactgtttacatgacctatttgtgtggttatatagccctttatttaaaagagagaagttccttttacaaagttattaaattaattatatgtttaaaagttaaagaaaaaagagctgcagagtatttataaaactgtcttttagaaaaaaaacaagcaagaagaccatttgaccatatgaatggaaaagggaagaaagtataatagaaactttgctagttaaaaaaaaaagaaaaaaaaagaaaaaaaatccctttcttgtaaacttacggacacctctttgtggctgttggagtttagtttttatatacacagagttatcagacattatttataaaacttagtttaaaaaaaagacaaaaaaaaaaaagccaagccgtgagccgaccagaaggccgtcctctttgatatcttttgcaattgtaccgaaagtgacttactcctctgcccttcctgcttccgtctcttgccggtgccgtggtgtcgtccgtgcctggtgaggttttgtgcagcggtaaagtgctggtgcttctggtgacctttgacctgtgggtgtcacttcttgtgtctgttttcccgtgttcgttttttgggtttagttgtgcttttgcttctgctggcttgctggacctgggctggggtgccaagtggcgcctgctgcgtcagagctcaaggaatctgtgcccaccaccagctcctggtccgtaggaggtgagacatggggttctgtcatgcccccctccactgagccttggctacatctgtgtctagggcttgggctgatctagtggcggggtaggtgaaactggggtcccttggggcgccccacgctgcttccacacccaccacctctggccttgggtggtggcattacagggatgagggagtcactgtgggtggccacagggctatggccaagcgttccctggccgtcttcctctggcctcagctttgttcctataggctgcccgcgccgtgggctgcaggtctcgccgcccgcttgatccctgaggtgtttccatgctgcgggtggtgcttccaggcagagtgggtgggggcccaccgggcaccgccctttcttccttgtccctgcctcactctgagagccttgggggtctccaccagtgcagacaagggctacagtctccagggccgggtcttgtccctcttctccgctggtccacgctggcagctcttggcttcgggcctgccttctgcctccctttgggatctgtgtcttccagggatcagctgcttggcttctgctggaggtgcctccctgtgggggcgcagcctgcctcctgctctcagttcctcgccagaggctgctgcccttcctggctgggctcaggaggctccttgtaggcatatgatggggagggggtgcccctacccacctccaagaggctacagccctgtgtctggccatgtgagccctggcctttcaccgggttgctggtttcttttctgtggggcccagacttctgtaaagcacacagatgtgggtaagatgaaaaactgtggcccaacagggcttaaccctatggatggtgggatttttatccaatagtttggcctggtgtgcccacaggatgggaacagggaggcaccatcaacacttgtcatgttaatgagcttttctttgctcgaggtgttcagagacaagtcctgtgtctacctgcgtcagcctgaaaatggaaatattggctgttgactcttgtcatttagtgacttcatccccctcccctcagtctgatcttgtctaagtagaatccaggcgttagttggaatcatatcataagtatccatgaagaaaacgtcatgatctgcctcggagtggggagaaacaggccctccttgtccttgtgcagcccccacttttgtcctggctgtgggtggccatccattttgagcacctctgccaggctgcagacctggaggcgaagggagtgtggaagaggagggtgtaagggtcgacgcgtgctgaatgggaggtgcaggtcctcggtgcgttggcagaagaggcttctggagtttcgaggccatacctcctttcaagagctttggatttggggcgacttccctgggtctaggggagtgttcctgtcccctgtcaggtcagccctgcggagccactccacccctcttccccttcccctggatttcctgacatagatggtgtgttcatgtgcaggtgtgagtgtgctgtccttctgatctctgttgatcccgctttcctactgagagggtggtggagagggtggtggtctcttctcacctcagtttttctgacacagcgaatcgagggctttggccaaggccaggtctctcaaacttgtccgccaagtaaaccatgatatatgtcttcccttccaccttaactttgccccaactcctcttttatcctaacatggacgctcagatttcagaggaatacccagcagggacaggtcagctctcaccaggagagtgaggcccctggctgctgctcggggtggcactggtgttgctggctcagctcttggtgcatgtttcagatatgtgtgtacacttctgactggtgatcagggcccggcccacggccctgagcggctgcagcctgctttgggacgatggtcaggtcccatgttgtccctgctgcctccctctggagtggccacttggccaaagcgcccatccacatctggaaagtcggagccgcagcctgctgcaccgtttccgctctgggatcttgtgagttacttttttaggctgtggtttggtgaaaggaaccaacacattaacgatttttcccccagaagccactgaataattctttttggtgtatttttgccttcctgttggctgtctggccttggagcaggtcgggagagtagagtacataatcagtgccacacagaggcagggcgtgtctgagagactaatgcctgtcctgcctctggcctgtgtcctgggtgtgtaccatacctgctgggccagtcccacacatttccaccctgcccctggagcagcagctttgataccatgggtgtcccttgagtctgagctagagtgtgtccccgataaactgtgagacctccctgttcttggtgaccccagttgggctttggcccctccagcaaccttgtgtcccagccctgcccttcttcccaccccctcaatctgctagtccctgaagcctttaaccaaacgggagtgggcacagaaagccttctcctggcaacaggacaagggctgcccgcgtgtccagccctgttgctctcctggcgctgagaggtgggtccaagcagagttgatcagtccctgcctgccctgcctaggtctagccaggggaggttgtgtgtgtgggagaagaccccgggatctgctggggtgggatggaggttattaaagatctaagtgaggaggggctggggtttggatgcggggtgaggcccgagcgctcacacttcgtgtagggcgggcaggggcctgacctcttgcagggcagtggccttggtgccctacccctgccctgcgcagtatttattgctaaattattgtccaggaggggcagcactgggcctggccccccgggtatttattgctgtacatagtgtatgtttgtgatatataaggttttctttattttgtatatgatcaataaaccttttaaag

SEQ ID NO: 316491 - DNA, 5030 bp, Artificial Sequence
  derived and/or modified sequence
ccgcgtcttattccttctaatctctcccctgccccttgtcttgcgcctgccttcctaacagccttcagttccccttctcccgtcagaccttcctgacctcccacctggttctctaggggcagggtggacaggaagcagctcagcccagcctgggagaggccaagggctgcctcctatcagagagcgcctgctcgctgtgcccccgggttatgacgacccccaataaaggaaacaaggccttgaaggtgaagcgggagccgggtgagaatggcaccagcctgacggatgaggagctggtgaccatgtcggtgcgggagctgaaccagcacctgcggggcctgtccaaggaggagatcgtccagctgaagcagcgccggcgcacgctcaagaaccgcggctacgctgccagctgccgcgtgaagcgggtgacgcagaaggaggagctggagaagcagaaggcggagctgcagcaggaggtggagaagctggcctcagagaacgccagcatgaagctggagctcgacgcgctgcgctccaagtacgaggcgctgcagaccttcgcccggacggtggcccgcagccccgtggcgccagcccggggcccccttgccgccggcctggggcccctcgtcccaggcaaggtggccgccaccagcgtcatcacaatagtaaagtccaagacggatgcccgatcgtagggacgcgcgtctgcccaggcgggtctttgcggggccactaggcacatggcgaatttggctgccctgtccctctgtttccttctcttctctttcctccctctcttccccacccttctctcttccctgcaaagcacaacctgtaccccaggggcgccgggctgagcccctttgatctcgtcattgtcgtcgtgtgttttgtatgttgggattggtcagttcggcggtgacgtggggtcgccccaaccccttttgtaccagggccatgcaggcttggagtccagagttggtgctgtgggaacggactagagagagttgcgggagagagaaggagcaggcacgctgggcctcgcgtgtccccgagcagtgagggtcccagtgttccctccactcccgagtggccacaggctcgcgggctgggaaggattcactctctttagccccaggggagcagctcagcttagcccagcatgaagagatgggctctgctctgagagtagggcgggcttgaaggccctgatgggtggaccaccagcctgggcgcagtggtgctgggggcgtgcagctgggcccaggggctgtgcactcaggcctgacccgttgcactgaacaagaccaaatctctggttgtgcgcttaacgtgagggtgggtccagtgtgccctgcgatgggtcccgtgtcactgtttacatgacctatttgtgtggttatatagccctttatttaaaagagagaagttccttttacaaagttattaaattaattatatgtttaaaagttaaagaaaaaagagctgcagagtatttataaaactgtcttttagaaaaaaaacaagcaagaagaccatttgaccatatgaatggaaaagggaagaaagtataatagaaactttgctagttaaaaaaaaaagaaaaaaaaagaaaaaaaatccctttcttgtaaacttacggacacctctttgtggctgttggagtttagtttttatatacacagagttatcagacattatttataaaacttagtttaaaaaaaagacaaaaaaaaaaaagccaagccgtgagccgaccagaaggccgtcctctttgatatcttttgcaattgtaccgaaagtgacttactcctctgcccttcctgcttccgtctcttgccggtgccgtggtgtcgtccgtgcctggtgaggttttgtgcagcggtaaagtgctggtgcttctggtgacctttgacctgtgggtgtcacttcttgtgtctgttttcccgtgttcgttttttgggtttagttgtgcttttgcttctgctggcttgctggacctgggctggggtgccaagtggcgcctgctgcgtcagagctcaaggaatctgtgcccaccaccagctcctggtccgtaggaggtgagacatggggttctgtcatgcccccctccactgagccttggctacatctgtgtctagggcttgggctgatctagtggcggggtaggtgaaactggggtcccttggggcgccccacgctgcttccacacccaccacctctggccttgggtggtggcattacagggatgagggagtcactgtgggtggccacagggctatggccaagcgttccctggccgtcttcctctggcctcagctttgttcctataggctgcccgcgccgtgggctgcaggtctcgccgcccgcttgatccctgaggtgtttccatgctgcgggtggtgcttccaggcagagtgggtgggggcccaccgggcaccgccctttcttccttgtccctgcctcactctgagagccttgggggtctccaccagtgcagacaagggctacagtctccagggccgggtcttgtccctcttctccgctggtccacgctggcagctcttggcttcgggcctgccttctgcctccctttgggatctgtgtcttccagggatcagctgcttggcttctgctggaggtgcctccctgtgggggcgcagcctgcctcctgctctcagttcctcgccagaggctgctgcccttcctggctgggctcaggaggctccttgtaggcatatgatggggagggggtgcccctacccacctccaagaggctacagccctgtgtctggccatgtgagccctggcctttcaccgggttgctggtttcttttctgtggggcccagacttctgtaaagcacacagatgtgggtaagatgaaaaactgtggcccaacagggcttaaccctatggatggtgggatttttatccaatagtttggcctggtgtgcccacaggatgggaacagggaggcaccatcaacacttgtcatgttaatgagcttttctttgctcgaggtgttcagagacaagtcctgtgtctacctgcgtcagcctgaaaatggaaatattggctgttgactcttgtcatttagtgacttcatccccctcccctcagtctgatcttgtctaagtagaatccaggcgttagttggaatcatatcataagtatccatgaagaaaacgtcatgatctgcctcggagtggggagaaacaggccctccttgtccttgtgcagcccccacttttgtcctggctgtgggtggccatccattttgagcacctctgccaggctgcagacctggaggcgaagggagtgtggaagaggagggtgtaagggtcgacgcgtgctgaatgggaggtgcaggtcctcggtgcgttggcagaagaggcttctggagtttcgaggccatacctcctttcaagagctttggatttggggcgacttccctgggtctaggggagtgttcctgtcccctgtcaggtcagccctgcggagccactccacccctcttccccttcccctggatttcctgacatagatggtgtgttcatgtgcaggtgtgagtgtgctgtccttctgatctctgttgatcccgctttcctactgagagggtggtggagagggtggtggtctcttctcacctcagtttttctgacacagcgaatcgagggctttggccaaggccaggtctctcaaacttgtccgccaagtaaaccatgatatatgtcttcccttccaccttaactttgccccaactcctcttttatcctaacatggacgctcagatttcagaggaatacccagcagggacaggtcagctctcaccaggagagtgaggcccctggctgctgctcggggtggcactggtgttgctggctcagctcttggtgcatgtttcagatatgtgtgtacacttctgactggtgatcagggcccggcccacggccctgagcggctgcagcctgctttgggacgatggtcaggtcccatgttgtccctgctgcctccctctggagtggccacttggccaaagcgcccatccacatctggaaagtcggagccgcagcctgctgcaccgtttccgctctgggatcttgtgagttacttttttaggctgtggtttggtgaaaggaaccaacacattaacgatttttcccccagaagccactgaataattctttttggtgtatttttgccttcctgttggctgtctggccttggagcaggtcgggagagtagagtacataatcagtgccacacagaggcagggcgtgtctgagagactaatgcctgtcctgcctctggcctgtgtcctgggtgtgtaccatacctgctgggccagtcccacacatttccaccctgcccctggagcagcagctttgataccatgggtgtcccttgagtctgagctagagtgtgtccccgataaactgtgagacctccctgttcttggtgaccccagttgggctttggcccctccagcaaccttgtgtcccagccctgcccttcttcccaccccctcaatctgctagtccctgaagcctttaaccaaacgggagtgggcacagaaagccttctcctggcaacaggacaagggctgcccgcgtgtccagccctgttgctctcctggcgctgagaggtgggtccaagcagagttgatcagtccctgcctgccctgcctaggtctagccaggggaggttgtgtgtgtgggagaagaccccgggatctgctggggtgggatggaggttattaaagatctaagtgaggaggggctggggtttggatgcggggtgaggcccgagcgctcacacttcgtgtagggcgggcaggggcctgacctcttgcagggcagtggccttggtgccctacccctgccctgcgcagtatttattgctaaattattgtccaggaggggcagcactgggcctggccccccgggtatttattgctgtacatagtgtatgtttgtgatatataaggttttctttattttgtatatgatcaataaaccttttaaag

SEQ ID NO: 316492 - protein, 319 aa, Artificial Sequence
  derived and/or modified sequence
MSVGFIGAGQLAFALAKGFTAAGVLAAHKIMASSPDMDLATVSALRKMGVKLTPHNKETVQHSDVLFLAVKPHIIPFILDEIGADIEDRHIVVSCAAGVTISSIEKKLSAFRPAPRVIRCMTNTPVVVREGATVYATGTHAQVEDGRLMEQLLSSVGFCTEVEEDLIDAVTGLSGSGPAYAFTALDALADGGVKMGLPRRLAVRLGAQALLGAAKMLLHSEQHPGQLKDNVSSPGGATIHALHVLESGGFRSLLINAVEASCIRTRELQSMADQEQVSPAAIKKTILDKVKLDSPAGTALSPSGHTKLLPRSLAPAGKD

SEQ ID NO: 316493 - protein, 272 aa, Artificial Sequence
  derived and/or modified sequence
MSVGFIGAGQLAFALAKGFTAAGVLAAHKIMASSPDMDLATVSALRKMGVKLTPHNKETVQHSDVLFLAVKPHIIPFILDEIGADIEDRHIVVSCAAGVTISSIEKKLSAFRPAPRVIRCMTNTPVVVREGATVYATGTHAQVEDGRLMEQLLSSVGFCTEVEEDLIDAVTGLSGSGPAYAFTALDALADGGVKMGLPRRLAVRLGAQALLGGCQDAAALRTAPRPAQGQRQLSWWGHHPCLACAGEWGLPLPAHQRCGGLLHPHTGAAVHG

SEQ ID NO: 316494 - DNA, 960 bp, Artificial Sequence
  derived and/or modified sequence
atgtctgtggggtttatcggcgctgggcagctggcattcgctctggccaaaggtttcactgcagcaggtgtgctagccgcgcacaagattatggcaagcagcccagatatggatctcgctacagtgagtgccctccggaaaatgggagtcaaacttacccctcacaacaaggagacagtgcaacattctgatgtcctcttcttggccgttaagccgcacatcataccttttatcctagacgaaatcggggccgacattgaagaccgccacattgtggtgagctgcgccgccggcgtgactatcagctcaattgagaaaaagctgtccgcttttcgacccgctccacgagtgattagatgcatgacaaatactcccgttgtggttagggaaggtgctaccgtatacgcaacgggcactcacgctcaggtggaagatggccgcctgatggagcaactgctaagcagcgtcgggttttgcacggaggtcgaggaggatctaattgacgctgtaacaggcctttctggaagcgggcccgcttacgcgttcacagcactcgacgccctcgctgacggaggggtgaagatgggactaccacgaaggctggccgtaagactgggagcccaggcgctgcttggagccgccaaaatgctgctgcatagcgagcaacatcctggccagcttaaagataacgtgagcagtcccgggggagctactattcacgccttacacgtgctcgaaagcggcggattcagatccttgttgataaacgccgtggaggcctcctgtattagaacacgagagctccagagcatggctgatcaagaacaagtgagccccgcagccatcaagaagacaatattggacaaggtgaaattggactcaccagcagggacagctctctctccttctggtcatactaagctgcttccccggtcactggcaccagccggcaaagactag

SEQ ID NO: 316495 - DNA, 960 bp, Artificial Sequence
  derived and/or modified sequence
atgtctgtgggcttcatcggggccggccagctggcctttgccctggccaagggcttcaccgctgctggggtgctggccgcccacaagatcatggccagcagcccagacatggacctggccaccgtgtctgccctgaggaagatgggcgtgaagctgaccccccacaacaaggagaccgtgcagcacagtgatgtgctcttcctggccgtgaagccccacatcatccccttcatcctggatgagatcggggctgacattgaagatagacacatcgtggtgtcctgtgccgccggcgtgaccatcagcagcattgagaagaagctgagcgccttccggcctgcccccagggtcatccgctgcatgaccaacacccctgtggtggtgcgggagggcgccaccgtgtatgccaccggcacccacgcccaggtggaggatggccgcctgatggagcagctgctgagctctgtgggcttctgcacagaggtggaggaggacctgattgatgctgtgacaggcctgagcggcagcggccctgcctatgccttcaccgccctggatgccctggctgatggcggcgtgaagatgggcctgccccggcggctggccgtgcggctgggcgcccaggccctgctgggcgccgccaagatgctgctgcacagcgagcagcaccctggccagctgaaggacaacgtgagcagccctgggggcgccaccatccacgccctgcacgtgctggagagcggcggcttccgcagcctgctgatcaatgctgtggaggccagctgcatccgcacccgggagctgcagagcatggctgaccaggagcaggtgtccccagctgccatcaagaagaccatcctggacaaggtgaagctggacagccctgctggaacagccctgagccccagcggccacaccaagctgctgcccaggagcctggccccagctgggaaggactag

SEQ ID NO: 316496 - DNA, 960 bp, Artificial Sequence
  derived and/or modified sequence
atgagcgtgggcttcatcggcgccggccagctggccttcgccctggctaagggatttacagccgctggcgtgttagctgcacacaaaatcatggcgtccagccccgacatggacttggcaacggtttccgccttgaggaagatgggggtcaagcttaccccccacaataaagaaactgtacagcacagcgacgtgctgttcctcgctgtcaagcctcatatcattccttttatactggacgagataggggcagatatcgaggaccggcacatcgtcgtatcatgtgccgccggcgtgaccatctcctccatcgagaagaagctgagcgcatttcgacctgctcccagggtgatcagatgcatgaccaacaccccagtggttgtgcgggagggtgccaccgtctatgccacaggcacacacgcccaagtagaggatggaaggctcatggagcagcttctgtcctctgtcggtttttgcacagaggtagaggaagatttgattgacgccgtaacagggctaagtggctctggcccagcttacgcttttacggcactggatgccctggccgatggcggagtaaagatggggctgccgaggaggcttgcagtgcggctgggggcccaggccctgcttggggcagctaaaatgcttttgcatagtgaacaacaccccggacaactcaaagacaacgtttctagtcctggtggcgccactattcacgcccttcacgttctggagagcgggggtttccgtagcctcctgataaacgctgttgaggcttcctgcatccgtaccagggagttacagagcatggcagatcaggagcaggtgagccccgcagctattaaaaagaccatcctcgacaaagtgaagctggacagccccgctgggactgccctctcaccttctggccacaccaagctgttgccacgttcattggcacccgcgggaaaggactag

SEQ ID NO: 316497 - DNA, 960 bp, Artificial Sequence
  derived and/or modified sequence
atgtcagttggatttatcggcgcaggacaactggcctttgcacttgctaaaggcttcacagcggcaggcgttctggctgcccacaagattatggccagcagccccgatatggacctcgccactgtcagcgcactgaggaagatgggcgtgaaattgaccccccataacaaggaaaccgtgcagcacagtgatgtgctgtttcttgcagtaaagcctcatatcattccctttatacttgacgagatcggcgcagacattgaggatagacatatcgttgtatcatgtgcagccggtgtgacaatttcatcgatagaaaaaaaactttctgcgttcagaccagctccccgagttattaggtgcatgaccaacacgccagtagtggtgagagaaggggctaccgtgtacgccacaggaacccacgcccaagttgaggatggccgtctgatggagcagctgttgtcaagcgtgggattctgcaccgaggtggaagaggatttaatagatgccgtcaccggcttgtctgggtctggacctgcctacgcgttcactgccctcgatgccctggcagatggcggtgtgaagatgggcttgccacgtcgactcgctgttaggctcggagcccaagcattgctgggagcagccaagatgctactccacagtgaacagcatcccggtcagttgaaggacaacgtttcctcacctggaggcgctactatacacgcattgcatgttctagagtctgggggtttccgcagcctgttaataaacgccgttgaagcaagctgtatcagaaccagagagctgcaatctatggcagaccaggagcaggtgagccccgcagctattaagaagactatactggacaaggttaagctagacagccccgcaggcacagctctgagcccttccggccacacaaaattgttacccagatcgcttgcgcctgctggcaaggactag

SEQ ID NO: 316498 - DNA, 960 bp, Artificial Sequence
  derived and/or modified sequence
atgagcgtgggcttcatcggcgccggccagctggccttcgccctggccaagggcttcaccgccgccggcgtgctggccgcccacaagatcatggccagcagccccgacatggacctggccaccgtgagcgccctgagaaagatgggcgtgaagctgaccccccacaacaaggagaccgtgcagcacagcgacgtgctgttcctggccgtgaagccccacatcatccccttcatcctggacgagatcggcgccgacatcgaggacagacacatcgtggtgagctgcgccgccggcgtgaccatcagcagcatcgagaagaagctgagcgccttcagacccgcccccagagtgatcagatgcatgaccaacacccccgtggtggtgagagagggcgccaccgtgtacgccaccggcacccacgcccaggtggaggacggcagactgatggagcagctgctgagcagcgtgggcttctgcaccgaggtggaggaggacctgatcgacgccgtgaccggcctgagcggcagcggccccgcctacgccttcaccgccctggacgccctggccgacggcggcgtgaagatgggcctgcccagaagactggccgtgagactgggcgcccaggccctgctgggcgccgccaagatgctgctgcacagcgagcagcaccccggccagctgaaggacaacgtgagcagccccggcggcgccaccatccacgccctgcacgtgctggagagcggcggcttcagaagcctgctgatcaacgccgtggaggccagctgcatcagaaccagagagctgcagagcatggccgaccaggagcaggtgagccccgccgccatcaagaagaccatcctggacaaggtgaagctggacagccccgccggcaccgccctgagccccagcggccacaccaagctgctgcccagaagcctggcccccgccggcaaggactag

SEQ ID NO: 316499 - DNA, 819 bp, Artificial Sequence
  derived and/or modified sequence
atgtctgtgggcttcattggtgccgggcagctggctttcgcccttgccaaaggattcaccgccgctggggtgctggccgcccataagattatggccagttcgcctgacatggatctggctactgtatcagcgctccgaaagatgggcgtcaaacttacccctcataataaggaaacagtgcaacacagtgatgtgttgtttcttgccgtaaagccccacatcatcccctttatccttgacgagatcggcgcagatattgaggacaggcatattgtcgtcagctgtgcagcgggggtcacaattagctctatcgaaaagaaactcagcgccttccgccctgcgcctagggtgatccgctgtatgactaacactcctgtggtcgtacgagagggcgctaccgtgtatgccaccggcacccacgcccaggtggaggatgggagattaatggaacaactcctgagctctgtcggcttctgcacggaggtggaggaagacctaatcgacgccgttaccgggctatcaggttccgggccagcttacgctttcactgccctggacgctctggctgatggtggggtgaaaatgggcctgcctcgcaggctggccgttcggctcggcgcccaggcattactgggaggttgtcaagacgcagcagcccttcgaaccgcccctcgcccggcacaaggccagcgacagctgtcctggtggggccaccacccttgcctggcgtgtgcaggcgagtgggggctcccactcccggcccatcagcggtgcggggggctgctgcatccccacacaggagccgcagtccacggatag

SEQ ID NO: 316500 - DNA, 819 bp, Artificial Sequence
  derived and/or modified sequence
atgtctgtgggcttcatcggggccggccagctggcctttgccctggccaagggcttcaccgctgctggggtgctggccgcccacaagatcatggccagcagcccagacatggacctggccaccgtgtctgccctgaggaagatgggcgtgaagctgaccccccacaacaaggagaccgtgcagcacagtgatgtgctcttcctggccgtgaagccccacatcatccccttcatcctggatgagatcggggctgacattgaagatagacacatcgtggtgtcctgtgccgccggcgtgaccatcagcagcattgagaagaagctgagcgccttccggcctgcccccagggtcatccgctgcatgaccaacacccctgtggtggtgcgggagggcgccaccgtgtatgccaccggcacccacgcccaggtggaggatggccgcctgatggagcagctgctgagctctgtgggcttctgcacagaggtggaggaggacctgattgatgctgtgacaggcctgagcggcagcggccctgcctatgccttcaccgccctggatgccctggctgatggcggcgtgaagatgggcctgccccggcggctggccgtgcggctgggcgcccaggccctgctgggcggctgccaggatgctgctgccctgaggacagcccccaggcctgcccagggccagaggcagctgtcctggtggggccaccacccctgcctggcctgtgccggggagtggggcctgcccctgcctgcccaccagagatgtggcggcctgctgcacccccacactggagctgctgtgcatggatag

SEQ ID NO: 316501 - DNA, 819 bp, Artificial Sequence
  derived and/or modified sequence
atgagcgtgggcttcatcggcgccggccagctggccttcgccctggctaagggcttcactgcggcaggcgtcctggcagctcacaagatcatggcgtctagcccggatatggacctcgctactgtcagcgcccttcgtaaaatgggggtgaaactgactccacataacaaggagactgtgcagcactctgatgtcctgttcctggctgtgaagccccatatcatcccatttatactcgacgagatcggggccgatatcgaggacaggcatattgtggtttcttgcgccgccggcgttacaatttcctctatagaaaaaaaactttccgctttccgacctgcaccacgcgtgataaggtgcatgaccaacacccctgttgtggtccgagagggcgctacagtctacgcaacaggaacgcatgctcaggtggaggatggaagactgatggagcaactgctgtccagcgtgggattctgtacagaagttgaggaagatctcatcgatgccgtgacaggcctgtcagggagcgggcctgcgtacgcctttacagccttggacgccctggctgacgggggagtaaagatgggactgcctcggcgcctcgcagtccggctcggagctcaggccttgctgggcggatgtcaggatgcggccgctctgcgtaccgcccctcgccccgcacagggtcaacgtcaactgtcgtggtggggccatcatccatgcttagcgtgcgctggggaatggggcctgcccttgccggcgcaccagcggtgcggagggttgctccaccctcataccggcgcagctgtgcatggttag

SEQ ID NO: 316502 - DNA, 819 bp, Artificial Sequence
  derived and/or modified sequence
atgtccgttggattcatcggggctgggcagttggctttcgcgttggccaaaggcttcaccgccgcaggggttctagcggcacataaaataatggctagctccccggatatggatcttgccaccgtgtctgccttgagaaagatgggcgtgaaactgacaccccataataaagaaactgtgcagcatagcgacgttctcttcctggcagtgaaacctcacattatccccttcattttagacgagattggagcagatatagaggaccgccacattgtggtcagctgtgctgcaggcgttacaatttcttcaatcgaaaaaaaactcagcgccttcaggcccgctcccagagttatccgctgtatgaccaacactcccgtggtcgttcgagagggtgccactgtctacgccactgggacacatgcccaagttgaagacggtagactgatggagcagctcttgagttccgtgggattctgtacagaggttgaggaagaccttatcgacgccgtgacgggcctatcaggatctggtcccgcttatgcatttacagccctagacgccttagcagacggtggggttaaaatggggctccccagacgattagctgtaaggctcggcgctcaggcattactgggcggttgtcaggatgccgctgccctgcgcaccgcacctagacccgcacagggtcagcgacaattgtcatggtggggccatcatccctgtctggcttgtgcgggtgaatgggggctgccattgccggctcatcaacgctgcggaggtctcttgcatcctcacacaggcgctgcagttcatgggtag

SEQ ID NO: 316503 - DNA, 1717 bp, Artificial Sequence
  derived and/or modified sequence
agtcatttcttctgcggaacctccacccctccagtgggtgcgggaccctaggcagcaggccaggcaccgccgctctgactgggggccccgaagcagttaacgggccggacagcaaagtggaaagttagaccagctgggaccaggggaggtgggcacccggctgcgggaggagcggccaggctggcactgcccccctaacttgctctcgatcctgccggtctcgtcccgcagagccggtgccatctgtgggggctttgggccaggggtctccggacagcatgagcgtgggcttcatcggcgctggccagctggcttttgccctggccaagggcttcacagcagcaggcgtcttggctgcccacaagataatggctagctccccagacatggacctggccacagtttctgctctcaggaagatgggggtgaagttgacaccccacaacaaggagacggtgcagcacagtgatgtgctcttcctggctgtgaagccacacatcatccccttcatcctggatgaaataggcgccgacattgaggacagacacattgtggtgtcctgcgcggccggcgtcaccatcagctccattgagaagaagctgtcagcgtttcggccagcccccagggtcatccgctgcatgaccaacactccagtcgtggtgcgggagggggccaccgtgtatgccacaggcacgcacgcccaggtggaggacgggaggctcatggagcagctgctgagcagcgtgggcttctgcacggaggtggaagaggacctgattgatgccgtcacggggctcagtggcagcggccccgcctacgcattcacagccctggatgccctggctgatgggggtgtgaagatgggacttccaaggcgcctggcagtccgcctcggggcccaggccctcctggggggctgccaagatgctgctgcactcagaacagcacccaggccagctcaaggacaacgtcagctctcctggtggggccaccatccatgccttgcatgtgctggagagtgggggcttccgctccctgctcatcaacgctgtggaggcctcctgcatccgcacacgggagctgcagtccatggctgaccaggagcaggtgtcaccagccgccatcaagaagaccatcctggacaaggaccaccttcctctagagctcgggagcccggagggtcttcacccactcctactccagtatcagctggcacgggctccttcctgagagcaaaggtcaaggaccccctctgtgaaggctcagcagaggtgggatcccacgccccctcccggcccctccctgccctccattcagggagaaacctctccttcccgtgtgagaagggccagagggtccaggcatcccaagtccagcgtgaagggccacagcccctcttggctgccaagcacgcagatcccatggacatttggggaaagggctccttgggctgctggtgaacttctgtggccaccacctcctgctcctgacctccctgggagggtgctatcagttctgtcctggccctttcagttttataagttggtttccagcccccagtgtcctgacttctgtctgccacatgaggagggaggccctgcctgtgtgggagggtggttactgtgggtggaatagtggaggccttcaactgattagacaaggcccgcccacatcttggagggcatctgccttactgattaaaatgtcaatgtaatct

SEQ ID NO: 316504 - DNA, 819 bp, Artificial Sequence
  derived and/or modified sequence
atgagcgtgggcttcatcggcgccggccagctggccttcgccctggccaagggcttcaccgccgccggcgtgctggccgcccacaagatcatggccagcagccccgacatggacctggccaccgtgagcgccctgagaaagatgggcgtgaagctgaccccccacaacaaggagaccgtgcagcacagcgacgtgctgttcctggccgtgaagccccacatcatccccttcatcctggacgagatcggcgccgacatcgaggacagacacatcgtggtgagctgcgccgccggcgtgaccatcagcagcatcgagaagaagctgagcgccttcagacccgcccccagagtgatcagatgcatgaccaacacccccgtggtggtgagagagggcgccaccgtgtacgccaccggcacccacgcccaggtggaggacggcagactgatggagcagctgctgagcagcgtgggcttctgcaccgaggtggaggaggacctgatcgacgccgtgaccggcctgagcggcagcggccccgcctacgccttcaccgccctggacgccctggccgacggcggcgtgaagatgggcctgcccagaagactggccgtgagactgggcgcccaggccctgctgggcggctgccaggacgccgccgccctgagaaccgcccccagacccgcccagggccagagacagctgagctggtggggccaccacccctgcctggcctgcgccggcgagtggggcctgcccctgcccgcccaccagagatgcggcggcctgctgcacccccacaccggcgccgccgtgcacggctag

SEQ ID NO: 316505 - protein, 311 aa, Artificial Sequence
  derived and/or modified sequence
MAGRLPRALADDVVGSVLDCFSFQETDKAWHGGCLALAELGRRGLLLPSRLVDVVAVILKALTYDEKRGACSVGTNVRDAACYVCWAFARAYEPQELKPFVTAISSALVIAAVFDRDINCRRAASAAFQENVGRQGTFPHGIDILTTADYFAVGNRSNCFLVISVFIAGFPEYTQPMIDHLVTMKISHWDGVIRELAARALHNLAQQAPEFSATQVFPRLLSMTLSPDLHMRHGSILACAEVAYALYKLAAQENRPVTDHLDEQAVQGLKQIHQQPCICSWGLMSPESKAEFCVCVCRISLGRQCVHLSGL

SEQ ID NO: 316506 - DNA, 1269 bp, Artificial Sequence
  derived and/or modified sequence
atggccctgagcgacgagcccgccgccggcggccccgaggaggaggccgaggacgagaccctggccttcggcgccgccctggaggccttcggcgagagcgccgagaccagagccctgctgggcagactgagagaggtgcacggcggcggcgccgagagagaggtggccctggagagattcagagagtggatgatgaacctgctgctggacatcgtgcaggaccagaccagccccgccagcctggtgcacctggccttcaagttcctgtacatcatcaccaaggtgagaggctacaagaccttcctgagactgttcccccacgaggtggccgacgtggagcccgtgctggacctggtgaccatccagaaccccaaggaccacgaggcctgggagaccagatacatgctgctgctgtggctgagcgtgacctgcctgatccccttcgacttcagcagactggacggcaacctgctgacccagcccggccaggccagaatgagcatcatggacagaatcctgcagatcgccgagagctacctgatcgtgagcgacaaggccagagacgccgccgccgtgctggtgagcagattcatcaccagacccgacgtgaagcagagcaagatggccgagttcctggactggagcctgtgcaacctggccagaagcagcttccagaccatgcagggcgtgatcaccatggacggcaccctgcaggccctggcccagatcttcaagcacggcaagagagaggactgcctgccctacgccgccaccgtgctgagatgcctggacggctgcagactgcccgagagcaaccagaccctgctgagaaagctgggcgtgaagctggtgcagagactgggcctgaccttcctgaagcccaaggtggccgcctggagataccagagaggctgcagaagcctggccgccaacctgcagctgctgacccagggccagagcgagcagaagcccctgatcctgaccgaggacgacgacgaggacgacgacgtgcccgagggcgtggagagagtgatcgagcagctgctggtgggcctgaaggacaaggacaccgtggtgagatggagcgccgccaagggcatcggcagaatggccggcagactgcccagagccctggccgacgacgtggtgggcagcgtgctggactgcttcagcttccaggagaccgacaaggcctggcacggcggctgcctggccctggccgagctgggcagaagaggcctgctgctgcccagcagactggtggactag

SEQ ID NO: 316507 - DNA, 936 bp, Artificial Sequence
  derived and/or modified sequence
atggccggcagactgcccagagccctggccgacgacgtggtgggcagcgtgctggactgcttcagcttccaggagaccgacaaggcctggcacggcggctgcctggccctggccgagctgggcagaagaggcctgctgctgcccagcagactggtggacgtggtggccgtgatcctgaaggccctgacctacgacgagaagagaggcgcctgcagcgtgggcaccaacgtgagagacgccgcctgctacgtgtgctgggccttcgccagagcctacgagccccaggagctgaagcccttcgtgaccgccatcagcagcgccctggtgatcgccgccgtgttcgacagagacatcaactgcagaagagccgccagcgccgccttccaggagaacgtgggcagacagggcaccttcccccacggcatcgacatcctgaccaccgccgactacttcgccgtgggcaacagaagcaactgcttcctggtgatcagcgtgttcatcgccggcttccccgagtacacccagcccatgatcgaccacctggtgaccatgaagatcagccactgggacggcgtgatcagagagctggccgccagagccctgcacaacctggcccagcaggcccccgagttcagcgccacccaggtgttccccagactgctgagcatgaccctgagccccgacctgcacatgagacacggcagcatcctggcctgcgccgaggtggcctacgccctgtacaagctggccgcccaggagaacagacccgtgaccgaccacctggacgagcaggccgtgcagggcctgaagcagatccaccagcagccctgcatctgcagctggggcctgatgagccccgagagcaaggccgagttctgcgtgtgcgtgtgcagaatcagcctgggcagacagtgcgtgcacctgagcggcctgtag

SEQ ID NO: 316508 - DNA, 2253 bp, Artificial Sequence
  derived and/or modified sequence
atggccctgagcgacgagcccgccgccggcggccccgaggaggaggccgaggacgagaccctggccttcggcgccgccctggaggccttcggcgagagcgccgagaccagagccctgctgggcagactgagagaggtgcacggcggcggcgccgagagagaggtggccctggagagattcagagtgatcatggacaagtaccaggagcagccccacctgctggacccccacctggagtggatgatgaacctgctgctggacatcgtgcaggaccagaccagccccgccagcctggtgcacctggccttcaagttcctgtacatcatcaccaaggtgagaggctacaagaccttcctgagactgttcccccacgaggtggccgacgtggagcccgtgctggacctggtgaccatccagaaccccaaggaccacgaggcctgggagaccagatacatgctgctgctgtggctgagcgtgacctgcctgatccccttcgacttcagcagactggacggcaacctgctgacccagcccggccaggccagaatgagcatcatggacagaatcctgcagatcgccgagagctacctgatcgtgagcgacaaggccagagacgccgccgccgtgctggtgagcagattcatcaccagacccgacgtgaagcagagcaagatggccgagttcctggactggagcctgtgcaacctggccagaagcagcttccagaccatgcagggcgtgatcaccatggacggcaccctgcaggccctggcccagatcttcaagcacggcaagagagaggactgcctgccctacgccgccaccgtgctgagatgcctggacggctgcagactgcccgagagcaaccagaccctgctgagaaagctgggcgtgaagctggtgcagagactgggcctgaccttcctgaagcccaaggtggccgcctggagataccagagaggctgcagaagcctggccgccaacctgcagctgctgacccagggccagagcgagcagaagcccctgatcctgaccgaggacgacgacgaggacgacgacgtgcccgagggcgtggagagagtgatcgagcagctgctggtgggcctgaaggacaaggacaccgtggtgagatggagcgccgccaagggcatcggcagaatggccggcagactgcccagagccctggccgacgacgtggtgggcagcgtgctggactgcttcagcttccaggagaccgacaaggcctggcacggcggctgcctggccctggccgagctgggcagaagaggcctgctgctgcccagcagactggtggacgtggtggccgtgatcctgaaggccctgacctacgacgagaagagaggcgcctgcagcgtgggcaccaacgtgagagacgccgcctgctacgtgtgctgggccttcgccagagcctacgagccccaggagctgaagcccttcgtgaccgccatcagcagcgccctggtgatcgccgccgtgttcgacagagacatcaactgcagaagagccgccagcgccgccttccaggagaacgtgggcagacagggcaccttcccccacggcatcgacatcctgaccaccgccgactacttcgccgtgggcaacagaagcaactgcttcctggtgatcagcgtgttcatcgccggcttccccgagtacacccagcccatgatcgaccacctggtgaccatgaagatcagccactgggacggcgtgatcagagagctggccgccagagccctgcacaacctggcccagcaggcccccgagttcagcgccacccaggtgttccccagactgctgagcatgaccctgagccccgacctgcacatgagacacggcagcatcctggcctgcgccgaggtggcctacgccctgtacaagctggccgcccaggagaacagacccgtgaccgaccacctggacgagcaggccgtgcagggcctgaagcagatccaccagcagctgtacgacagacagctgtacagaggcctgggcggccagctgatgagacaggccgtgtgcgtgctgatcgagaagctgagcctgagcaagatgcccttcagaggcgacaccgtgatcgacggctggcagtggctgatcaacgacagcctgtggctgctggtgggcctgggcagacccagcagactgcccagcgagagacccgcccccgccggcagccacagattcaagagcagctacccccacttccccagaggcagaaagttctgctag

SEQ ID NO: 316509 - DNA, 1269 bp, Artificial Sequence
  derived and/or modified sequence
atggccctcagcgacgagcctgccgcaggaggaccagaagaagaggcagaggatgagacgctagcttttggcgccgccctggaggcttttggggaatctgcggagactcgcgctctgttaggccggttacgggaagtccacggcggaggtgctgagcgggaggtggccttggagcggtttcgggagtggatgatgaatctgcttctagatatagtgcaggatcagacctcacctgcctccttagttcatttggcattcaagtttctctatattattacgaaggtgaggggctataagacattcctgcggctcttccctcacgaagttgccgatgttgaacccgtcctggacctggtaactatacagaatcctaaggatcacgaagcctgggaaacccggtacatgcttttgctttggctgagcgtcacatgtctaattccatttgacttctcacggttagacggcaatttgttaacccagccgggccaggcgcgcatgtccatcatggacagaattttgcagatagcagagtcttacctcatcgtgagcgacaaagcaagagatgccgcggctgtgctggtgtcccgctttataacccgtccagacgtaaaacagtctaaaatggccgaatttcttgactggtccctctgtaacttagccaggagtagtttccagactatgcagggagttattacaatggacgggactctccaggcgctcgctcagattttcaagcatggcaagagagaggattgcctgccttacgctgctaccgttctgcggtgcctggatgggtgccgcttgccagaaagtaatcagacgctgcttagaaagctgggagtaaaattagtacaacgacttggccttacgttccttaagcccaaagtggccgcatggcgctatcaaagagggtgcaggagcctggctgccaatttacagttgctgactcagggacaaagcgagcaaaagcctctgatcctaacagaggatgatgacgaagacgacgatgttccagagggtgtcgaacgagtaatcgaacaactcttggtaggccttaaagataaggataccgttgtgcggtggagcgccgcaaaaggcattgggagaatggccggccgcttgcctagggctcttgctgatgatgtcgtgggaagtgtgctggattgcttttcatttcaggagaccgacaaggcttggcatggaggatgccttgccctcgccgagctcggtcgacggggtctcctactgccatccaggctggttgattag

SEQ ID NO: 316510 - DNA, 936 bp, Artificial Sequence
  derived and/or modified sequence
atggccggccggcttcctagggcattagcagacgatgtggtagggtcagtactagattgcttttcatttcaggaaaccgacaaagcatggcacggggggtgtctggcattggccgaactgggacggagagggctgttgctaccttctagactggtggacgtggtggccgtcatcctgaaggcgctgacctacgatgagaagaggggcgcttgttcagtagggaccaacgtgagagatgcagcctgttacgtgtgttgggctttcgcacgggcctatgagcctcaggagctcaaaccgtttgttactgcaataagtagcgccttggtaatcgcagccgtgtttgatcgagatattaactgtcggagggccgcatccgccgcctttcaggagaacgtgggaaggcagggcacgtttccccacgggattgatatcctgaccacggcggactactttgctgttggcaacaggagcaattgtttccttgtcatctctgtctttatagcaggcttccctgaatacacccaacccatgatcgaccatttggtgacaatgaagattagccactgggacggggtgatcagagagcttgctgcccgcgccctgcacaaccttgctcagcaggctccagaattctccgctacacaggtattccctagattgttgtccatgacattaagccccgacctacacatgcgtcacgggagcatcctggcttgcgcagaggtggcgtatgcactgtacaagcttgctgcccaggagaatcggcccgtgactgaccatctggacgaacaggccgtgcaggggcttaaacagattcatcagcagccttgtatttgctcttggggcctgatgagcccagagtctaaggccgaattctgtgtttgcgtttgccgaattagcctcggaaggcagtgtgtgcacctctctgggttgtag

SEQ ID NO: 316511 - DNA, 2253 bp, Artificial Sequence
  derived and/or modified sequence
atggcattgtccgatgaacccgcggctggcggtccagaggaggaagcagaagacgagaccctcgccttcggagccgccctagaggcgtttggcgaatctgctgagacacgggcgttgctgggacgtttgcgtgaggtacatggaggaggcgcggagagggaggtggccctggaacgttttagggttatcatggacaagtaccaggagcagccacacttattagacccacatctggaatggatgatgaatcttttattagacattgtccaggatcaaacctccccagcctctctggtacatctcgcatttaagttcctgtacataatcactaaggtcaggggatacaagacctttttgcggttattcccccacgaggtggccgatgtggaacctgtccttgacctggtgacaatacagaatcccaaagaccatgaagcctgggagactcggtacatgctgctgctttggctcagcgtgacttgcttaatccccttcgacttctcgagactggacggaaatctgctcacccagcctggacaggccagaatgtcgattatggacaggattctgcagattgctgagtcttacctcatcgtgtcagacaaggctagagatgcagccgcagtcctggtcagccggtttatcactcgccctgatgtgaagcagtccaaaatggcggaatttctggactggtcattgtgcaacctcgcacgcagctctttccaaaccatgcagggagttatcacaatggacggcacacttcaagcgctggcccagatctttaaacacggaaaacgcgaggattgcctgccatacgcagcgaccgtcctgaggtgcctggacggctgcagattgcccgagagtaaccaaacactgcttcgcaaactgggagtcaaacttgtacagaggctgggacttactttcctcaagcctaaggtggcagcgtggcggtaccaaaggggatgcaggtcactggcagccaacctgcagctgttgacccagggacagtccgaacagaagccccttatccttactgaggacgatgatgaggacgacgacgtgcctgagggcgtcgagcgggtaattgagcaactattggtcggcctaaaagacaaagatacagtggtgcgttggagtgctgctaaaggcatagggagaatggccgggcgacttccacgggcactcgcagacgacgtcgtaggatcagtcttggactgcttttcctttcaggaaaccgataaggcctggcacgggggatgtctagccctggcagaattggggcgccgggggctactgcttccatctcgactcgttgacgtggtagccgtgatcctgaaagctttgacttatgacgagaaaagaggggcctgcagcgttggtaccaacgtgcgagatgcagcgtgttatgtgtgttgggccttcgcccgggcctatgagcctcaggagcttaaacccttcgtaacagcaataagctccgccctcgtaatagccgcagtgttcgaccgcgatattaattgtcgccgggctgcttcagctgccttccaggagaatgtgggccgccagggcactttcccacacggtattgacattctgaccacagccgattatttcgccgtgggcaaccgtagtaattgttttttggtcatctcggtgtttattgctggcttcccagaatacactcaacccatgattgaccacctcgtcactatgaagatatctcactgggatggtgtgattcgcgagctagctgccagagcactacacaatctggcacaacaagcccctgagttctccgctacacaggtgttccctagactgcttagcatgaccctgtccccggatctccatatgagacatggctctatcctggcgtgtgcggaagtcgcttacgccctctacaagctcgcggcacaagaaaacaggccggtgactgatcacctggatgagcaggcagtccaaggcctgaaacagatccatcagcagctgtatgatcgccagttataccggggcctcggtggccagctgatgcgccaggccgtctgcgttctcatcgagaaattgagcctgtctaagatgccttttcggggcgacaccgtgattgatggctggcagtggttgatcaacgacagtctgtggttgctcgtgggtctaggccgaccttcccgattaccatctgaacggcctgctcccgcggggagccatcgattcaagagttcctatccccattttccccggggccggaaattttgctag

SEQ ID NO: 316512 - DNA, 1269 bp, Artificial Sequence
  derived and/or modified sequence
atggccctgagtgatgagcctgctgctgggggccctgaggaggaggctgaagatgagaccctggcctttggagctgccctggaggccttcggggagagcgctgagacccgggccctgctgggccgcctgcgggaggtgcatggaggcggcgctgagcgggaggtggccctggagcgcttccgggagtggatgatgaacctgctgctggacatcgtgcaggaccagaccagccctgccagcctggtgcacctggccttcaagttcctgtacatcatcaccaaggtgcggggctacaagaccttcctgcggctcttcccccatgaggtggctgatgtggagcctgtgctggacctggtgaccatccagaaccccaaggaccacgaggcctgggagacccgctacatgctgctgctgtggctgtctgtgacctgcctgatcccctttgacttcagccggctggatggcaacctgctgacccagcccggccaggccaggatgagcatcatggaccgcatcctgcagattgctgagagctacctgattgtgtctgacaaggccagagatgctgctgctgtgctggtgagccgcttcatcaccaggccagatgtgaagcagagcaagatggccgagttcctggactggagcctgtgcaacctggcccggagcagcttccagaccatgcagggcgtcatcaccatggatggcaccctgcaggccctggcccagatcttcaagcacggcaagcgggaggactgcctgccctatgctgccaccgtgctgcgctgcctggatggctgccgcctgcctgagagcaaccagaccctgctgaggaagctgggcgtgaagctggtgcagaggctgggcctgaccttcctgaagcccaaggtggccgcctggagataccagaggggctgccgcagcctggccgccaacctgcagctgctgacccagggccagagcgagcagaagcccctcatcctgacagaagatgatgatgaagatgatgatgtgcctgagggcgtggagcgggtgattgagcagctgctggtgggcctgaaggacaaggacacagtggtgcgctggagcgctgccaagggcattggaaggatggccggccgcctgccccgggccctggctgatgatgtggtgggctctgtgctggactgcttctccttccaggagacagacaaggcctggcacggcggctgcctggccctggccgagctgggcagaagaggcctgctgctgcccagccggctggtggactag

SEQ ID NO: 316513 - DNA, 936 bp, Artificial Sequence
  derived and/or modified sequence
atggccggccgcctgccccgggccctggctgatgatgtggtgggctctgtgctggactgcttctccttccaggagacagacaaggcctggcatggaggctgcctggccctggccgagctgggccggcggggcctgctgctgcccagccggctggtggatgtggtggccgtcatcctgaaggccctgacctatgatgagaagagaggagcctgcagcgtgggcaccaacgtgagagatgctgcctgctacgtgtgctgggcctttgcccgggcctatgagccccaggagctgaagccctttgtgacagccatcagcagcgccctggtgattgctgctgtgtttgaccgggacatcaactgcagaagagctgccagcgctgccttccaggagaatgtgggccggcagggcaccttcccccacggcatcgacatcctgaccacagctgactactttgctgtgggcaacagaagcaactgcttcctggtgatcagcgtcttcatcgccggcttccctgagtacacccagcccatgattgaccacctggtgaccatgaagatcagccactgggatggagtcatccgggagctggccgcccgggccctgcacaacctggcccagcaggcccctgagttcagcgccacccaggtgttcccccggctgctgtccatgaccctgagcccagacctgcacatgagacatggcagcatcctggcctgtgccgaggtggcctatgccctgtacaagctggccgcccaggagaacagacctgtgacagaccacctggatgagcaggccgtgcagggcctgaagcagatccaccagcagccctgcatctgctcctggggcctgatgagccctgagagcaaggccgagttctgtgtgtgtgtgtgccgcatcagcctgggccggcagtgtgtgcacctgagcggcctgtag

SEQ ID NO: 316514 - DNA, 2253 bp, Artificial Sequence
  derived and/or modified sequence
atggccctgagtgatgagcctgctgctgggggccctgaggaggaggctgaagatgagaccctggcctttggagctgccctggaggccttcggggagagcgctgagacccgggccctgctgggccgcctgcgggaggtgcatggaggcggcgctgagcgggaggtggccctggagcgcttccgggtcatcatggacaagtaccaggagcagccccacctgctggacccccacctggagtggatgatgaacctgctgctggacatcgtgcaggaccagaccagccctgccagcctggtgcacctggccttcaagttcctgtacatcatcaccaaggtgcggggctacaagaccttcctgcggctcttcccccatgaggtggctgatgtggagcctgtgctggacctggtgaccatccagaaccccaaggaccacgaggcctgggagacccgctacatgctgctgctgtggctgtctgtgacctgcctgatcccctttgacttcagccggctggatggcaacctgctgacccagcccggccaggccaggatgagcatcatggaccgcatcctgcagattgctgagagctacctgattgtgtctgacaaggccagagatgctgctgctgtgctggtgagccgcttcatcaccaggccagatgtgaagcagagcaagatggccgagttcctggactggagcctgtgcaacctggcccggagcagcttccagaccatgcagggcgtcatcaccatggatggcaccctgcaggccctggcccagatcttcaagcacggcaagcgggaggactgcctgccctatgctgccaccgtgctgcgctgcctggatggctgccgcctgcctgagagcaaccagaccctgctgaggaagctgggcgtgaagctggtgcagaggctgggcctgaccttcctgaagcccaaggtggccgcctggagataccagaggggctgccgcagcctggccgccaacctgcagctgctgacccagggccagagcgagcagaagcccctcatcctgacagaagatgatgatgaagatgatgatgtgcctgagggcgtggagagggtcatcgagcagctgctggtgggcctgaaggacaaggacacagtggtgcgctggagcgctgccaagggcatcggccgcatggccggccgcctgccccgggccctggctgatgatgtggtgggctctgtgctggactgcttctccttccaggagacagacaaggcctggcatggaggctgcctggccctggccgagctgggccggcggggcctgctgctgcccagccggctggtggatgtggtggccgtcatcctgaaggccctgacctatgatgagaagagaggagcctgcagcgtgggcaccaacgtgagagatgctgcctgctacgtgtgctgggcctttgcccgggcctatgagccccaggagctgaagccctttgtgacagccatcagcagcgccctggtgattgctgctgtgtttgaccgggacatcaactgcagaagagctgccagcgctgccttccaggagaatgtgggccggcagggcaccttcccccacggcatcgacatcctgaccacagctgactactttgctgtgggcaacagaagcaactgcttcctggtgatcagcgtcttcatcgccggcttccctgagtacacccagcccatgattgaccacctggtgaccatgaagatcagccactgggatggagtcatccgggagctggccgcccgggccctgcacaacctggcccagcaggcccctgagttcagcgccacccaggtgttcccccggctgctgtccatgaccctgagcccagacctgcacatgagacatggcagcatcctggcctgtgccgaggtggcctatgccctgtacaagctggccgcccaggagaacagacctgtgacagaccacctggatgagcaggccgtgcagggcctgaagcagatccaccagcagctgtatgaccggcagctgtaccggggcctgggcggccagctgatgaggcaggccgtgtgtgtgctgattgagaagctgagcctgagcaagatgcccttccggggggacacagtgattgatggctggcagtggctgatcaatgacagcctgtggctgctggtgggcctgggccggcccagccggctgcccagcgagaggcctgccccagctggcagccaccgcttcaagagcagctacccccacttcccccggggcaggaagttctgctag

SEQ ID NO: 316515 - DNA, 1269 bp, Artificial Sequence
  derived and/or modified sequence
atggccctgagcgacgagcccgccgccggcggccccgaggaggaggcagaagatgagacgctagcctttggcgcggcacttgaggctttcggtgagtctgcagagacgagagctctgctcggaagactacgcgaggtgcatgggggaggcgccgagcgcgaggtggccctagagcgcttcagggagtggatgatgaaccttttgctagacattgttcaagaccagacatcccccgctagcctggtgcatctcgctttcaagtttttatacattattaccaaagtgcggggttacaaaacatttcttagattattcccccatgaggtggctgatgtggaaccagtgctggacctggtgacaatccagaacccaaaggaccacgaagcctgggaaacaaggtacatgcttctcttatggctatccgttacttgcctcattccctttgacttttcccgactcgatggcaatttgcttacccagccaggccaagcgaggatgtccataatggatcggatcctccagatagctgagtcttatttgattgtttccgacaaggcacgcgatgctgccgcagtcttggtaagcaggttcatcacaaggccggacgttaagcagagtaagatggccgagtttctagactggagtctgtgtaacctggcccgaagttcctttcagacaatgcagggcgtgatcactatggatggcacactgcaggctctggcccagatcttcaaacacggcaaacgggaagattgtttaccatacgcggcaacagtcctgcggtgtttagacggatgtaggcttcctgaaagtaatcagactctgctgagaaagttaggcgtcaagcttgttcaacgcctagggctcacctttctcaaacctaaggtggccgcttggaggtaccagcgcggttgccgaagtttagctgccaatctccagctcctgactcaggggcaatctgagcagaagcccctcatacttacggaggatgacgacgaggacgatgacgtgccagaaggtgtggagcgggtgattgaacagcttctggtgggtctgaaagacaaggatacagtagtgcgatggagcgcagccaaggggatcggacgtatggctgggcgactgccaagggctctggctgacgatgtggtgggctccgtgttggattgctttagtttccaagaaacagacaaagcctggcacgggggctgtctcgcactcgcagagctgggcaggcgcgggctgctactcccgtctagattggtggactag

SEQ ID NO: 316516 - DNA, 936 bp, Artificial Sequence
  derived and/or modified sequence
atggccggccggctgccccgggccctggccgacgacgtggtgggctccgttctggattgtttctcctttcaagagactgataaggcttggcatggaggatgtctcgcactggcggagctgggtcgacgcggactgctgctgccgagccgtctggtggacgtggtagccgtgatcctgaaggcccttacgtacgatgaaaaacgaggggcctgttccgtcgggaccaacgttagggatgccgcttgttatgtgtgttgggcgttcgccagagcatacgagccacaggaactgaagccgttcgtgactgcaatcagctcagctctggtgattgccgctgtgttcgatagggatattaactgtaggcgcgccgcctcagccgccttccaggagaacgttggacggcaggggacgttcccccacggcattgacatcctgactacagccgattatttcgccgtcgggaataggtctaattgctttctcgttatctcagtctttatcgccggctttcctgaatatactcagcctatgatcgaccatctggtgaccatgaaaatctcacactgggacggcgtgataagagagctggctgctagggcgctgcataacctggctcaacaagccccagaattttctgctactcaggtttttcctcgcttgctgagcatgacactttcccctgacctccatatgcggcacggttctatcctagcttgtgctgaagtcgcttacgcgctgtataaattagctgcgcaggaaaatagacctgtcacagatcacctggacgagcaggccgttcagggcttgaaacagatacatcaacagccttgcatctgttcctggggactgatgtcaccagaatcgaaagcagaattctgcgtatgcgtgtgccgcataagcctcgggaggcagtgtgtccatttgtccggactctag

SEQ ID NO: 316517 - DNA, 2253 bp, Artificial Sequence
  derived and/or modified sequence
atggccctgagcgacgagcccgccgccggcggccccgaggaggaggctgaggatgagactttggcgtttggtgccgccctcgaagccttcggtgagagcgctgaaacaagggctctgctcggtaggctgagagaggtgcatggtggcggcgccgaacgggaggtcgccttggagagatttcgtgttatcatggacaaataccaagaacagcctcacttactagaccctcacttggagtggatgatgaatttgctgctggacatagtgcaggatcagacgtccccagcctcactggtccaccttgccttcaaatttctctatatcatcaccaaagtacggggttacaaaactttcctacgactctttccacacgaagtcgcagatgtggagccggtgctggatcttgttacgattcaaaacccaaaagaccacgaggcctgggaaacccgatacatgctcttgctgtggctttcagtaacatgtcttattccattcgacttttcccgtctagatgggaacttacttactcagcctggccaggctcgtatgtccattatggaccggatcttgcagatcgcagagtcttacctgattgtctccgataaagcccgagacgcagcggccgtgctagtgtcaagatttattacgagaccggatgttaaacagtctaagatggctgaattcctagattggtcactctgtaatctggcacggagctcttttcagacaatgcaaggagtcatcacaatggacggaaccctacaggcattagcccagatctttaaacatggtaagagagaagactgcttgccgtatgcagcaactgtgctgcgttgcctcgacgggtgtagactgccagagagtaatcaaacattactgcgaaagctgggggttaaactggttcaacgcctgggcctcactttcctgaagccaaaagtcgccgcctggcgatatcagcgtggatgtcgatcccttgcggctaacctccagttactgacgcagggacaaagtgagcaaaagcctttaatccttacggaagatgatgacgaggatgatgatgtcccagagggggtggagagggttatcgaacaacttttggtggggctgaaagataaggacaccgttgttcgctggtcggctgcaaaaggcattggaaggatggccggaaggcttcctcgagctttggctgacgatgtcgtgggctccgtcctagactgcttctcatttcaggagaccgataaagcctggcatggaggatgcctggccctggctgaactcggcaggcggggccttctcctgcccagccggttggtggacgtcgtcgccgttatcctcaaagcactgacctacgatgaaaaacgcggggcttgctcagttggcacaaacgtccgcgacgcagcatgttatgtctgctgggcttttgcgcgggcttacgagcctcaggagctaaagccctttgtgacggcaattagctctgcccttgtgatcgcagcagtgtttgaccgcgatataaattgccggcgcgccgcttccgccgccttccaggaaaacgtcggtcgtcaagggacgtttccacacggcattgacattttgacaaccgctgattattttgcagtcggtaatcggagcaattgttttctggtgatcagcgtgttcattgccggttttcccgagtacacccagccaatgattgaccacctggtgactatgaagataagtcactgggacggcgtgattagagagcttgcagcccgggctctgcataacctcgctcaacaggctcccgagttcagcgcaacacaggtctttccccggctgctgagtatgacactgtcgcctgacttacacatgcgacatggctcaatcttggcctgtgccgaggtggcctacgctctctacaaattggcagcgcaagagaatagaccggtgactgatcacctcgacgagcaggcagttcagggattgaaacagatccaccaacaactgtacgaccgccagctgtatcgcgggcttgggggacagctcatgcgtcaagccgtttgtgtcctcattgagaaactttccttgtcaaagatgccgttcagaggtgatacggtgatcgatggctggcagtggctgatcaacgattctctgtggctcttggtgggcctgggtcggccctcccgcttacctagtgaacggccagcacccgccgggagtcaccggtttaagtcttcatacccacattttccacggggaagaaagttttgttag

SEQ ID NO: 316518 - DNA, 1269 bp, Artificial Sequence
  derived and/or modified sequence
atggctctgagcgacgagccagctgctggaggcccagaagaggaggccgaggatgagaccctggctttcggcgctgccctggaggcttttggagaaagtgctgagacgagagctctcttgggacgtctccgggaggtccacggagggggtgcagagcgagaagttgccctcgaacggttcagggaatggatgatgaatttactgttggatatcgtacaggatcagactagtcctgctagcttggtgcatctcgcgtttaaatttctatatataattaccaaagtccggggttacaagactttcctcagactctttcctcatgaggtcgctgatgtggaacctgtgcttgacctggtcactatccagaacccaaaagaccatgaagcctgggaaacacggtatatgctgctcctgtggctgtccgttacctgcctcatccccttcgatttcagtaggctcgatggtaacctcctgacccagcccggtcaggctcgtatgagtataatggaccggattcttcagatcgcagagtcttatttgatagtgtcagataaggctagggacgctgctgctgttctggtgtcaagatttataacaaggccagacgtgaagcaatccaaaatggccgagtttctggactggtcgctgtgtaatttggctcgttcctcatttcagacaatgcagggcgtgattaccatggatggtacgcttcaggctttggcccagatttttaaacacggaaaacgagaagattgcctgccctacgccgctaccgtccttagatgcctggatggctgccggctgcctgagagcaaccagactttgctgcggaaacttggggttaagctagtgcagcgcctgggacttaccttccttaagccgaaagtcgccgcatggcgataccagaggggatgtagaagcttggccgcaaatttgcaactgctgacacaaggacagagcgagcagaaaccattaatccttaccgaggacgacgatgaagacgacgacgtgcccgaaggagtggaacgggtgattgagcagctgcttgtgggtctgaaggataaagataccgtcgtcaggtggagcgctgccaagggcataggtaggatggcagggagactgccgagagcgttagcagacgatgtggtgggttcagtgctagattgtttctcctttcaagagacagacaaggcctggcacggaggatgtctggctttagcagaactgggcagacgagggctgctactcccctccaggctcgtagattag

SEQ ID NO: 316519 - DNA, 936 bp, Artificial Sequence
  derived and/or modified sequence
atggccggacgactacccagagccctggcagatgatgttgtggggtccgttctggactgcttcagtttccaggagactgacaaggcatggcatgggggttgcctggctcttgctgagctcggccgacggggtttgctgctgccgtcccgtctcgtagatgtggtggctgtaatcctgaaagccctcacatacgacgagaagaggggtgcctgttctgtcggcaccaatgtacgggatgccgcatgctatgtgtgctgggctttcgctagggcatacgaaccacaagagctcaagccctttgttaccgcaatttcaagcgccctagttatagctgccgtgttcgaccgggacattaattgcaggagggctgctagtgcggcttttcaggagaatgtcggacggcagggaaccttcccacacggtatagacattctgacgactgctgattattttgcggtggggaatagatccaactgctttctggtgatttcagtgttcatcgccggtttccctgagtacacacaaccgatgattgatcacctggtgacgatgaagatttcccattgggatggtgtgattcgcgaactggcggcaagagcccttcataacttagcacagcaggcgccagagttttccgcaacccaggtcttccccagattactaagcatgactttgagtcctgacctccacatgaggcacggatctatcctggcatgcgccgaggtggcttacgccttatacaaactggcagcccaggagaaccggcctgtgaccgaccaccttgacgagcaggccgtgcagggactgaaacaaatccaccagcagccatgtatatgcagttgggggctcatgtcccctgagagcaaagctgagttctgcgtctgcgtctgcagaattagcctgggaagacaatgtgttcaccttagcggcctctag

SEQ ID NO: 316520 - DNA, 2253 bp, Artificial Sequence
  derived and/or modified sequence
atggccctcagtgacgaacctgcggctggagggccagaggaagaggccgaggacgaaactctagcttttggagccgctctggaagcctttggagagagcgccgaaacacgcgctctcttaggcaggttacgagaggtacatggtggaggggctgaaagagaagtagcgctggagagattccgggtgatcatggacaaatatcaggagcagccacatctgctcgatccacatctcgaatggatgatgaatctccttttggacatcgtccaagatcagacttcccccgcatccctggttcacctggctttcaagtttctttacattattactaaggtccgtggttacaagactttcttacggctgtttcctcacgaagtagcagatgtagagcctgtgctcgacctggtcacaatccaaaacccgaaggaccacgaagcgtgggagacaaggtatatgctgttattatggctgtccgtgacgtgtctcatcccctttgatttttcaaggttggacggcaacctgctgacccaacccggtcaggcgaggatgtccattatggatcgaattctccaaatagccgaatcgtatttaatcgtatccgacaaggcaagggacgcagcagccgtgctggtctcccgttttataacccgtcccgatgtcaagcagagtaagatggcggagtttctggactggtcactgtgtaatcttgcccgatccagcttccagacaatgcaaggcgtgataaccatggacggcactcttcaagctctggcccagatctttaagcacggcaagagagaagattgtctgccgtatgccgctacagtgctgagatgccttgacggttgtcgccttccagagtccaatcagaccttactgcggaagttaggggtcaagcttgttcagagactcgggctgacgtttctcaaacccaaggtagcagcctggagataccagcgcggatgtcggtctctagccgctaaccttcaactcttaacacaaggccagtctgaacagaagccactcattctaacagaggatgatgatgaggatgatgatgtcccggagggcgtcgaaagggtgattgaacagttgctggtgggtttaaaagataaggatactgttgtccgctggtccgccgctaaaggaattgggaggatggctggcagattacctcgggctctcgcagacgatgttgtggggtcggttctcgattgcttcagcttccaggagactgataaagcctggcacggtgggtgcctggccttggctgaactgggaagaagaggactactgttgccatcaaggcttgtggatgttgtggccgtgattttaaaggctctaacgtacgatgaaaaacgaggtgcctgtagcgtgggcacgaatgttagggatgcagcttgttacgtgtgctgggccttcgcaagggcttacgagcctcaagaactgaagccttttgtgaccgctatatccagtgccctggtcattgccgctgtgtttgatcgggacattaactgtaggcgggcagccagtgcagccttccaggagaacgtcggccgacaggggacatttcctcatggtattgatattctgacaacagccgactatttcgcggttggcaaccgctctaattgctttttggtcattagtgttttcatagcgggattccccgaatacacccagccgatgattgaccacctcgtgacaatgaagatatcgcactgggacggggttatcagggaattagcagccagggccctccataatttggcccagcaggctcctgagtttagcgccacccaggtcttcccacgactgctctctatgacgttatctcctgatctccacatgcggcatgggtctatccttgcgtgtgccgaggtggcatatgctctgtataaactagctgcccaagaaaaccgccctgtgaccgaccatctagacgaacaggctgtgcagggactcaagcagattcaccaacagctttatgaccgccagctctataggggactcggtgggcagctgatgagacaggccgtgtgcgttttgatcgagaaactaagcctatcaaaaatgccttttcgcggagacaccgtcattgacggatggcagtggttaattaacgactctctttggctactcgtgggactcggacggccaagccgcctgccctcggaacggcctgcaccagccggaagtcacagattcaagtcttcctatccacatttcccccgtggcaggaaattttgctag

SEQ ID NO: 316521 - DNA, 3717 bp, Artificial Sequence
  derived and/or modified sequence
cctcatccttcatccctggctttcgcgctctagcggagtgggatctgcgaacacgtgaggcgggggcgcggtccccaggctgccgagatggccctgagcgacgaaccggccgcgggcggccccgaggaggaggcggaggacgagacactggcctttggcgcggcgctggaagcgttcggcgagagcgcggagacccgggcgctgctgggccgcctgcgggaggtgcacggcggcggcgcggagcgcgaggtggccctggagcggttccgcgtaataatggacaaataccaggagcagcctcatctgttggacccgcaccttgaatggatgatgaacttgttgttggacatagtgcaagatcagacatctccagcttcccttgtacatctggcttttaaatttctttacatcatcaccaaggttcgaggctataaaacatttcttcgtttatttcctcatgaagttgccgatgtagagcctgttttagatttggtcacaattcagaatcccaaggaccatgaagcttgggaaacccgctacatgcttttgctctggctctccgtgacctgcctgatcccttttgatttttctcgccttgacgggaacctcctcacccagcctgggcaagcacgaatgtccataatggaccgtattctccaaatagcagagtcctacttgattgtcagtgacaaggcccgagatgcagctgctgtccttgtgtccagatttatcacacgtcctgatgtcaagcaaagcaagatggctgagttcctggactggagcctgtgcaatctggcccgttcctccttccagaccatgcagggggtcatcaccatggatgggacgctgcaggccctggcacaaatatttaaacatggaaaacgtgaagactgtttgccctatgctgccactgtcctcaggtgcctcgatggctgcagactccctgagagcaaccagaccctgctgcggaagctgggggtgaagcttgtgcagcgactggggctgacattcctgaagccgaaggtggcagcatggaggtaccagcgtggctgccgatctttggctgcaaatctgcagctcctcactcagggtcagagtgagcagaagccactcatcctgaccgaagatgacgacgaagatgacgacgtcccagagggggtggagcgtgtgatagagcagctgctggtcgggctgaaggacaaggacacggtcgtgcggtggtctgcagccaagggcatcggtaggatggctggcaggcttcccagagccctggcggatgatgtggtcgggtctgtgctggactgcttcagtttccaggagactgacaaggcgtggcatgggggatgtctggcgctggcagagctgggcaggagaggcctgttgctgccgtctcgactcgtggatgttgtcgccgtgatcctgaaggcgctgacctacgacgagaagcggggtgcctgcagcgtgggcaccaacgtcagggacgccgcctgctacgtgtgctgggccttcgcgcgtgcctatgagcctcaggagctgaagccctttgtgactgcaatctcgagtgcactggtgattgctgcggtgtttgaccgagacataaactgcagaagagcagcctctgccgccttccaggagaatgtggggagacagggcactttccctcatggtattgatattttgaccacagctgactattttgccgtcggtaacagatccaactgtttcctggttataagtgtgtttattgccggctttcctgagtacacgcagccaatgatagaccacctggttaccatgaagatcagccactgggatggggtcatccgagagttggctgcgagggcgctgcacaacctggcccagcaggcacccgagttcagcgccacgcaagtcttcccgaggctgctgtccatgacactgagtccagatcttcacatgaggcatgggtcgattctcgcctgcgcagaagttgcttacgccttgtacaaacttgcagcccaagagaacaggcccgtcacggaccatctggacgagcaggcagtgcagggcctgaagcagattcaccagcagctctatgatcgtcagttatacaggggtctgggaggacagctcatgagacaagcagtgtgtgttttaatagaaaagttgtcactttccaaaatgccctttagaggtgacaccgtaattgatggttggcaatggctgataaatgactcgctgtggcttctcgttggccttgggcgcccttccaggcttccttctgaaaggccggctccagcaggttctcacaggtttaagagcagttacccacacttcccccgaggacgtaagttttgctgagtccaggagagacggcttgaaggccattgcgaggatttgccagactgttggtgtgaaagcaggagccccagacgaagctgtgtgcggagagaatgtttcccagatttactgtgcgctgctgggctgcatggacgactacaccacggacagcagaggggacgtgggcacctgggtccgcaaggccgccatgaccagtctgatggatctgacacttctgctggctcggagccagcctgagctgatcgaggcccatacctgtgagcgcatcatgtgctgtgtggcccagcaggccagtgagaagattgaccgtttccgtgctcacgccgccagcgtgttcctgacgctcctgcactttgacagccctcccatcccccacgtgccccaccgaggagaactggaaaagctgtttcccaggtccgatgtggcctccgtgaactggagtgcaccttcccaggccttcccacgcatcacccagctccttgggctgcccacctaccgctaccacgtcctgctggggctagtcgtgtccctgggcggcttgacggagtcgacgatccggcactccacccagagcctctttgagtacatgaagggcattcagagcgacccgcaggccctgggcagcttcagcgggacccttctgcagatctttgaggacaaccttctgaatgagagggtgtccgtgccgctgctgaagacgctggaccacgtgctcacccacggctgcttcgacatcttcaccacggaggaggaccacccctttgctgtgaagttgcttgcgctctgtaagaaagaaatcaagaattcaaaagatatccagaagctcctgtcaggcatcgcagtgttctgcgagatggtgcagttccccggcgacgtgaggaggcaggccctcctgcagctgtgtctgctcctctgccaccgtttcccgctgatccggaagaccacggccagccaggtgtacgagacattgctcacctacagtgacgtcgtgggcgcggatgtgctggacgaggtggtgactgtgctcagtgacactgcgtgggacgcggagcttgcagtggtgagagagcagcgcaaccgtctgtgtgaccttctgggcgtacccaggccccagctggtgccccagcctggtgcctgctgaagccagtcctggagcccatacctcacccctgcctggtgaggatgtcttgttcctgagggaggccggtgtggaaagcctcgcacagtggtgcctccagctgttgaagggtagcgctggcccttggaggctggcactagctgacagcttttcctctctgcacctgcgctctggtgacttggggtggacgcctctgccttcacttgaacacaaatgtgcttcctataaaatcatgtacc

SEQ ID NO: 316522 - DNA, 555 bp, Artificial Sequence
  derived and/or modified sequence
atgaagggcatccagagcgacccccaggccctgggcagcttcagcggcaccctgctgcagatcttcgaggacaacctgctgaacgagagagtgagcgtgcccctgctgaagaccctggaccacgtgctgacccacggctgcttcgacatcttcaccaccgaggaggaccaccccttcgccgtgaagctgctggccctgtgcaagaaggagatcaagaacagcaaggacatccagaagctgctgagcggcatcgccgtgttctgcgagatggtgcagttccccggcgacgtgagaagacaggccctgctgcagctgtgcctgctgctgtgccacagattccccctgatcagaaagaccaccgccagccaggtgtacgagaccctgctgacctacagcgacgtggtgggcgccgacgtgctggacgaggtggtgaccgtgctgagcgacaccgcctgggacgccgagctggccgtggtgagagagcagagaaacagactgtgcgacctgctgggcgtgcccagaccccagctggtgccccagcccggcgcctgctag

SEQ ID NO: 316523 - DNA, 555 bp, Artificial Sequence
  derived and/or modified sequence
atgaaaggaatccaaagcgatcctcaggccctgggtagcttctcgggcactctactccaaatctttgaagacaatctgctgaacgagagggtctctgtgccactactgaagacactcgaccatgtgttaacacacggctgtttcgacattttcaccacagaggaggatcacccttttgcagtgaaactcctggctctgtgtaaaaaagagatcaagaacagcaaggacatccagaagttgctgagcggcattgctgtcttctgcgagatggtgcaatttccgggcgacgtccgccgccaggccctgcttcagctgtgcctgctgctgtgtcatagatttcccttgatacgcaagaccactgctagccaagtttacgagaccctcctaacatactctgatgtcgtaggagctgacgttctggacgaagtggtgacagtgctgagcgacacagcatgggatgccgagttagcggtggtgagggagcagcgtaatcggttgtgcgatcttctaggggtccctcgcccccagttggtgccacaacccggcgcttgctag

SEQ ID NO: 316524 - DNA, 555 bp, Artificial Sequence
  derived and/or modified sequence
atgaagggcatccagagcgacccccaggccctgggcagcttcagcggcaccctgctgcagatctttgaggacaacctgctgaatgaaagagtgtctgtgcccctgctgaagaccctggaccacgtgctgacccacggctgctttgacatcttcaccacagaggaggaccacccctttgctgtgaagctgctggccctgtgcaagaaggagatcaagaacagcaaggacatccagaagctgctgagcggcattgctgtgttctgtgagatggtgcagtttcctggagatgtgcggcggcaggccctgctgcagctgtgcctgctgctgtgccaccgcttccccctcatcaggaagaccacagccagccaggtgtatgagaccctgctgacctacagtgatgtggtgggcgcagatgtgctggatgaggtggtgacagtgctgagtgacacagcctgggatgctgagctggccgtggtgcgggagcagaggaaccggctgtgtgacctgctgggcgtgccccggccccagctggtgccccagcccggggcctgctag

SEQ ID NO: 316525 - DNA, 555 bp, Artificial Sequence
  derived and/or modified sequence
atgaagggcatccagagcgacccccaggccctgggcagcttcagcgggaccctgttacagatattcgaggacaacctcctcaacgagcgtgtgagtgtgcctctgctgaagacactggaccatgtcctcacccatgggtgttttgacatcttcactacagaggaagaccacccctttgcggtgaagcttttggccctttgtaagaaagagataaaaaattctaaggatattcagaagttactgtcaggtatcgccgtgttttgcgagatggtgcaattcccaggagatgtgaggcgacaagccctgttgcaactgtgtctccttctctgccatagattccccttgatcaggaaaactacagcgtctcaggtgtacgagacacttctgacttactcagatgtggtgggggctgatgtgctggatgaggtcgtgactgtactgagcgatactgcttgggacgccgagttggccgtggtccgggagcagcggaacagattgtgcgatctgttgggagtgccaaggcctcagctggtgccacagccgggtgcttgttag

SEQ ID NO: 316526 - DNA, 555 bp, Artificial Sequence
  derived and/or modified sequence
atgaaaggaatccagtctgaccctcaggccctcggctcattttccgggactttgctgcagatctttgaggacaatctgctaaacgaacgcgtgagcgtaccactgttgaagactttggatcacgtactaacgcatggctgtttcgatatcttcaccaccgaggaagatcatccttttgccgtcaagctcttggccctgtgtaagaaagagattaagaacagcaaggacattcaaaaacttctgagcggaattgccgtattctgcgagatggtgcaattcccaggtgatgtgaggaggcaagcgctgctgcaattgtgtctgcttctttgccacagatttcccctgattcgaaagacaactgctagccaggtatatgagacgttactgacttactcagatgtggtgggagccgatgtgttagacgaagttgtaaccgtcctgagtgataccgcctgggatgcagaactagccgtcgtcagagaacagcggaaccggctgtgtgacctgctgggggtcccccgtccacaactagttccccagcccggtgcttgctag

SEQ ID NO: 316527 - protein, 465 aa, Artificial Sequence
  derived and/or modified sequence
MGGAVVDEGPTGVKAPDGGWGWAVLFGCFVITGFSYAFPKAVSVFFKELIQEFGIGYSDTAWISSILLAMLYGTGPLCSVCVNRFGCRPVMLVGGLFASLGMVAASFCRSIIQVYLTTGVITGLGLALNFQPSLIMLNRYFSKRRPMANGLAAAGSPVFLCALSPLGQLLQDRYGWRGGFLILGGLLLNCCVCAALMRPLVVTAQPGSGPPRPSRRLLDLSVFRDRGFVLYAVAASVMVLGLFVPPVFVVSYAKDLGVPDTKAAFLLTILGFIDIFARPAAGFVAGLGKVRPYSVYLFSFSMFFNGLADLAGSTAGDYGGLVVFCIFFGISYGMVGALQFEVLMAIVGTHKFSSAIGLVLLMEAVAVLVGPPSGGKLLDATHVYMYVFILAGAEVLTSSLILLLGNFFCIRKKPKEPQPEVAAAEEEKLHKPPADSGVDLREVEHFLKAEPEKNGEVVHTPETSV

SEQ ID NO: 316528 - DNA, 1398 bp, Artificial Sequence
  derived and/or modified sequence
atgggcggcgccgtggtggacgagggccccaccggcgtgaaggcccccgacggcggctggggctgggccgtgctgttcggctgcttcgtgatcaccggcttcagctacgccttccccaaggccgtgagcgtgttcttcaaggagctgatccaggagttcggcatcggctacagcgacaccgcctggatcagcagcatcctgctggccatgctgtacggcaccggccccctgtgcagcgtgtgcgtgaacagattcggctgcagacccgtgatgctggtgggcggcctgttcgccagcctgggcatggtggccgccagcttctgcagaagcatcatccaggtgtacctgaccaccggcgtgatcaccggcctgggcctggccctgaacttccagcccagcctgatcatgctgaacagatacttcagcaagagaagacccatggccaacggcctggccgccgccggcagccccgtgttcctgtgcgccctgagccccctgggccagctgctgcaggacagatacggctggagaggcggcttcctgatcctgggcggcctgctgctgaactgctgcgtgtgcgccgccctgatgagacccctggtggtgaccgcccagcccggcagcggcccccccagacccagcagaagactgctggacctgagcgtgttcagagacagaggcttcgtgctgtacgccgtggccgccagcgtgatggtgctgggcctgttcgtgccccccgtgttcgtggtgagctacgccaaggacctgggcgtgcccgacaccaaggccgccttcctgctgaccatcctgggcttcatcgacatcttcgccagacccgccgccggcttcgtggccggcctgggcaaggtgagaccctacagcgtgtacctgttcagcttcagcatgttcttcaacggcctggccgacctggccggcagcaccgccggcgactacggcggcctggtggtgttctgcatcttcttcggcatcagctacggcatggtgggcgccctgcagttcgaggtgctgatggccatcgtgggcacccacaagttcagcagcgccatcggcctggtgctgctgatggaggccgtggccgtgctggtgggcccccccagcggcggcaagctgctggacgccacccacgtgtacatgtacgtgttcatcctggccggcgccgaggtgctgaccagcagcctgatcctgctgctgggcaacttcttctgcatcagaaagaagcccaaggagccccagcccgaggtggccgccgccgaggaggagaagctgcacaagccccccgccgacagcggcgtggacctgagagaggtggagcacttcctgaaggccgagcccgagaagaacggcgaggtggtgcacacccccgagaccagcgtgtag

SEQ ID NO: 316529 - DNA, 1398 bp, Artificial Sequence
  derived and/or modified sequence
atggggggagcagtggtggacgaagggcctacaggagtgaaggctcccgacgggggctggggatgggccgtactgtttgggtgtttcgtaattactggattctcttatgcctttcccaaggccgtgtctgtgttcttcaaagagttaattcaagagtttggcatcgggtattcagacactgcctggatcagcagtattctactggccatgctatacggcaccgggcccctatgcagcgtgtgcgtgaacaggtttggatgccgccccgtgatgctggtcgggggcttgtttgcctcacttgggatggtggccgcttccttttgtaggagtatcatccaggtgtatctgaccactggtgtgatcactgggctgggtctggcccttaattttcagccctcgttgatcatgctgaatagatatttcagcaagagacgacccatggctaatggcttagccgccgcagggtcacccgtgttcctatgcgcccttagccccttggggcagctcctccaggatcggtacggatggagaggtggctttctcatcctgggaggcctgcttctgaactgctgcgtatgcgcagccttgatgaggcctctggtggtaactgcccagcccggtagcggacccccacgtccctcccggaggctgttggaccttagcgtattccgcgaccggggcttcgtgctctacgccgtggccgcctcagttatggtcctgggacttttcgtacctcccgttttcgtcgtgtcctatgcgaaagatttgggcgtgcccgataccaaggcagcattcctgctgaccattttgggttttatcgacattttcgcccgccccgcggccggattcgtggctggactggggaaagtgaggccgtattcagtctacctcttctctttcagcatgtttttcaacggcctggctgacttagcagggagcaccgcaggtgactacggagggctggtagttttttgtatcttctttggaatctcctatgggatggtcggcgccctgcagttcgaggtcctgatggccatcgtggggacgcacaaattttcttcagcgatcgggctcgtgctgttaatggaggcagttgcggtgctggtcgggccacccagcggtggtaagctgctggacgccactcatgtgtatatgtacgtgtttattctagcaggcgcagaagtgttaacgagcagcctgatcctgttgctaggcaattttttctgtataagaaagaaaccgaaagagccacagccagaagtcgccgctgcagaagaggaaaaactccataaaccacctgctgatagtggagtggatttgcgggaggtcgagcatttcctgaaagcagaacccgagaaaaacggagaggttgtacacacacccgagactagcgtgtag

SEQ ID NO: 316530 - DNA, 1398 bp, Artificial Sequence
  derived and/or modified sequence
atgggcggggccgtggtcgacgagggcccaaccggcgtgaaggcaccagacggaggatggggctgggccgttctttttggctgcttcgtgattactggattctcttatgcatttcccaaagccgttagcgtgttctttaaagaactgatccaggaattcgggatcggctatagtgatacagcttggatatcttccatattgctggctatgttatacgggacgggccctctgtgctcagtctgtgtcaacaggtttggctgccggccggtgatgctagtcggtggcctgttcgcttcactgggaatggtcgctgcttcgttctgccggagcatcatccaggtttacttgacgacgggggtcattaccggactgggcctagcactgaactttcagccaagcttaataatgttgaatcgctacttctccaaacgtcgccccatggcaaacggattagccgcagcaggcagtcccgtcttcctgtgtgcattgtcgccgttaggtcagctccttcaggaccgctatggctggcgtgggggttttctcatacttggcggactgctgcttaattgttgtgtctgcgctgcactgatgagacccctggttgttacggctcagcccggatcagggcctccgcgtccttctcgacgcctcttggacctgtctgtctttagggatcgcggctttgttctctacgcagtggctgccagcgtcatggtgttgggcttattcgtgcccccagtgtttgtcgtctcatacgctaaggacttgggcgtgccagacactaaggcagctttccttctgactatcctcggttttatcgatatctttgctcggcctgcagctggcttcgttgcaggactgggtaaagtgcgcccctattccgtgtacctcttttccttttcaatgtttttcaacggactcgccgacctggctggaagcactgcaggtgactatggaggactggtggtgttctgtatcttctttggtatctcctacggaatggttggcgcactgcagttcgaggtccttatggctattgtgggaactcataaattctcgtccgctatcgggcttgttctgttgatggaagcggtcgctgtcctcgtcggccctccctccggagggaagttgttggatgcgacacacgtgtacatgtatgtattcattctggcaggggccgaggtgttaactagcagtcttattcttttgctcggaaacttcttttgcattcggaagaaaccgaaggaaccacagccggaggtggccgccgctgaagaggagaagttgcataagccacctgccgattctggtgtggaccttcgggaggtggaacactttctgaaggccgaacctgagaagaatggggaagttgtgcatacaccagagacatctgtgtag

SEQ ID NO: 316531 - DNA, 1398 bp, Artificial Sequence
  derived and/or modified sequence
atggggggagcagtggttgatgagggtcctaccggagtgaaagctccggatggcggctggggttgggccgtgctgtttgggtgtttcgtgattaccgggttcagctatgccttccctaaggccgtttctgtgttcttcaaagagctgattcaagagttcgggattggttacagcgatactgcctggatctcctccatcttgctagcaatgctgtacggcactggacctttatgtagcgtttgtgtgaatagatttggatgccgccccgtcatgcttgtcggcgggcttttcgcctctctgggtatggtggctgcctccttctgccgatctattattcaggtgtatctgactacaggcgtaataactggactcggacttgcccttaatttccagccatcactgattatgctcaaccgctacttctctaagcgtcgtcctatggccaatgggctcgcggcggccgggagtcctgttttcctgtgtgcgcttagtccgctaggacaattgctgcaggatagatacggctggcgcggcggtttcctcatccttgggggtctcctgctgaattgttgcgtttgcgcagctctgatgagacccctagtggtcacggcccaaccaggctctggcccaccaagaccctcacggcggctcctggacttgtccgtctttcgagataggggatttgttctatatgccgttgcagcctctgtcatggtgctggggttgtttgtacctcccgtatttgtagtatcctacgctaaagacttaggagtccctgatacgaaagctgcttttctgctgaccatcctagggtttattgacattttcgcaagaccagccgccggttttgtggccggtctgggcaaagtgaggccttattcagtatacctgttttcctttagtatgtttttcaacggactcgccgacctggctggctccactgccggagattatgggggattggtagttttttgtatattctttggtatctcatacggcatggtaggagctttgcagttcgaggttctgatggcaatcgtcggcacccataaattcagctccgccattgggcttgtgctgctgatggaggctgtcgccgttctagtaggccccccctctggcggaaagctactggacgccacccacgtgtacatgtacgtgtttattttagccggggccgaagtgttaacatcctcattgattctcctcctgggcaattttttttgcattagaaagaagcccaaagaaccacagcccgaggttgccgccgcagaagaggagaaactccacaagccccctgcagattcgggcgtcgacctgcgagaggttgaacattttctcaaggctgaacctgagaagaacggagaagtggtccatacccctgaaactagcgtgtag

SEQ ID NO: 316532 - DNA, 1398 bp, Artificial Sequence
  derived and/or modified sequence
atggggggcgcagtcgtggatgaaggacccactggagtgaaagccccggacggtggctggggctgggcagtgctgtttgggtgcttcgtgattacaggcttttcatacgcatttccaaaggcagtgagcgtgttctttaaagaactaatccaggaattcggcattgggtactcagacacagcatggatctcctccatacttctcgcaatgttgtacggcactggcccactctgctcggtctgtgtgaataggtttggatgcagacccgtgatgctcgtggggggcctgtttgctagcctaggcatggtggctgcctccttttgccgatcgatcattcaggtctacctgacaacaggtgtgatcactggtctgggcttggccctgaactttcagcccagtctcatcatgcttaacagatattttagcaagcgtcgaccaatggccaacgggctggctgcagcggggtctccggtgtttctgtgtgcactctcccctttgggccagcttctgcaggatcgttacgggtggcgtggcgggttcctgatcttagggggtctactcctgaactgttgtgtgtgtgccgcactgatgcgccctttagtcgtgaccgcgcagccaggttcaggacctccgcgtccttcacgacgtttgcttgacctgtctgtgttcagggaccgtgggtttgtcttgtatgccgtggctgctagtgttatggtgctgggcctattcgtaccaccagtgttcgtggtcagctacgcaaaggaccttggggtgccagacaccaaggctgcttttctactgacaatcctgggcttcatagacatcttcgcccgccctgccgctggcttcgtcgcaggactgggaaaagtgcgcccctatagcgtttatctattttccttcagtatgttctttaacggtctggctgacttggccgggtcaacagcaggcgactacggtggcttggttgtcttctgtatttttttcgggatttcctacggcatggttggagcactccagtttgaagttctcatggccatagtggggacccataaattttctagcgccatagggctcgtcctccttatggaagcagtggctgtcctggtgggccccccctccggagggaaacttctcgacgcaacccatgtctacatgtacgtgttcattctggccggagcagaggtcctaacaagcagtttgatccttcttctaggcaactttttttgcattcgcaagaagcctaaggagccccaaccagaggtcgccgccgccgaagaagagaaactgcataagccacctgctgactcaggggttgatttaagggaggttgaacattttctgaaagccgagccagaaaagaacggggaagtggtgcatacaccggagacctctgtttag

SEQ ID NO: 316533 - DNA, 1398 bp, Artificial Sequence
  derived and/or modified sequence
atgggcggcgctgtggtggatgagggccccactggagtgaaggccccagatggcggctggggctgggccgtgctgtttggctgctttgtgatcaccggcttctcctatgccttccccaaggctgtgtctgtgttcttcaaggagctgatccaggagtttggaattggctacagcgacacagcctggatcagcagcatcctgctggccatgctgtatggcaccggccccctgtgcagcgtgtgtgtgaacagatttggctgcaggcctgtgatgctggtgggcggcctgtttgccagcctgggcatggtggccgccagcttctgccgcagcatcatccaggtgtacctgaccaccggggtcatcaccggcctgggcctggccctgaacttccagcccagcctcatcatgctgaaccgctacttcagcaagaggcggcccatggccaacggcctggccgccgccggcagccctgtgttcctgtgtgccctgagccccctgggccagctgctgcaggacagatatggctggaggggcggcttcctgatcctgggcggcctgctgctgaactgctgcgtgtgtgccgccctgatgaggcccctggtggtgacagcccagcccggcagcggccccccccggcccagccggcggctgctggacctgtctgtgttccgggaccggggctttgtgctgtatgctgtggccgcctctgtgatggtgctgggcctgtttgtgccccctgtgtttgtggtgtcctatgccaaggacctgggcgtgcctgacaccaaggccgccttcctgctgaccatcctgggcttcatcgacatctttgcccggcctgctgctggctttgtggccggcctgggcaaggtgcggccctacagcgtgtacctgttctccttctccatgttcttcaacggcctggccgacctggccggcagcacagctggggactatggaggcctggtggtgttctgcatcttcttcggcatctcctatggcatggtgggcgccctgcagtttgaggtgctgatggccatcgtgggcacccacaagttcagcagcgccatcggcctggtgctgctgatggaggccgtggccgtgctggtgggccccccatctgggggcaagctgctggatgccacccacgtgtacatgtatgtgttcatcctggccggggctgaggtgctgaccagcagcctcatcctgctgctgggcaacttcttctgcatcaggaagaagcccaaggagccccagcctgaggtggccgctgctgaggaggagaagctgcacaagcccccagctgacagcggcgtggacctgcgggaggtggagcacttcctgaaggccgagcctgagaagaatggagaggtggtgcacaccccagagacctctgtgtag

SEQ ID NO: 316534 - DNA, 1398 bp, Artificial Sequence
  derived and/or modified sequence
atgggcggcgccgtggtggacgagggccccaccggcgtgaaggcccctgacgggggatggggctgggccgtactgttcggatgttttgtgatcacgggattctcttatgcttttccgaaagctgtttctgttttttttaaggagctgattcaagagtttgggattgggtattcagacaccgcttggatcagctcaattctcctcgccatgctgtacggtaccgggcctctctgtagtgtatgtgtgaaccgatttggatgccggccagtgatgcttgtaggtggcctgtttgcaagtctcggaatggtcgcggcgagcttttgccgctcaataattcaggtgtatttgactacaggagtgattactggcctgggtcttgctctcaacttccagcccagcctgatcatgctgaaccgatattttagcaagcggcggccaatggccaatggcctggccgccgccggctcacccgtcttcctctgcgcactatctccattggggcaactgctgcaggacaggtatgggtggcgcggcggatttttaattctgggcggcctgctactcaattgttgcgtgtgtgctgcactgatgagacccctcgtagtgaccgctcagcccggctccgggcctcctaggccctccaggagattgctcgatcttagtgtctttcgggacaggggatttgtcctgtatgcagtggcagcatcagtgatggtccttggactgttcgtgccccccgtctttgtggtcagttatgccaaagacctcggagttcccgatacaaaggccgctttcctgctgacgatattggggttcatagatatttttgcccggcctgccgccggctttgtcgcaggtttgggcaaggtgcgcccatactctgtgtacctgttcagcttctcaatgttttttaatggattagcagatcttgctggctcaacagccggggattacgggggactcgtggtcttttgcatattcttcggtatatcttacggtatggtcggagccctgcaatttgaggtgctgatggctattgtgggtacacacaagttctcaagcgctatcggacttgtgttgttaatggaggctgtggcagtgcttgttggacccccctctggcggaaagttgctggacgcaacccatgtgtatatgtacgtctttattctcgctggggccgaagtactgacctcctcattgattctgctgctgggaaatttcttctgtatcagaaaaaagcccaaggagcctcagcctgaagtcgctgcagctgaggaggagaagctccacaaaccacccgctgattctggggtggacctgagggaagtggagcatttcctgaaagcagaacctgaaaaaaacggcgaggtagtgcatacccccgagacctctgtatag

SEQ ID NO: 316535 - DNA, 1398 bp, Artificial Sequence
  derived and/or modified sequence
atgggcggcgccgtggtggacgagggccccaccggcgtgaaggccccagacgggggatggggatgggctgtgcttttcggttgcttcgtgatcaccggcttcagctacgcgttccccaaggctgtttccgtgttttttaaagagctcattcaagagttcggcataggatattccgacactgcgtggattagctccatcttgctggctatgctgtacggcacagggccgctgtgcagcgtctgtgtgaatcgtttcggctgtaggcctgtaatgctcgtcgggggactatttgctagtctcggcatggtggctgcctccttctgccgtagtatcatccaagtgtacctcaccactggtgtgattaccggcctcggactcgctttgaacttccaaccaagcctgataatgctaaacaggtatttttctaagagaagacccatggcaaacggtttggccgcagcggggtccccagtgtttctgtgcgccctgtcccctctgggtcaactgttacaggaccgctatggctggcgcggcgggttcctcatccttggaggactcctcctcaattgttgtgtttgtgcagcactgatgcggccactggtggtaaccgcacagcccggttccgggcctcctcggccttcgcgtagactcctcgatctgtccgttttccgtgatcgtggattcgttctttatgccgtcgccgcatccgttatggtgctgggtttgttcgtccctccagtgttcgtcgtatcctacgccaaggacctcggagtgccggataccaaggcggcgtttctcctcaccatcctcggattcatagacattttcgctaggccagcagcgggcttcgtcgctggactggggaaggtgagaccttattccgtgtaccttttttctttctcgatgttctttaatggacttgcagacctcgccggcagcactgcaggggactacggcggcctggttgtgttttgcatctttttcggcatcagctatggtatggtaggggctttacagtttgaagtgttgatggctattgtgggcactcacaaattttcaagcgccatcggactggtgttactcatggaggcagtggccgtgctggttggcccaccatctgggggtaagctgctagacgctacacacgtttatatgtatgtctttatcctggcaggcgcagaagttttaactagctcacttatcctgctgctgggtaatttcttttgcatccggaaaaaacccaaagagccccagcccgaggtggccgccgcagaggaggagaaactgcacaaaccccccgcggattcaggcgtcgatctccgtgaagtggagcattttctgaaggcagaaccagaaaagaatggggaggtcgttcacacccctgaaactagtgtctag

SEQ ID NO: 316536 - DNA, 1398 bp, Artificial Sequence
  derived and/or modified sequence
atgggcggcgccgtggtggacgagggccccaccggcgtgaaggcccctgatggcggttggggatgggccgtgctgtttggctgcttcgtcatcacaggattctcctatgcttttcctaaagccgtaagtgtctttttcaaagagctgattcaggaattcggaatcggttatagcgataccgcgtggatatcctccatccttcttgcaatgctctatggcacaggacccctgtgtagcgtctgcgtgaaccgattcggatgtcggcctgtaatgttggtcggcgggctgttcgcctccctggggatggtcgccgcatccttttgcagatctatcattcaggtttatctgacaactggcgtcatcaccggactcggactggccttgaactttcagcctagcttgatcatgctcaataggtacttctccaaacgaaggcctatggctaacgggctcgctgccgcggggtcaccggtatttttgtgtgccctgtccccccttggacagctactccaggataggtacggatggcgtggcggctttttaatcctgggggggctgctgctgaactgctgcgtgtgcgctgcattgatgcgccccctcgttgtcaccgctcagcccggaagcggccctccacgccctagcagaagactgctcgatttatctgtcttccgggaccgcggcttcgtactttacgcggtggccgcatctgtgatggtgctgggcctgttcgtgccgccagtctttgtggtgtcttacgcaaaggatctgggtgtaccagacactaaagccgcctttttgctaacaatattggggttcatcgatatctttgcccgcccagctgctggattcgttgctggactgggcaaggtgcgaccttactccgtgtacttatttagctttagcatgttttttaacggtttagcagatctggcaggtagtactgctggggattacggaggtctagtggtgttctgcatcttcttcggaatctcctacggtatggtgggtgctcttcagttcgaggtacttatggccatcgtcggaacccacaaatttagttctgccatcggcctcgtgctacttatggaagcagtcgccgtcttagtggggccaccgagtggggggaaactgcttgatgccacacatgtgtatatgtacgtgtttattcttgcaggagccgaggtcctgacttcctctcttattctcctcctgggcaattttttctgtattcggaagaaacctaaggagcctcaaccagaagtggcagctgccgaagaagagaagctgcacaagccccccgcagattctggtgtggatctccgggaagtcgagcactttctgaaggccgagccagaaaagaacggagaagtcgtgcacacacccgagacatcggtttag

SEQ ID NO: 316537 - DNA, 1398 bp, Artificial Sequence
  derived and/or modified sequence
atgggcggcgccgtggtggacgagggccccaccggcgtgaaggccccagacggcggctggggctgggcagtcttattcggttgctttgtgatcacaggctttagctacgcatttccgaaagccgtgagtgtcttcttcaaggaattaattcaagagtttgggatcggctatagtgacacagcctggatctcctctatacttcttgccatgctctatggtacaggccccctgtgctctgtatgcgtgaatcgattcgggtgcagacccgttatgcttgtgggagggctgtttgcgtcactaggcatggtcgccgcaagtttctgccggagcataattcaggtttacctcaccaccggggtgatcactggattggggctcgcactcaacttccagccaagccttattatgttaaaccgctacttctcaaaacgtcgacccatggccaacggactggccgccgccggaagtcctgtcttcctgtgcgctctgagtccattaggacaattgctgcaggatcgatacggctggcgcggtggattcctgatcttggggggactgctcctcaattgttgtgtgtgcgccgccttaatgagaccgctggtcgtgaccgctcagcccggttcaggaccccctagaccatcaaggaggctgctcgacctctctgtgtttagggaccggggctttgtactgtatgcagtggccgcgagtgtgatggtgctagggctttttgtaccacctgtgttcgtagtctcctatgccaaggacctcggcgttcctgacactaaggccgcctttttgctgaccattcttggcttcatagacattttcgcacgtcccgcagctggatttgtcgccgggctggggaaggtgaggccttattcagtgtacctgttttctttcagtatgttctttaatgggctggcagacttagccggtagcaccgccggcgattatggagggctggtcgtattctgcatcttctttgggatctcctacggaatggttggggccctgcagttcgaggtccttatggccatcgtgggcacacataaattttcttccgcaatcggtctcgtccttctgatggaggccgtagctgtgctcgtgggcccaccctctgggggaaaactcctcgacgccacgcatgtttatatgtatgtgtttattctggcgggtgccgaagttctcacgtcaagtctcatcttgctccttggtaactttttttgcatccgtaaaaagccaaaggaacctcagccggaagttgccgctgccgaggaggaaaaactccataagccaccagctgactctggcgtcgacctccgggaggtagagcacttcctgaaggcagagcccgagaagaacggagaggtcgttcacaccccggagacaagcgtgtag

SEQ ID NO: 316538 - DNA, 1398 bp, Artificial Sequence
  derived and/or modified sequence
atggggggagctgttgtggatgagggaccgaccggcgtgaaagccccagatggagggtggggctgggccgtgctttttggctgttttgtgattaccggattctcttatgccttccctaaggccgtatcggttttctttaaggagctgatacaggaattcggaattggctacagcgacacagcctggatcagcagcattcttcttgctatgctgtatggaaccggtccactgtgttccgtgtgtgtgaacagattcggttgccgccctgttatgctggtgggtggcctgttcgcctcattgggaatggtggctgccagcttttgtcggagtattattcaggtgtacctgaccacgggcgtcattaccggtctgggtttggcactgaactttcagccttctttgattatgctcaaccgctatttcagcaaaagaagacctatggcaaacggccttgccgcagcaggctccccggtgtttctgtgcgcactgtcaccgctgggtcaattactgcaggatcgctatgggtggcggggaggcttcctgattctcggcggactcctgctgaattgttgcgtctgtgcagcgttgatgaggcccctggttgtcacagctcagccaggcagcggacctccacgtccaagccggagactgctcgatctgagtgtatttcgcgacaggggcttcgtgctatatgcagtggcggcaagtgtaatggtgcttggccttttcgttcctccagtttttgtggtgtcatacgctaaagacctgggggttcctgataccaaggccgcttttctgctaacaatcctgggatttatcgacatatttgcccgacccgcagcagggttcgtcgccggacttgggaaagtgcgcccttactctgtgtacctgtttagtttctccatgttctttaacggcctggccgatttagccggtagtactgcaggcgactacggaggtctggtggtgttctgtatttttttcggcatcagctatggaatggtgggcgcattgcagtttgaggttctgatggctatagtggggacacacaagtttagcagtgcaatcgggctggttttactgatggaggcagtcgccgtcctggtgggccctccctccggcggtaaattacttgacgcgactcatgtgtacatgtatgtgtttatcctggccggtgcagaagtgcttacatcttcactgatacttctcctcggaaacttcttttgtattcggaagaaacctaaggaaccgcagcccgaggtggcggcagcagaagaggaaaagctccacaagccaccagctgattctggcgtcgatctgcgggaggtcgagcattttttgaaagcagagcctgagaaaaacggggaggttgtgcacactcccgagacatccgtctag

SEQ ID NO: 316539 - DNA, 1398 bp, Artificial Sequence
  derived and/or modified sequence
atgggaggagccgtagtggacgaaggacccaccggtgtgaaggctccagacggaggatggggctgggccgttctgtttggctgctttgttatcacaggcttttcttacgccttcccgaaggccgtatctgtgttttttaaagagctcatacaggagttcggcattgggtattccgacactgcatggatttcctccatccttttagcgatgttgtatggtactgggccactctgctctgtatgcgtgaacagattcggatgccgtcccgttatgctggtgggaggcctgtttgccagcctcggtatggtggctgccagtttctgtcggtcaatcatacaagtttatttaaccacaggcgtcattactggcctgggcctggccctaaacttccagcccagccttattatgctgaatagatacttttctaagcgaagacccatggcgaacgggctggctgccgctggatctccagttttcctctgcgccctgtccccattggggcagctgttgcaggacagatatggatggcgcggtgggtttctgattcttggaggtcttctcttaaactgctgcgtctgtgctgccttgatgaggccactagtagtcaccgctcagccaggctcaggcccaccaagacccagccggagattgttagacctaagcgtgttccgggatcggggattcgttctgtacgccgtcgctgccagcgtcatggtccttggactgtttgtgccacccgtgtttgtggtttcgtatgccaaggacctcggggtgccagataccaaagccgcattccttctgactatcctgggatttatcgatatttttgccaggcctgcagcgggtttcgttgccggtctgggcaaggtgcggccttacagcgtgtacctcttctccttcagcatgttcttcaacggtctcgcagacttagctggctcgaccgccggtgactacggcggtctggtagtgttctgcatcttcttcggcatttcttatgggatggttggtgccctccagtttgaggtgctgatggcgatcgtgggcacacacaaattcagtagtgcgatcggcctcgtgctactgatggaagctgtggccgtgctcgtcggccctccctcaggtggcaagcttctggacgccacccacgtgtacatgtacgtgttcatcctggcgggtgctgaagtgctgacatcctccttaatcctgctgctcggcaatttcttttgtatccgtaagaagcctaaagagcctcaacctgaggtggccgctgctgaggaggagaaattacacaagccccctgccgactcaggagttgacctgagggaagtcgagcacttcctcaaggccgaacccgagaagaacggtgaagtggtccacacccctgagaccagtgtctag

SEQ ID NO: 316540 - DNA, 1398 bp, Artificial Sequence
  derived and/or modified sequence
atgggcggagccgtcgtcgatgagggccctactggtgtaaaggcaccagacggcggttggggatgggctgtgctatttggctgtttcgttattactggcttctcctacgcttttcccaaggctgtatccgttttctttaaggagcttatccaggaatttggcataggatactcagataccgcttggatatcctcaatactgctcgccatgctgtatgggacaggtcccctttgtagtgtgtgcgtaaaccggttcggatgccggcctgtgatgttggttggtggtcttttcgcatctctaggaatggtagccgcttctttttgccgatccattatccaggtgtatctgactacgggcgttattactggtctgggactggcactcaacttccagccatccctgatcatgctgaaccgatatttctctaagcggcgtccgatggccaatggcctggcggcagcaggatcccccgtattcctctgtgcactgtcccccctcggacagttactccaggaccgttacggctggcggggtgggtttctgatactgggcggtttgttacttaactgctgcgtctgtgctgctctgatgaggcctctagtggtaacagcccaacccggttcaggaccccctcgtccttcgcgacgccttcttgacttatctgtcttccgggataggggcttcgtgctctacgccgtagccgcttctgttatggtactgggactttttgtgcctccggtctttgtggtgtcctatgctaaagacttgggagtcccggataccaaggccgcttttctcttgacaattctggggttcattgacatttttgccagacctgccgctggatttgtggctggtctgggcaaagtgcgcccttattccgtgtacctgttttcttttagtatgtttttcaacggcttagccgacttggccggaagcacagcaggagattatgggggactagtggtgttttgtattttcttcgggatttcgtatggaatggtaggggcactgcagttcgaggtcctcatggccatcgttgggacacacaagttttcgagtgccatcgggctcgtgctcctgatggaagccgtggccgtgctcgtgggcccaccctcaggcggtaaattgctcgacgccacccatgtctatatgtacgtctttatcctggctggcgctgaggtcctcacttcttccctgatacttctgctggggaatttcttctgtatcaggaaaaagcccaaagagccacagccagaggtcgcagccgcagaggaggaaaagttacacaagcccccagccgattccggcgtagacctgcgggaggtagagcactttcttaaagctgagccagagaagaacggggaggttgtacacactccggagacctccgtttag

SEQ ID NO: 316541 - DNA, 1398 bp, Artificial Sequence
  derived and/or modified sequence
atggggggtgctgtggtggacgagggtccaacaggggtcaaagcaccagacggtggatggggatgggccgtgctcttcggatgttttgtaatcacgggattctcttacgccttccccaaggccgtctcagtgtttttcaaggaactgatccaggagttcggaatcggctattctgataccgcctggatatcatctattttactcgcaatgctatacggaaccgggcctctatgctcagtatgcgttaatcggttcgggtgcaggccggtgatgcttgtaggcggtttgttcgctagtttaggaatggtcgcggcttcgttctgcagatcgataattcaagtttacctcacgacaggtgtcattacaggtctgggactggccctgaacttccagcctagtctgatcatgctgaaccgatacttctctaagcgcaggccaatggcaaacgggctcgccgctgcaggcagccctgtctttctatgcgccctgtcaccactcggccagcttctgcaagaccggtacggctggcgaggcggtttcttaatattgggagggctgctactaaactgttgtgtgtgtgcagctctaatgcggcctctagtagtgactgctcaacctgggtccggcccaccccgtcctagcaggcggctcctcgatcttagcgtttttcgagaccgcggatttgtgctctatgccgttgctgcctctgtgatggtactgggcctgtttgtgcctccggtattcgtggtttcttacgccaaagacctgggggtgcccgacacaaaagcagcgtttctgctcacgatcctgggtttcatcgatatctttgctcggccagcggctggctttgtggccggtttaggcaaggtgcgcccttactccgtgtatttattttctttttctatgttctttaacggactcgccgacttagctggttccacggccggtgattacgggggactggttgttttctgtattttcttcggaatttcttacggtatggtgggggctttacagtttgaggtgctcatggctattgtgggaacacacaaatttagttccgccatagggctggtcctgctgatggaggctgtggccgttttggtcgggcctccaagcggaggtaagctcttggatgctacacacgtgtacatgtatgtctttatccttgcaggcgcagaagtactgacaagctcgctcatcctcctgctgggcaactttttctgtatccgcaaaaaacctaaggagccgcagcccgaggtggctgccgctgaggaagagaaactgcataagccaccagctgattccggagtagacctgagagaagtggaacattttctgaaggccgagccggagaagaacggggaggtggtccacacccctgaaacaagcgtttag

SEQ ID NO: 316542 - DNA, 1395 bp, Artificial Sequence
  derived and/or modified sequence
atgggaggagccgttgtcgatgagggccccaccggagtgaaagcccctgacggcggttggggatgggctgttctgttcggctgctttgttatcaccggtttttcctatgccttccccaaagccgtttctgtcttctttaaagaactgattcaagaatttgggattggatatagcgataccgcctggatcagtagtatcctcctggctatgctgtacggaacaggtcctctttgttctgtgtgcgtgaataggtttggatgccggcccgtcatgctagtgggtggcttgtttgctagtctggggatggtggcagcgagtttctgcaggtctatcatacaggtttacctcaccaccggggtgataaccggcctgggcctcgccctgaatttccagcctagtctcataatgctgaataggtacttttccaaaaggcggcccatggctaacggtcttgctgccgccggctctccggtattcctttgtgcgctgagccctctcggacagttgctccaggaccgatatggatggaggggcggtttcttgattctgggcggcttgctcctcaattgctgtgtttgcgccgccttaatgaggccccttgtggtcaccgctcagcctgggtccgggccgcccagaccttcacgtcgactgcttgatctgtctgtgttccgcgataggggctttgtgctttatgcagtcgctgcatccgtgatggtgctgggactttttgtgccgccagtttttgtcgtttcatacgcaaaggatttgggcgtgcctgatacaaaggcagcctttctcctgaccatactgggttttattgacatattcgccaggccagcagccggctttgttgcaggcttgggaaaggtcaggccttacagtgtgtatttgtttagcttctcaatgttcttcaatgggctagccgatttggccggctccacagctggagactacggggggctcgtggtcttttgcatttttttcggaatctcttacggcatggtgggggctttgcagtttgaggtcctcatggctattgtgggcacccacaaattctcctcagcaatagggctggtgctgctaatggaggcagtcgcagtgctagttggcccaccctctgggggcaagcttctggacgcaactcacgtttacatgtatgtgttcatccttgcaggtgcagaagtgctcaccagcagcctgattttgctgctcgggaattttttctgtattaggaagaagcctaaagaaccccagccggaggtggccgctgccgaggaagagaagctgcacaagcctcctgcggacagtggggtggatctgcgagaagtcgaacacttcttaaaggctgagcctgagaagaacggcgaagtggtgcatacgccagagactagcgtt

SEQ ID NO: 316543 - DNA, 1395 bp, Artificial Sequence
  derived and/or modified sequence
atgggcggtgcagtggtggatgagggtccaaccggagtgaaagcacccgacggaggctggggatgggcggttcttttcggatgctttgttattaccggtttcagctatgccttccccaaagcagtcagcgtgttctttaaggaactcattcaggaattcggaatcggttacagcgataccgcatggatttcatccatactcctggcgatgctctacggaacggggccactttgttcagtgtgtgtgaacagatttggctgcagacctgtgatgctggtcggaggccttttcgcatccctgggaatggtggcggcctcgttctgtcgatccatcatccaggtctacctgactaccggagtgattaccgggctgggccttgcacttaacttccagccttcgctcatcatgcttaaccgatacttcagcaagcgacggccaatggccaacggactggcagccgccggatcgcctgtttttctttgtgccctgtcgcccttgggacaactgttgcaagatagatacggatggagaggaggctttcttattcttggtggcctgcttctgaactgttgtgtctgtgcagcacttatgcggcctcttgtcgtgaccgctcaaccaggatctggaccacctcgtccatcccgccgcttgctcgacctgtcggtattcagagatagaggttttgtgctgtacgcggtggccgcttcggtgatggtgcttggtctttttgtgcctcctgtgtttgtagtgtcgtacgcaaaagatctcggggttcctgacactaaggcagcgtttctgctgaccatccttgggtttatcgacatatttgcaagaccagcagccggttttgtggcaggtcttgggaaggtgcgtccttactcggtgtacttgttttcgttttcaatgttcttcaacgggctggccgatcttgcaggctcaactgccggtgattacggcgggctggtcgtgttttgcatcttttttggtatttcgtacgggatggtgggtgcacttcagttcgaagtgctgatggcaattgtcggcacccataagttttccagtgctattggacttgtccttctgatggaagccgtcgcagtgcttgtcggacccccgtcagggggcaaacttctggatgcaactcatgtgtacatgtacgtgttcatccttgcaggagccgaggtcctgacctcgtcgcttatactgctgcttggaaacttcttttgcattcgaaagaagcctaaggagcctcaaccagaggtcgcagccgctgaggaagaaaagttgcataaaccccctgcagattcgggagtggacctcagagaagtcgaacactttttgaaggccgagcctgaaaagaacggagaagtcgtgcacacccctgaaacttcggtg

SEQ ID NO: 316544 - DNA, 1395 bp, Artificial Sequence
  derived and/or modified sequence
atgggtggggccgtggtagatgaaggacctaccggggtgaaggccccggatggtgggtggggatgggcagtgctgtttggttgtttcgtgatcaccggcttttcctatgcctttcccaaggcagtgagcgtgttcttcaaggaacttatacaagaattcggaatcggctactccgacactgcctggatcagctcgatccttctggccatgctgtacggaaccggacctctttgctcggtatgtgtgaaccgatttggctgccgtcctgttatgctcgtggggggcctgttcgcctcccttggtatggtcgcggcctcgttttgtaggtctattatccaagtctacttgactacgggcgtgattactggcctcggtcttgctctgaattttcagccaagccttatcatgctcaacagatacttcagcaagagacgaccaatggctaatggacttgcagcagcaggttcgccagtgttcttgtgtgctctctcccccctgggtcaactgcttcaggacagatacggatggcggggtggctttctgatactgggagggcttcttcttaactgttgcgtctgcgcagcactgatgcgacctcttgtcgtgactgcacaacctggtagcggcccacctagaccttcgcgcagactgctggatttgtcggtgttccgcgatagaggatttgtgctctacgcagtcgccgcatccgttatggtgcttggactgtttgtccctccagtctttgtggtgtcgtatgcgaaggaccttggcgttcccgacacgaaagccgcatttctcctgactattttgggttttatcgacattttcgcacggccagcggctggttttgtggcaggactcggcaaggtccggccgtactcggtctacttgttcagctttagcatgttcttcaatggcctcgcggatctggcgggatccaccgcgggagattacggaggtttggttgtattctgtatcttctttggtatttcatacggaatggtgggagcgctgcaatttgaggtgcttatggcgattgtgggcacccacaaattctcaagcgccattggtcttgtgctcttgatggaagctgtggcggtccttgtcgggcctccatccggaggaaaacttttggatgcaactcatgtgtacatgtatgtgtttattcttgcaggtgccgaggtcctgacgtcaagtctgattctcctccttgggaacttcttttgtatccggaagaagccaaaagaaccccagcccgaggtagcagctgccgaagaagagaaacttcacaagccgccagctgactctggtgtggatctgagggaagtggagcatttcctcaaggcagaacctgaaaagaacggtgaagtcgtgcatacccctgagacttcagtg

SEQ ID NO: 316545 - DNA, 1395 bp, Artificial Sequence
  derived and/or modified sequence
atggggggggctgtcgtagatgagggacctacaggggttaaagcccctgatggagggtgggggtgggcagttcttttcgggtgttttgttataacagggttttcttatgcatttcccaaggcagtaagtgttttcttcaaagaactgatccaggaatttgggatagggtatagtgatactgcatggatttcatccatcctgcttgccatgctctatgggactggaccactgtgttcagtgtgcgtgaatcgtttcgggtgtcgacccgttatgctcgtggggggactcttcgccagtctcggaatggtagccgcctccttttgcaggtccatcatccaggtgtatctgacaacaggagtaatcacagggcttggattggctctaaacttccagccttccttaatcatgcttaatcgatatttttctaaacggcgacccatggctaatggactcgctgctgccggaagtcccgtcttcctctgtgccttgtccccccttgggcagctgctccaggatcggtatggatggagagggggattcttgatcttgggggggcttctgctcaactgctgtgtctgtgctgcgttaatgaggcctcttgtcgtcacggctcagcctggatcagggcctcctagaccttcaaggagactgctcgacctgagtgtattccgggatcgcgggtttgtcctatacgctgtcgcagcttctgttatggttcttggattattcgtaccacctgtctttgttgtctcatacgcaaaggatctgggagtgcctgatactaaagccgctttcctattaactatattgggatttatagacatctttgcacgacccgccgccggattcgtggcaggattgggaaaagtaagaccttactctgtgtatttattctcattctctatgtttttcaatgggctcgctgatcttgccggatcaacagcaggggattatggggggcttgtcgtgttctgtattttcttcggaatctcctacgggatggttggggctctgcagttcgaggtcctcatggcaattgttggaacacacaaattttcatccgccatagggcttgtgctgctgatggaagctgtagccgtattagtggggcccccatctggggggaaactcttagatgccacacacgtctatatgtatgtgtttattctagccggggccgaagtgctcacatctagtctgatcctgctgctggggaacttcttttgtatccgaaagaaaccaaaagaaccacagcctgaagtagccgcggccgaagaggagaaattacataaaccacctgctgactccggagtcgatctccgggaagtggaacattttctgaaagccgaaccagagaaaaacggggaagtcgtgcacactccagaaacatctgta

SEQ ID NO: 316546 - DNA, 1395 bp, Artificial Sequence
  derived and/or modified sequence
atgggcggggccgtggtcgacgagggccccactggggttaaggccccagatggtgggtggggttgggcagtcttatttggatgcttcgtaatcacgggattttcatatgccttcccaaaagcagtgagcgtgttctttaaggaactgatccaggaatttggtatcggctactctgacactgcatggataagctcaattttactcgccatgctgtacgggaccggccctctgtgttctgtatgcgtcaaccggttcgggtgccgacctgttatgctggttggtggactgttcgccagcctgggaatggtggcagcgtccttctgtagatccataattcaggtctacttgaccacaggcgtgataacgggactggggctcgccctgaatttccagccgagtcttatcatgcttaatcgttactttagtaagaggcgcccaatggcaaacggcctggctgccgccggctcccctgtgtttctttgcgcgctcagtcccctgggccagttgctgcaagaccggtatggatggcgcggaggcttcttgatcttgggcggacttctcctgaattgctgtgtctgtgccgccctgatgaggcccttagtggtgactgctcagcccgggagcgggccgccccggcccagtcgcaggttgctggatctatcagtatttagggatagaggctttgtcctgtatgctgtggccgcgagtgtgatggtcctggggttgttcgttccccccgtatttgtggtgagctatgccaaagacctgggcgtaccagataccaaggctgcattcctcttgactatcttaggattcatcgatatctttgctcggcctgctgctggatttgtggcaggcctgggcaaagtgaggccatactctgtctacttgttttcattttccatgttcttcaacggtttggcagacctggccgggagtacagctggtgactacggtggacttgtagtattctgtatttttttcgggattagctacggcatggtgggcgcgctacagtttgaggtgctgatggcgattgtgggaacccacaagttctcctctgccattggattggtgctgttgatggaggccgtggcagtcctggtggggccgccttccggcggcaagttgctcgatgctactcacgtgtacatgtacgtgtttatcctggccggtgccgaggtgttaacatcctccctaatacttttgctagggaatttcttctgcatacggaagaagccgaaagagccccagcccgaggtcgctgccgccgaggaagaaaaactccacaagcctccagctgacagcggagtcgatctaagggaggtcgagcactttctgaaggccgagcctgaaaaaaatggcgaggtggttcatacccccgagacatctgtg

SEQ ID NO: 316547 - DNA, 1395 bp, Artificial Sequence
  derived and/or modified sequence
atgggtggggccgtggtggatgagggacctacgggtgtcaaagctcctgacggaggatgggggtgggccgtattgttcggttgctttgtgatcaccgggttttcgtatgcgtttccgaaagccgtcagcgtattttttaaggaactgatacaagagttcggtattggatactctgataccgcctggattagcagtattctgcttgcgatgctgtacggcactgggcccctttgctcggtatgcgtgaaccgattcggatgccgaccggtgatgttggtcggcggactgttcgcatctctgggaatggtcgctgcatctttctgtaggtccataatacaggtatacctgactaccggagtcatcaccggattaggcttagccctgaactttcagccatctctgattatgcttaaccgctatttctccaaacggcgtcccatggccaatgggctggctgctgcgggctccccggtttttctgtgcgcgttatcccctctcggtcagctgcttcaggacaggtatgggtggcgaggcgggttcctgatactggggggactcttgctgaattgttgtgtctgcgcagccttgatgcgacctcttgtggtaaccgcccagccggggagtgggccgccacggccctcccgcaggcttcttgatctgtccgtgtttagggacagagggttcgttctttatgccgtcgccgcctccgtgatggtcctgggcttatttgtaccgccggtgtttgtggtcagctacgctaaggatttgggagtccctgacacgaaagctgcctttctactgacaattttgggatttattgatatatttgcccggccggcagctggttttgtagccggcctgggaaaggtgaggccgtactccgtatatctgttctctttcagtatgttcttcaatggtctcgcagacttggcaggatcgactgccggggactacgggggcttggtagttttctgtatattcttcggcattagctacgggatggtgggtgccctacaatttgaggttctaatggcaattgttggtacccacaagttcagctctgcaatcgggctggtcctcctcatggaggctgtggctgtcctcgtggggcccccatctggaggcaagctgctggatgccacacacgtgtatatgtacgtgttcatcttggctggagctgaagtgctgacaagttcgctgattctgctgcttggaaatttcttctgcatcaggaagaaaccgaaggaaccccagcccgaagtcgcagctgcggaagaagaaaagctgcacaagcctcctgctgatagtggagttgatttgcgagaggtggaacatttccttaaggcagagcctgagaagaatggggaagttgtccacacccctgagacatcagtt

SEQ ID NO: 316548 - DNA, 1395 bp, Artificial Sequence
  derived and/or modified sequence
atgggaggagcggtggtggacgaagggccgactggagtgaaggctcctgacggagggtggggatgggccgtgctttttggatgcttcgtgatcaccggcttctcatacgcattccccaaggccgtctcagtgttctttaaggaactgatccaagagttcgggattggctactctgatactgcctggatctcctccattctccttgccatgctgtacggaacggggccgctgtgtagcgtgtgcgtgaatagattcggttgccgcccagtgatgctggtgggaggtctgttcgcttcgctcggaatggtcgcggcgtcgttttgccgaagcattatccaagtctacctgaccacgggcgtgattacgggactcggactcgccttgaactttcagccatcgctcatcatgctgaaccggtacttctcgaagcgccgccctatggccaatggcttggcagctgcgggaagcccggttttcttgtgcgcgcttagcccactgggtcaactgctccaagacagatacggttggcgaggaggatttcttatcctcggaggactgctgctcaactgctgcgtctgcgcagcacttatgaggccgctcgtcgtcaccgcacagccgggttcgggaccaccgcgcccctccaggcggctgctggaccttagcgtctttcgggatcgaggtttcgtgctgtacgcggtggccgcgtctgtcatggtgctgggactcttcgtgccaccggtgttcgtggtgtcgtacgctaaggacctgggggtgcctgataccaaagcggccttcctgctgactatcctgggattcatcgacatctttgcgcgcccggccgcggggttcgtggcgggcctcggaaaggttaggccgtactccgtgtatttgttcagcttctccatgtttttcaatgggttggccgacctcgcggggtccaccgcaggcgactacggcgggctggtggtgttttgtatctttttcgggatctcgtacggaatggtgggggccttgcagtttgaggtgctcatggcaatcgtgggcacccacaaattctcgtcagctatcgggctcgtcctgctgatggaggccgtcgcggtcctcgtcggtccacctagcgggggaaaactgctggacgccacgcacgtctacatgtacgttttcatcctggccggagccgaggtgctgacttcttccctgattttgctgctgggaaatttcttctgtattaggaagaagccgaaagagccacagcctgaagtggctgccgccgaagaagagaagctccataagcctcccgcggactccggcgtcgatttgagagaggtggagcacttcctgaaagctgaacccgaaaagaatggagaagtggttcatactccagaaaccagcgtc

SEQ ID NO: 316549 - DNA, 1395 bp, Artificial Sequence
  derived and/or modified sequence
atgggaggagcggtggtcgacgagggacctactggagtcaaggccccggatggaggctggggatgggcagtgctcttcggttgtttcgtgatcactggtttctcttacgccttcccaaaggctgtctccgtgttcttcaaagaactgattcaagagttcggcatcggatactcggacactgcgtggatttcgtccatcctgctcgccatgctgtatggaaccggcccgctttgctcagtctgcgtcaaccgcttcggatgtcgcccagtgatgctcgtgggtggcctgttcgcctcgctcgggatggtggcagcgtcgttctgtaggtcgatcattcaggtgtaccttactaccggggtgatcactggactcggacttgcgctcaatttccagccttctctgatcatgctgaacagatacttctccaagagacgcccaatggctaatggactggccgcggccggatcgcccgtcttcctttgtgcgctgtccccgctgggtcagctcctgcaagatcggtatggatggcgcggaggatttctcatcctgggtggtcttctcctgaactgttgtgtgtgtgcagccctgatgcggcccctcgtggtgaccgctcaacctggatccggaccgcccagacctagccgccgcctcctcgacctgtcggtcttccgagatcgggggttcgtcttgtacgccgtcgctgcgtcggtgatggttctgggcttgtttgtgccgccggtgtttgtcgtgagctacgctaaagatctgggagtgcctgacactaaggccgcattcctgctgactatccttggattcatcgacatcttcgcccggccggcagccggattcgtcgccgggctcggcaaagttcggccatactccgtgtacctgtttagcttttcgatgtttttcaacggcctcgccgacctggctggatcaacggccggtgactacggggggctggtggtgttctgcatctttttcggcatctcatacggtatggtgggagccctgcaattcgaggtgcttatggcgatcgtcggtacccataagttttcaagcgccatcgggctggtgctcctcatggaagctgtggcagtcctggtgggtcccccatccggaggaaaacttcttgatgcaacccacgtgtacatgtacgtgtttatcctggcgggagcggaggtcctcacctcctcccttattctgctcctgggcaatttcttttgcatcagaaaaaagccaaaggagccgcagccagaagtcgctgcggctgaagaagagaagctgcataagcctcccgcggattcgggggtggacctccgtgaggtcgaacacttcctcaaggcggaaccagaaaagaatggcgaagtggttcacaccccggaaacctccgtg

SEQ ID NO: 316550 - DNA, 1395 bp, Artificial Sequence
  derived and/or modified sequence
atggggggagcagtggtggatgaggggcctacaggggttaaagcccccgacggagggtggggatgggccgtgcttttcggttgttttgttatcaccggctttagctacgctttcccaaaagcggttagcgtgttctttaaggaactcatacaggaatttgggattgggtattcagataccgcctggatatcctccatactgctggctatgctctacgggaccgggccactgtgttccgtgtgtgtcaaccggtttggctgtagacccgtcatgcttgttggtgggctgttcgcatcacttggaatggtggccgcgtctttctgccggagcattattcaggtgtatctcacgactggggttattacaggcctcggcttagccctcaatttccagcctagtttaatcatgctgaaccgttacttctcaaagagacgcccgatggccaacggactggctgctgccggtagccccgtcttcctgtgtgcattgagccctctgggccagctgctgcaggaccggtatggatggaggggcgggttccttatattgggcgggctccttctgaattgctgcgtatgcgccgctctcatgagaccactcgtggtaacagctcagcctggctccggcccaccccggccctcacggcggcttctggatctgagcgtgtttagagacagagggttcgtcctgtatgctgtggccgcttctgttatggtgttaggactgtttgtgccccccgtatttgtagtctcctacgccaaagatctaggggtgcctgacaccaaggccgctttcttactcacgattctagggtttatcgacatctttgcaagacctgccgctggattcgtggctggactgggcaaggtccgcccctatagcgtttatctcttcagtttctcaatgttttttaatggcctggccgatctggcaggatcaacggctggagactatgggggcctggtggtcttttgtatcttttttggtatttcttatgggatggttggcgcccttcagtttgaggttctgatggctatcgtgggcacccataagttctcaagcgcaatcggactcgtgctgctaatggaggccgtggccgtcttggtgggcccaccttcggggggcaaattgcttgatgccacgcacgtctacatgtatgtttttatacttgcgggagcggaggtgctcacaagctctttgatactcctactggggaactttttctgtatccgtaaaaaaccgaaagagccccagcctgaagtcgccgcagccgaggaggagaaactgcacaaaccgcctgcagatagcggcgtggacctgagggaagtggaacacttcttgaaggcagaaccagagaagaacggcgaggttgtgcacacaccggagacgtccgta

SEQ ID NO: 316551 - DNA, 1395 bp, Artificial Sequence
  derived and/or modified sequence
atgggtggtgcggttgtagatgaaggtccgacgggtgttaaagcgccggatggtggttggggttgggcggtattatttggttgttttgtaataacgggtttttcgtatgcgtttccgaaagcggtttcggtattttttaaagaattaatacaagaatttggtataggttattcggatacggcgtggatatcgtcgatattactagcgatgttatatggtacgggtccgctatgttcggtatgtgtaaatcgttttggttgtcgtccggttatgttagtaggtggtttatttgcgtcgctaggtatggtagcggcgtcgttttgtcgttcgataatacaagtttatctaacgacgggtgttataacgggtctaggtttagcgctaaattttcaaccgtcgttaataatgttaaatcgttatttttcgaaacgtcgtccgatggcgaatggtctagcggcggcgggttcgccggtatttttatgtgcgctatcgccgctaggtcaattattacaagatcgttatggttggcgtggtggttttttaatactaggtggtttattattaaattgttgtgtatgtgcggcgctaatgcgtccgttagtagtaacggcgcaaccgggttcgggtccgccgcgtccgtcgcgacgtctactagatttatcggtttttcgagatcgtggttttgtattatatgcggtagcggcgtcggttatggtattaggtttatttgtaccgccggtttttgttgtttcgtatgcgaaagatttaggtgtaccggatacgaaagcggcgtttttactaacgatactaggttttatagatatatttgcgcgaccggcggcgggttttgttgcgggtctaggtaaagtacgtccgtattcggtttatctattttcgttttcgatgttttttaatggtttagcggatttagcgggttcgacggcgggtgattatggtggtctagtagttttttgtatattttttggtatatcgtatggtatggttggtgcgctacaatttgaagtactaatggcgatagtaggtacgcataaattttcgtcggcgataggtttagtattattaatggaagcggtagcggtactagtaggtccgccgtcgggtggtaaactactagatgcgacgcatgtatatatgtatgtttttatactagcgggtgcggaagtattaacgtcgtcgttaatactattattaggtaattttttttgtatacgaaaaaaaccgaaagaaccgcaaccggaagtagcggcggcggaagaagaaaaattacataaaccgccggcggattcgggtgtagatctacgagaagttgaacattttttaaaagcggaaccggaaaaaaatggtgaagtagtacatacgccggaaacgtcggta

SEQ ID NO: 316552 - DNA, 1395 bp, Artificial Sequence
  derived and/or modified sequence
atggggggcgctgtggttgacgaaggaccaaccggcgtaaaagctccagacgggggctggggatgggcggtgctcttcggctgctttgtcattaccgggttctcttacgcctttcctaaagccgtctctgtcttcttcaaggaactgattcaggagttcggcattggctatagcgataccgcttggatctcttccatcctgctggcgatgctgtatggaactggacccctttgctcagtgtgcgttaatcgatttggatgtaggccggtaatgctggtcggaggactgttcgcatccctgggcatggtagcagcttccttctgtagatccatcatccaggtctacttaactactggagtcatcaccggcctggggctggctctgaattttcagcccagcctcattatgctaaaccgatactttagcaagcggcggcccatggctaatggactggctgccgcagggagcccggttttcttgtgtgccctctccccgctgggccaactgttgcaagatcggtatgggtggagaggcggatttttaatactcggagggctgctgctgaattgctgcgtgtgcgctgccttgatgcgacctctggtcgtaacggcacagccagggtctggtccacccagacccagtcggcggcttctagacctgagcgtattcagggacaggggatttgtgctgtatgcagtggctgctagcgtgatggtgcttggactctttgtgccccctgtgtttgttgttagttacgcaaaagatttgggcgttccagataccaaggctgcctttctgcttacaatcctgggcttcattgacattttcgctaggcctgccgctggattcgtagcgggccttggaaaggtacgaccatattcagtgtatcttttcagtttcagcatgtttttcaacgggctagccgatctggccggctctactgccggcgattacggcgggttggtggtcttctgcattttctttggcatttcctacgggatggtgggcgccctacagttcgaagtccttatggcgattgtgggaacccataagttttcctcagctatcggtttagtgcttctcatggaagctgtcgcggtgctcgtcggtcctccatccggtgggaagcttttagacgccactcacgtgtatatgtacgtcttcatcctggcaggggcggaagtgctcactagtagcctgatactactgctgggtaattttttttgtattaggaaaaagcccaaggaaccacagcctgaggtagccgcagccgaggaggagaaactccataaaccccctgcagactctggcgtggacctccgcgaagttgaacacttcctcaaagccgagccagaaaaaaacggtgaggtggttcacacccccgagacctccgtt

SEQ ID NO: 316553 - DNA, 1395 bp, Artificial Sequence
  derived and/or modified sequence
atgggcggagcagtggttgacgagggaccaaccggcgtcaaggcgccggacgggggatggggatgggctgtgctgttcggatgctttgtcatcaccggtttttcatacgccttccccaaggcggtcagcgtgttcttcaaagaacttatccaagaatttggcatcggttactcggacactgcatggattagctcgatcttgctggctatgctgtacggcaccggaccactgtgctcggtgtgtgtcaaccgcttcggatgccggccggtcatgctggtcgggggactctttgcgtctttgggcatggtggccgcctcattctgcaggtcaatcatacaggtctacctgaccaccggtgtgatcactggactgggactggcactgaactttcagccgtccctgatcatgctcaataggtacttttccaagcgtagaccaatggcgaacggtctggccgccgcaggctccccggtctttctgtgtgcactgtcgccgctgggacagcttctgcaagatcggtatggttggagaggcgggttcctcattttgggcggactcctgcttaactgctgtgtctgtgctgccttgatgcgcccactggtggtgactgcgcagcctgggtcaggcccacctcgcccatccaggcggctgctggacctgtcggtgttccgcgatcgaggattcgtgctgtatgccgttgcagcctctgtgatggtgttgggattgttcgtgccaccggtctttgtggtttcgtacgccaaagatctgggagtcccagacactaaggcagcattcctcttgaccatcctgggcttcatcgacattttcgcgcgcccagcagcaggtttcgtggcgggtcttggaaaagtccggccctactccgtctacctgttcagcttttctatgttcttcaatggactggccgatctggcgggaagcaccgctggagattacggggggctggtggtgttctgtatcttctttggaatctcctatgggatggtgggtgccctgcaattcgaagtgctcatggccattgtgggcacccataagttttcatcggcgatcgggctcgtcctgctgatggaggccgtggctgtcctggtcggaccgcctagcggcggaaagctgctggatgccacccacgtgtacatgtatgtgttcatcctcgccggcgcagaggtgcttacttcctctctcattctgcttcttggtaacttcttctgcatcagaaagaagccgaaggagccccaaccggaagtcgccgctgccgaggaggagaaactgcacaagccgccggccgactccggagtggatcttagagaggtggagcactttctcaaggcggagccagagaaaaacggagaggtcgtccacaccccagaaacgagcgtg

SEQ ID NO: 316554 - DNA, 1395 bp, Artificial Sequence
  derived and/or modified sequence
atgggtggagctgtcgtcgacgaaggtccaactggggtgaaagcaccagacggaggatgggggtgggcagtgctttttggatgtttcgtgatcactggtttttcatacgcgtttcctaaggcagtgtccgtgtttttcaaggaactcattcaggagtttggaattggatacagcgatactgcctggatctcgtcgattcttctcgccatgctttatggcaccggaccactttgttcggtgtgtgtgaaccgctttggctgtcgacctgtgatgctcgtgggtggactgtttgccagccttggaatggttgccgcctcgttttgtcggtccattattcaggtgtacctgactaccggggtgatcaccggcctgggactggctttgaactttcagccttcgctcattatgcttaaccgttactttagcaagcggcgccccatggcaaatggtctggctgcagccgggtcgccagtgtttctgtgtgcactctcacccctgggtcagctcctgcaagaccgctacggatggcgcgggggtttccttattctcggcggccttctgctgaactgttgtgtgtgcgcagcacttatgaggcctctggtcgtgactgcccaacctggatcgggccctccgcgcccttccaggagacttctggacctcagcgtgtttagagatcgcggtttcgtcctttacgcagtggcagcatcggtgatggtccttgggttgtttgtcccaccagtctttgtcgtgagctacgccaaggacctgggtgtgcctgatactaaggcagcatttctcctcactattctgggattcatcgacatttttgctaggccagcagccggatttgtagcaggactcggcaaagttcgtccatactccgtgtacctgttctcctttagcatgttcttcaatggccttgcggacctggccggctccacggcaggagactacggtggcctggttgtgttttgcatcttttttggaatatcatacggtatggtgggagccctgcaattcgaagtgctgatggcgattgtgggaactcacaagttttcctccgcaatcggtcttgtgctcctcatggaagcagtggccgtcctcgtagggcccccatcaggtggaaaacttctggacgcaacccatgtctacatgtacgtgttcatcctggcaggagcagaagtgcttacctcgtccctgattctcctcctcgggaatttcttttgtatccgaaagaagcctaaagaacctcaacctgaagtggcagccgccgaagaggagaaacttcacaaaccccctgcagattccggagtggaccttcgagaagtggaacatttccttaaggcagaaccggaaaagaacggagaagttgtgcataccccagagactagcgtg

SEQ ID NO: 316555 - DNA, 1395 bp, Artificial Sequence
  derived and/or modified sequence
atggggggtgcagtggtggatgagggcccaacaggtgtgaaggctccagatggaggatgggggtgggccgtcctgtttggctgcttcgtgataaccggattttcatatgccttcccaaaagccgtgtccgttttctttaaagagctgattcaggagttcgggatcgggtattccgacacggcatggatctcctctatcctccttgcaatgctatacggaacgggccccctgtgctccgtctgcgttaataggtttggttgccggcctgtcatgttggtggggggactgttcgcatcacttgggatggtagcggcaagcttctgcaggtcaattatccaggtgtacctgaccaccggcgtgataacagggcttgggctagcacttaattttcagccaagtctgattatgctaaaccgctattttagcaaacgaagacctatggccaatggactggccgctgctggatctcctgtctttctgtgcgccctgagccctctggggcagctgctgcaggaccgttatggatggaggggcggtttcttgatattaggaggactgctgctgaattgttgtgtatgcgctgctctcatgagacctctggtcgtgactgcccaaccaggctctggtccgccaagaccctcgcgccgacttcttgatctgtccgtctttcgggatcgagggtttgtgctctacgctgtcgctgcctccgtaatggtactgggcctcttcgtccctcccgtgtttgtcgtttcttacgccaaggatctcggtgttccagacacaaaggcagctttcctgctgactatcttgggctttatcgacattttcgccagacctgccgctggcttcgtggcgggccttggtaaggtccggccttattctgtttatctattctcattctccatgtttttcaatggccttgccgaccttgccggatccacggcaggagattacggtggcttagtcgttttctgcatcttttttggcattagctatggtatggttggagcccttcagtttgaagttttgatggccatcgtgggaacccacaagttcagttccgccattggacttgtgctcctgatggaggccgtagccgtgctggttggaccccctagcggcggaaagctcctggacgctacccacgtctatatgtatgtattcattcttgccggagctgaagtgttgacctcatctttgatccttcttctgggcaatttcttctgcattaggaagaagccgaaggagcctcaacctgaggtggccgctgcagaggaagagaaattgcataaacccccagcagattctggggtggacctcagggaagtagagcattttctgaaggccgagcccgagaagaatggcgaagtcgttcatacccccgagacttcggtg

SEQ ID NO: 316556 - DNA, 1395 bp, Artificial Sequence
  derived and/or modified sequence
atgggcggggctgtggtcgacgaaggaccaactggcgtgaaagctcctgacggaggatggggttgggccgtgctctttggctgctttgtcataaccgggtttagttacgctttccctaaagctgtcagcgtcttctttaaggagctgatccaggaattcggcatagggtactctgacactgcctggatatcttccatactgctcgctatgctctatgggaccggtccactctgctccgtgtgcgtgaaccgcttcggctgtaggccagttatgctagttggcggcctgttcgcctctttaggcatggtggctgcatctttttgccgatcaattattcaggtgtacttgacaaccggcgttataactggcctgggcctggccctgaatttccaaccaagtctaataatgttaaatcgctacttttccaagagaagacccatggctaacggactggctgccgccgggagccctgtttttttgtgtgccctaagcccactcgggcagctgctgcaggatcgctacggttggcgggggggtttcctgatccttggcggcctgctgctgaactgctgtgtgtgtgctgccttgatgcgccccctggttgtcaccgcccagccaggaagtgggcctccccgtccctccagaaggctgctcgacctgtctgtgttccgtgatcggggctttgttctgtacgccgtggctgctagcgtgatggtgctgggcttgttcgtgccccccgttttcgttgtgagctacgccaaagacctaggggttccagatacaaaggctgccttcttactgaccatcttaggctttattgacatattcgccaggcctgccgccggctttgtggcagggcttgggaaagtccgcccttacagcgtgtatttattttctttctccatgttcttcaatggcctagccgacctggctggatctactgcaggggattatggaggtctcgtggttttttgtatctttttcggcatatcttatggtatggtgggggccttgcagttcgaggtgcttatggcaatcgttggcacacacaaattcagctccgctatcggattggtgcttctgatggaggcagttgccgtgctggtggggccaccctccggcggcaagctgttagatgccacacacgtttacatgtacgtcttcattctcgccggagctgaggtgctgacatcttccctcatcctgttattggggaacttcttctgcataagaaagaagcctaaggagccccaaccagaagtggccgccgccgaggaggaaaagctccacaagccacctgcagatagtggggtggacctgcgcgaagttgaacacttcctgaaagccgaacccgaaaaaaacggcgaggtggtgcatactcccgagaccagcgtc

SEQ ID NO: 316557 - DNA, 1395 bp, Artificial Sequence
  derived and/or modified sequence
atgggcggcgcagtggtcgatgagggtccgacgggtgtgaaggcccccgatggtggatggggctgggccgtgctgttcggctgcttcgtcatcactggattctcgtacgccttccccaaggccgtcagtgttttcttcaaagaactgatccaggaattcggtatcggctactccgacactgcctggatctcctccattctgttggccatgttgtacggtaccggtccattgtgtagtgtctgcgttaaccgcttcggctgccgaccggtgatgctcgtcggcggtcttttcgccagccttggcatggtggccgcctcattctgccgtagcattatacaggtgtacctcaccactggtgtcatcaccggtctgggtcttgctttgaacttccagccttcgttgatcatgttaaaccgctatttttcgaaacgccgccccatggcgaatgggctggcggctgcaggtagtcccgtcttcctttgcgctctgtcgcctcttggtcagctactccaggatcgctatggctggcgcggcgggttcctcattcttgggggtctcctgctgaactgctgcgtgtgcgccgctcttatgcgccccctcgttgtcacggcgcagcctggatccggccctccccgtccttctagacgccttttggacctgtcagtctttcgtgaccgtgggttcgtgctttacgccgtggcggcttccgttatggttctcggtctgttcgtaccgccggtgttcgtcgtttcgtatgccaaggacctcggtgtccccgacaccaaggccgccttcctgttgacaatcctcggtttcatcgatatttttgccaggcccgccgccgggttcgtcgctggcctgggcaaggtgcggccctactcggtctacctcttctccttctctatgttcttcaacggacttgcagatctggcaggcagcacggccggggattatggtgggctcgttgttttctgcatctttttcggcatttcttatggtatggtgggtgctctacagttcgaggtgcttatggccatcgtgggtacccacaagttcagcagtgccattggcttggtcctcttgatggaggctgtcgccgtgcttgtcggaccgccatccggaggaaagcttctcgatgcgacccacgtttatatgtacgtgttcattctggcaggtgcagaagtcttgacgagcagcttgatcctgctgctcggaaacttcttctgcatcaggaagaagcccaaggagccgcaacccgaggttgctgcagctgaggaagagaagctccataagccgcctgccgactccggcgtggacctgcgggaggttgagcatttcttgaaggccgagcccgagaagaacggagaggtcgttcatacaccagagacctcggtc

SEQ ID NO: 316558 - DNA, 1395 bp, Artificial Sequence
  derived and/or modified sequence
atgggtggcgccgtggtggacgagggcccaacaggagtgaaggctccggatgggggctggggatgggccgtcctatttgggtgttttgtaattacaggcttctcgtatgccttcccaaaggcagtgagcgttttttttaaggaactgattcaggagttcggcattggctatagcgacactgcctggatctcttctatcctgttggccatgctatacggaactggccctttatgctccgtctgcgttaacaggttcggttgccgccccgtgatgcttgtgggtgggctgtttgcaagcctgggcatggtcgctgcaagcttttgtaggagcatcatccaggtttatctcaccacgggggtgataacaggtttaggactggccctgaatttccaaccctccttaatcatgttaaaccggtactttagcaagagaagaccaatggctaacgggctggccgcggctggctccccagtgttcctctgtgccctgagcccgctggggcaactcctgcaggacaggtacgggtggcgcggggggttcctcatactgggtggcctcctgctgaactgctgcgtctgcgctgcgctaatgagaccactcgtagtgacagcccagcctggatcaggccctcccagaccatccaggaggcttctggacctgtccgtttttagagacagaggctttgttttgtacgcggtcgcggcaagcgtgatggttctcggactcttcgtcccacctgtgttcgtggtctcctacgcaaaagaccttggcgtcccagacactaaggcagccttcttgttgactatactcggattcattgacatcttcgctcgaccagcagccggctttgtcgccggcttaggaaaggtgagaccatatagcgtgtacttgtttagcttttccatgttctttaatgggttagcggatttggcaggaagtactgctggcgactatgggggtctggtcgttttttgcatcttcttcggaattagttacgggatggtgggggccctccagttcgaggtgctcatggcaatagtcggtacccataagttctcaagcgcaatcggattggtcttactcatggaggccgtggcagtcttagtcggaccgcccagtgggggcaaattgcttgatgctactcatgtttacatgtacgtgttcatcctggccggagcagaagtcctcacctcgagcctaatccttctgcttggtaacttcttctgtatccggaaaaaacctaaggagccccaacccgaggtggccgccgctgaagaagagaaactacataagcctcccgccgatagcggagtcgatctcagagaagtggagcacttcctgaaggctgagcccgaaaaaaacggtgaagtagtccacaccccagagacatctgtg

SEQ ID NO: 316559 - DNA, 1395 bp, Artificial Sequence
  derived and/or modified sequence
atgggaggggcagtggtggatgaaggacctaccggtgtcaaggcgcctgatggaggttggggatgggcagtgctgtttggatgttttgtgattactggatttagctacgccttccccaaggccgtgtcggtattcttcaaagaactgatacaggaatttggtattggatactcggataccgcatggatcagtagcattcttcttgcaatgctctacggaaccggtcccctttgttccgtgtgcgtaaaccgatttggctgtcgccccgtcatgcttgttgggggcttgttcgcatcactggggatggtcgctgcatctttctgtcgatcaattatccaggtctacttgactacgggagtcattaccgggctcggtctggcactcaattttcaaccttcgctgatcatgctcaacagatacttctccaagagacgcccaatggcaaatggccttgcggcggcaggatcccctgtctttctgtgcgccctgtcaccacttggacaactgttgcaagacaggtacggttggagaggtggatttcttatcctcggcgggctcttgctgaactgttgcgtgtgtgcagcactcatgcgtcctctcgttgtcactgcccaaccaggctcagggccacctcggccatcgagacgactccttgatctgtccgtgttccgtgaccggggttttgtgctctacgctgtggcagcatccgtgatggtgctgggtcttttcgtgcctcctgttttcgtggttagttacgccaaagatctgggtgtccctgatactaaggcggcatttctgctcactatcctgggctttatcgacattttcgcacggcccgctgcgggttttgtggccgggttgggtaaggtacgcccatacagcgtctatcttttttcctttagcatgttctttaacggtctggcagatcttgctggttccactgcaggagattacggcggcctggtggtgttttgcatattctttggcatttcgtatgggatggtcggagcactgcaatttgaagtcctcatggcgattgttggaacccacaagttctcgtcagccatcgggctggtgctgctgatggaagcagtggccgtgctggtgggaccgccgagcggaggaaagttgcttgatgccactcacgtgtacatgtacgtgttcattttggcaggagccgaagtccttacctcctcgctcattctgctgcttggtaacttcttttgtatccggaagaaacctaaagaaccacagcccgaggtcgccgcggcggaggaggagaagctccataaaccacccgcggactcgggcgtcgaccttagagaggtggaacattttcttaaggcagaaccagagaagaatggtgaagtggtgcatacccctgaaacgagtgtg

SEQ ID NO: 316560 - DNA, 1395 bp, Artificial Sequence
  derived and/or modified sequence
atgggaggtgccgtggttgacgaaggtccaactggagtgaaagcaccggacggtggctggggatgggccgttctttttggatgtttcgttataaccggattcagttacgcttttccaaaggcagtatcggtgtttttcaaggaactgattcaagaattcggtattggttactccgacactgcatggatctcgagcatcctgttggcaatgctctacggcaccggccccctgtgtagcgtgtgcgtcaatcgatttggttgtcgaccagtgatgctcgttggcggacttttcgcgagccttggtatggtggcagcatccttttgcagaagcatcattcaggtctacctcactactggagtgattacgggactgggtcttgcactcaactttcaaccaagcctgatcatgcttaacaggtacttttcaaagcgacggccgatggcaaacggactcgctgcagccggatcccctgtgttcttgtgcgctctcagcccacttggccagcttcttcaagacagatacggttggcgcggagggtttctcattcttgggggactgctgcttaattgttgcgtctgcgctgcacttatgcggccactggtggtcaccgcccaacctggatcgggccctcctagaccatcgcggagactcctcgatctgtcagtctttagagatcgcgggtttgtcctttacgcggtcgccgcttcggtgatggtgctggggttgtttgtaccgccggtctttgtcgtatcctacgcaaaggatctcggggtgccagacacgaaggcagcctttcttctgactattctgggctttatcgatatctttgcacgccctgcagccggttttgtggcagggctgggtaaggtccggccttattcggtgtacctgtttagcttctcaatgttctttaatggactcgcagaccttgctggaagcactgccggggattacggtggccttgtggtgttttgcatattcttcggtatatcgtatggaatggtgggcgcgctccagtttgaggttttgatggcaattgtgggcacccacaagtttagctcagcaattggactcgtgctgcttatggaagcggtcgctgtcctggtgggtcctccatccggcggtaagctgctcgatgccacccatgtgtatatgtacgtctttattctggcgggtgctgaagtgctgacctcgtcgctgatcctgctcttgggtaactttttctgtattcgcaagaaacctaaagagccccaacctgaggtggcagcagctgaagaagagaagctgcacaaacctccagcagattccggggtggatctgcgtgaagtcgaacattttctgaaggcagagcctgagaaaaacggtgaagtggtgcatactcctgaaacgtccgtg

SEQ ID NO: 316561 - DNA, 1395 bp, Artificial Sequence
  derived and/or modified sequence
atgggtggagcagtggtggacgagggacctaccggagtgaaagcccctgatggcggttggggctgggcagttctctttgggtgttttgtgatcaccgggttctcttacgcatttcccaaggcagtgtcggtctttttcaaggaactgattcaagaatttggaatcggctactcggatactgcgtggatctcgtcaatattgctcgcaatgttgtacggcaccggaccactgtgtagcgtctgtgtgaaccgctttggatgccgccctgttatgctggttgggggtcttttcgcctcgctgggcatggttgccgcgtctttttgcagatcgattatccaagtgtacctcaccaccggagtgatcaccggtttgggactggcactcaatttccagccatcgctcattatgctgaaccggtatttcagcaagagacgaccaatggcaaatggcttggccgcagctggcagccctgtttttctttgtgccctgtcgccattgggacagctgctgcaagatcgttacggatggagaggaggcttcctcatcctgggcggcttgctgcttaattgctgcgtgtgcgctgcacttatgaggccacttgtggtcactgcacaaccaggttccggaccaccccgcccttcccgcagacttctggacctgagcgtctttagggatcggggatttgtcctgtacgcagtggcggccagcgtcatggtccttggcttgttcgtgcccccggtgttcgtcgttagctacgccaaggacctgggagtgcctgataccaaggctgcatttctcctgaccattcttggtttcatcgacattttcgctcgacctgctgcaggttttgtcgcaggccttggaaaagtccgcccatattccgtctacctcttttcgttttccatgtttttcaacgggttggcagatcttgcaggttcgacggcaggtgattacgggggactcgtggtgttttgcatcttctttggcatctcatacggtatggtgggagcgttgcagttcgaagtgctgatggccattgtgggaactcataagttttcatcagcaatcgggcttgtccttctcatggaagcggtggcagtcctggtcgggcctccctccggaggtaagctgctcgacgctactcatgtgtacatgtacgttttcatcctggcaggtgctgaagtgctgacctcgtcgcttattctccttttgggtaacttcttttgtatccgtaagaagcctaaagaaccccagcctgaggtggctgcagcagaagaggaaaagctgcataaaccacctgccgactcgggggtggatttgagagaggtggaacactttctgaaagcggagccggagaaaaacggagaggttgtgcacacgcccgaaaccagtgtg

SEQ ID NO: 316562 - DNA, 1395 bp, Artificial Sequence
  derived and/or modified sequence
atgggaggagccgtcgtcgatgaaggccctactggggtgaaagcgccggacggcggatggggatgggccgtgctgttcggatgtttcgtgatcactggctttagctacgcatttccaaaggccgtgtctgtgttctttaaggagttgatccaggagtttggcatcggatactccgataccgcttggatctcatccatactgctggcaatgctgtatggtacgggaccgctgtgttcggtgtgcgtcaatcggtttggatgtcggcccgtcatgctggtcggtggattgtttgcgagcctgggaatggtcgcggcctcgttctgccgctcgatcatccaagtctacctgactactggtgtgatcaccggactggggctcgcattgaacttccaacccagcctcatcatgctgaaccgctacttctccaaacgccgcccaatggcaaacgggctcgccgccgctggatccccggtctttctctgcgcgctgagtcccctgggtcaactgctccaagaccggtacggatggcgaggtgggttcctcatactgggaggactgctcctgaattgctgtgtgtgcgcagcccttatgaggcccctcgtggtgaccgcacagccgggctcaggaccgccgcgcccgtcgagacggctgcttgacctgtcggtgttccgcgaccggggcttcgtgttgtacgctgtcgctgctagcgtgatggtgctcggactgttcgtgccgccggtgttcgtagtgtcctacgcgaaggatctcggcgtgccggataccaaagcggccttcctcctgaccatcctgggcttcattgatatcttcgcaagacctgccgctgggtttgtggcggggcttggaaaggtgcggccgtacagcgtctacttgttttccttctccatgttcttcaatggcctcgcggacctggccgggtcaaccgccggcgattacggcggcctcgtggtgttctgcatcttttttgggatctcctacggcatggttggagctcttcagttcgaggtgctcatggctatcgtgggtactcacaagtttagcagcgccatcggactggtgttgttgatggaggcagtcgcggtcctcgtgggacctccaagcggaggaaagctcttggacgcgacccacgtctacatgtatgttttcatcctcgccggagcggaggtcctgacctcatccctcatcttgctgctgggtaacttcttctgtatccggaagaagccgaaggaaccacagcctgaggtggcggccgccgaagaggagaaactgcataagccgccggccgattctggggtggacctgcgcgaggtcgagcatttcctgaaagctgaaccggagaagaatggcgaagtggtccacacgccagaaacttcagtg

SEQ ID NO: 316563 - DNA, 1395 bp, Artificial Sequence
  derived and/or modified sequence
atggggggagcagttgtggatgaagggccgactggggtcaaagcacctgacggcggctgggggtgggccgttctgtttggctgcttcgtgatcacaggcttcagctatgcctttccaaaagcagtgtccgttttctttaaagagctcattcaagaatttggcattgggtattcagacacagcatggatttcctccatacttctagctatgctttatggaacggggcccttgtgtagtgtctgcgtgaaccgcttcggctgtcgccccgtgatgctcgtcggcggattattcgccagcctaggtatggtggccgcctctttctgtaggtctatcatccaagtttacctcacaactggagtgattactgggctaggcttggcgctgaacttccagccgtctctaattatgctgaacaggtatttctctaaacgcaggcctatggcaaatggtctggcagccgcagggtctcctgtatttctttgtgccctaagccccctcggtcagttgctgcaagacagatatggctggcggggcggatttctcatcttaggtggactgctccttaattgctgcgtgtgtgcagccctgatgcggcccttagtcgttactgcacagcccggttcaggaccacctcgccctagtaggcgtctactggatctctctgtattccgagatcgcggattcgtgttgtacgccgtggctgcctcagtgatggttctgggactgttcgtgcctcctgtcttcgtcgtgtcctatgccaaagacctcggagtgccagataccaaagctgcgttcctgctgactattttgggatttatagacatctttgcacgcccggctgcaggatttgtggccggactgggaaaggtgagaccatattccgtgtatctgtttagcttcagtatgttttttaacggtttggcagacttagccggctctactgctggagactatgggggcctcgtggtattctgtatttttttcggcatatcctatggcatggtgggagctctgcaatttgaggttctgatggccatcgtaggcactcacaaattcagtagcgctatcggacttgtactgctgatggaggctgtggccgtcctagttggcccaccttccggaggaaagctgttggacgcaacgcacgtctacatgtatgtcttcatcctagccggcgcagaggtgttgacctcaagtcttatcctcctactcggtaatttcttctgtatccgcaagaagcctaaggaacctcagccagaggtggctgctgccgaggaagagaaactacataagccccccgccgattcgggagttgacttgcgagaggtagaacacttcctcaaagcggaacctgaaaagaacggagaggtcgtccataccccagaaacttcagtg

SEQ ID NO: 316564 - DNA, 1395 bp, Artificial Sequence
  derived and/or modified sequence
atggggggcgcggtagtggacgaggggcctaccggagtgaaggcccctgacggaggctggggctgggcagtgctttttgggtgttttgtgattactggcttctcatacgcatttcctaaggcagtgagtgtcttctttaaggagctcattcaggaattcggcattggctattccgataccgcttggatcagcagtattttactcgccatgctgtacggtaccggcccattgtgttctgtgtgtgtcaaccgattcggctgtcgccctgtgatgctggttggtggcttatttgcctccttagggatggttgctgcttctttttgccgctctatcattcaggtctatctgacaaccggagttatcacagggctcggcctcgctttgaattttcagccgtccctgatcatgctcaatcggtacttttctaagaggagacccatggccaatggcttggccgcggctggaagccctgtattcctctgtgccctgtccccactcggacagctgttacaggaccgctacgggtggcggggagggtttctgattttgggtggtttgctcctgaactgctgcgtttgcgcagctctaatgagaccgcttgtggtcacagcacagccgggctccggtccacccagacctagtcgcaggctgctggacctgagtgtgttcagggatcggggttttgttttgtacgccgtagcagcctctgtgatggttttgggtctgttcgttccacccgtcttcgtggtcagttatgcaaaggatctgggggtgcccgacactaaagccgctttccttcttactatcctgggtttcatcgatatttttgcaaggccggctgctggttttgtcgcagggctgggtaaggtccgcccttacagcgtgtacttattctcgttctctatgttctttaacggcctggccgatctggccggttcaaccgctggagactacgggggtcttgtggtattctgtatcttttttggcatcagctatggcatggttggagcgctgcagttcgaggttttaatggcaatcgtaggtacacacaaatttagctcggcaattggcctcgtcttgctgatggaggccgtcgcagtgctggttgggccaccaagcggcggcaaattgctagatgccactcatgtgtacatgtatgtgtttatccttgcgggtgcagaggttcttacctcctcgctgatcctactacttggtaatttcttctgtataagaaaaaagcctaaagagccccaaccggaagttgctgctgctgaggaagaaaagttgcacaagccccccgccgacagcggagtggacctcagagaggttgagcactttcttaaggctgaaccagagaagaacggagaggtagtgcacactcctgagacatcagtg

SEQ ID NO: 316565 - DNA, 1395 bp, Artificial Sequence
  derived and/or modified sequence
atgggaggagcagtcgtggatgagggcccgaccggtgtgaaggccccagatgggggatgggggtgggccgttctctttggctgtttcgtgatcaccggatttagctacgcgtttccaaaagctgtgtcggttttcttcaaagagctgatccaggagttcggcatcggttatagcgacacggcatggatctcgagcatcctgctggcaatgctctacggaactggacctttgtgtagcgtgtgcgtgaatcgcttcggttgccggccggtaatgctggttggcggactgttcgccagcctgggaatggttgctgccagcttttgccgctctatcatccaagtgtacttgactactggcgtgattacgggactgggtttggcgttgaactttcagccgtccctcatcatgctgaatcgatactttagcaagcgtaggcccatggctaatggactggcagcagccggctctcctgtgttcctttgtgcactgtccccactcgggcagcttctccaggaccggtacgggtggcgaggtggcttcctcatccttggtggactgctcctgaactgctgtgtgtgcgctgccctgatgcggccactcgtggtgaccgcgcaacctggttccggaccgccaagaccgagccgccgactcctcgatctctcggtgtttcgcgacagggggttcgtgctgtacgctgtcgcagcatcggtgatggtgctgggcctgtttgtgcccccggtgtttgtcgtgtcatacgcaaaggacctgggcgtgcctgacactaaagccgcgttcctcttgactatcctgggcttcatcgacatcttcgcccgcccggctgccgggttcgtggccgggctggggaaggtgaggccatacagcgtgtatttgtttagcttctcgatgttcttcaatggattggctgacctcgctggatcaactgcaggagattacggcggactggtcgtgttctgcatcttttttggaatttcttacggaatggtgggggcgctccagttcgaggttcttatggccatcgtcggcactcacaagttctcgtccgcaatcggcctggtcctgcttatggaagcggtcgccgtcctggtgggacccccatcaggcggtaagctgctcgacgcaacccacgtttacatgtacgtgttcatcctggctggggcggaagtgcttaccagctcgctgatcctgcttctgggaaacttcttctgcattagaaagaaaccaaaggaaccacagccggaagtggccgcggctgaggaagaaaagctgcacaagccgccggccgactcgggcgtcgatctgcgggaagtggaacatttcctgaaagcagagccagaaaagaacggagaagtggtccacactccagaaacttcagtg

SEQ ID NO: 316566 - DNA, 1395 bp, Artificial Sequence
  derived and/or modified sequence
atgggtggcgctgtcgtcgatgaaggcccaactggagtaaaggcaccagatggcggatggggatgggccgtcctgtttggctgctttgttattactgggttttcttacgcctttcctaaggccgtgagcgtgttcttcaaagaactgatccaagagttcggaataggctactcagacaccgcatggattagctctatcctcctggcgatgctgtacggaaccggccctctgtgcagcgtgtgcgttaaccggtttggctgcagacccgtgatgctagttgggggcctattcgccagcctgggaatggtggcggcctccttctgtaggagcatcatccaggtttatttaaccactggagtcattactggtttgggactggctctcaatttccagcccagcctaatcatgctgaaccgatatttcagtaaaaggagacccatggctaatggcctagccgccgcaggcagtccagtgttcctttgcgccctgagtcccctgggccagttgctgcaggacaggtacggctggagaggcggattcttgatcctaggcgggctccttctgaattgttgtgtttgcgctgccctgatgcggcccctggtggtgacagcccaaccaggctctggacctccaaggcccagcagaaggcttttagatctctcagtctttcgtgacagggggtttgttctgtacgccgtggccgccagcgtgatggtgctgggattgttcgtgccacccgtcttcgtggtcagctacgctaaggatttgggggtgcccgacactaaggctgccttcctgctaaccatcctgggcttcattgacatctttgcccggcccgctgctggcttcgtggccgggcttgggaaggttagaccttactccgtgtatttgttctcattttccatgttttttaatggtctggctgacctcgctgggtctactgccggggattatggagggcttgtggtgttctgcatcttttttgggatttcttatggcatggttggcgcactccaatttgaagttctcatggcgatcgttggcacgcacaaattttctagcgccattggactggtgcttctgatggaggccgttgccgtcctggttggccccccatccgggggtaagcttttggacgcaacccacgtgtatatgtatgtattcatcctcgcaggggcagaagtcttgacctcttcattaatactgctattggggaactttttttgcattaggaagaagccaaaggaaccccagcccgaagtcgccgcggccgaggaggagaagctgcacaagcccccagctgatagcggcgtggatctgcgggaggtggagcattttctcaaggcagagccagaaaagaatggtgaggttgtgcatacccctgagactagcgtc

SEQ ID NO: 316567 - DNA, 1395 bp, Artificial Sequence
  derived and/or modified sequence
atgggcggcgctgtagtcgatgagggaccaactggcgtcaaggcccctgatggcggttggggttgggcagtactttttggttgtttcgtgatcaccggcttctcttacgccttcccaaaagccgtctccgtatttttcaaagagctaattcaggaattcggcatcgggtattcagatacggcctggatcagtagcatattattggccatgctttatggaactggacctctttgttccgtgtgcgtcaatagatttggttgccgacctgttatgctagtgggaggactttttgcctcattagggatggttgcagcaagcttctgcagaagcatcatccaggtatacttgactaccggcgtcataaccggcctcgggttggcgctgaacttccagcccagcttgattatgctaaatcggtatttcagcaagcgtcggccgatggcaaatgggctggcagctgcaggatcaccagttttcctctgtgctctgagtcccctaggccagttgcttcaagacagatatggatggcgcggcggattcttaatcctgggtggcctcctcctgaattgttgcgtgtgcgcagccctgatgcgccccctcgtcgtgactgcccagcctgggtctggaccaccacgcccaagtagacggctgttagacttatcggtttttagggaccgaggttttgtgttgtatgcggtggccgcaagtgtcatggttcttgggctgtttgtacctcccgtcttcgttgtctcttatgccaaggacctcggtgtccccgacacaaaagccgcgttcctacttaccatcttaggcttcatcgacatttttgcccgcccagctgccggatttgtagccggcctcggaaaggtccgcccatacagcgtgtatttgttcagtttctccatgttctttaatggactggccgatctggccggcagtactgccggagattacgggggcttggtagtgttctgtatttttttcggcatttcgtacgggatggtaggagctctccagttcgaagtcctgatggcaatcgtaggaacccacaaattcagctctgccattggactagtcttattgatggaagctgtggcagtcctggtcggacctccctccggcgggaagttgctggacgctacacacgtgtatatgtatgtttttatccttgccggggctgaggttcttacatcaagtctgatcctactgctcgggaactttttttgtatccggaaaaaacctaaagaaccccaaccggaggtagctgcggctgaggaagaaaaactgcacaaaccacctgccgattcaggcgttgatctgcgcgaggttgagcactttctcaaggctgaacccgaaaagaacggcgaagtcgttcacactcccgaaacctctgtc

SEQ ID NO: 316568 - DNA, 1395 bp, Artificial Sequence
  derived and/or modified sequence
atgggcggagcggttgtggacgagggacctactggtgtcaaggcaccagatggcggctgggggtgggccgtgctgtttggttgctttgtcattaccggattcagctacgcatttccaaaggccgtttcagtgttctttaaggagctcatccaggaattcggtattggttacagcgatacggcatggatctcctccattctccttgcaatgctctacggaaccggacctctgtgttccgtgtgtgtcaatagatttggttgcagaccggtgatgttggttgggggtcttttcgctagccttgggatggtggcagccagcttctgccgctcgattattcaagtctacctgaccaccggggtgatcacggggctcggacttgccttgaatttccaaccttccctgattatgcttaacaggtacttcagcaaaagacgtccgatggcaaacggtcttgctgccgcgggatcgccggtctttctctgtgcactctcacccctgggacagcttctccaagaccgttatgggtggagaggaggttttttgattctggggggcctccttctgaactgctgcgtgtgtgccgcactgatgcgtcctcttgttgtcactgcacagcctggttcaggaccaccaagaccttcgcgcagactgcttgacctctccgtctttagggaccgcgggttcgtgctctacgccgtggcggcatccgtgatggttctgggactgtttgtgccccccgtgtttgtcgtctcgtacgcgaaggatcttggcgtccctgatactaaagctgcattcctgctgaccattctggggtttatcgacatatttgcgcgacctgccgcaggatttgttgcaggacttggaaaggtgcgcccttactccgtgtatcttttctcatttagcatgttctttaacggcctggcggatctggcaggatcgaccgcaggcgattacggaggcctggtggtgttttgtatcttctttgggatcagctacggaatggtcggtgcccttcaatttgaagtgcttatggccatcgttggcacgcataagttctcgtccgcaatagggctcgtgctgctgatggaggctgtggcagtgttggtggggcccccatcgggtggaaagctgctcgatgcaactcatgtgtacatgtacgtgttcatccttgcgggtgcagaggtgcttacctcttccctgattctgttgcttggtaacttcttttgcatccgtaagaaacccaaagagccgcagcccgaagtcgcagcggctgaagaggagaagctgcataagcctcctgccgactcaggagtggatctcagggaagtggaacactttcttaaagccgaaccagaaaagaatggagaagttgtccacaccccagaaacgagcgtg

SEQ ID NO: 316569 - DNA, 1395 bp, Artificial Sequence
  derived and/or modified sequence
atgggaggggcagttgtggacgaagggcctactggggttaaagctccagacggcgggtggggctgggcggtactgttcggttgtttcgttataactggtttctcttatgcctttcccaaggctgtaagcgtgtttttcaaggaactcatacaggagtttggaattggctatagcgatactgcctggatctcttcaattctccttgccatgctctacggcacagggccactgtgcagcgtatgcgtaaatcggtttggctgccggcccgtcatgctggtgggcggcctattcgcatccttgggcatggttgccgcctctttttgcagatctatcatccaagtctacctgacaacaggagtaattaccggccttgggctggcactcaactttcagccttctctgattatgcttaacagatatttttctaagcggaggccaatggccaacgggctagctgcagcaggatcacctgtgtttctgtgtgcactgtctccactagggcagctgctccaggatagatatgggtggcgcggcggatttctgatcctgggaggccttttgctgaattgctgcgtgtgcgccgcccttatgcggcctttggtagttacagcccagcccggctctgggcctccccgcccgtcaaggcgcctgctggatctgtcagtcttccgggacagggggttcgtgttatatgccgttgccgcctctgtcatggttttaggcctgtttgtgcctcccgttttcgtggtttcctacgcaaaagaccttggggtaccggacactaaggcagcgtttcttctcaccattctgggcttcatcgacatattcgcgagacctgccgcgggatttgtggcaggcttgggcaaggtgcggccatattcagtttacctgttcagcttctccatgttcttcaacggcctggccgacctggctggcagcacagccggcgattatggcggcctcgtggtcttctgtatcttcttcggcatttcgtacgggatggtaggcgcgctccagtttgaagttctgatggcaattgttggaacccacaagttttcatccgcgatcggattagtgctcctcatggaggccgtagccgtgctcgtgggccccccttctggaggtaagctcctcgatgccacacatgtttacatgtatgtcttcatcctagcgggagccgaggtgttaaccagctctctcattctgctgttgggaaacttcttctgcattaggaaaaagccaaaagagcctcagccagaagtcgctgccgctgaggaggagaaacttcacaaaccacctgctgatagcggggttgacctcagagaggtggaacattttctgaaggccgaaccagaaaagaacggcgaagtggtgcatactccagagacctcggtg

SEQ ID NO: 316570 - DNA, 1395 bp, Artificial Sequence
  derived and/or modified sequence
atggggggcgccgttgtggatgaaggccctacaggggtgaaggcacccgatggcggctgggggtgggccgtgctctttggatgtttcgttattacaggatttagctatgccttcccaaaagccgtgtcagtgtttttcaaggagctaatacaagagttcgggatcggctactccgatactgcatggatctcttcaatcctactggccatgctttatggaaccggccctctgtgcagtgtttgcgtcaatcgctttggctgcaggcccgtcatgcttgtaggcgggctgttcgcgtccttgggcatggttgcagcttccttttgccgctctatcatccaggtctacctcacaacaggcgtgattaccggcctgggcctggcactgaacttccaacctagcttgatcatgctgaatagatatttctcaaaacggcgtcccatggcaaacggtttagcagcagccgggagtccagtgtttctgtgcgctttgtctcccctgggccaactgctccaggaccggtacgggtggcgggggggttttctaattctcgggggtctcctcctgaactgctgcgtgtgtgcggcccttatgagacctttggtcgtgacagcccagcctggcagcggtccaccccgaccttcacgtaggctcctggacctgtccgttttcagagatcgagggtttgtgttatacgctgtggccgcttcagtcatggtgctgggcctctttgtgccgcccgttttcgtggtgagctacgccaaagatctcggagtaccagacactaaggcagcgtttttgctgaccattctgggatttatcgacatttttgcacgacctgcagccggtttcgtggcaggactaggcaaagtgagaccatacagtgtgtacctcttttccttcagtatgttcttcaatggacttgccgacctggccggatccaccgccggtgactatgggggcttagtggttttctgcatattttttggaatttcatatggcatggtaggggccctgcagttcgaagtactcatggccatcgtcggcacgcacaagttctcatccgcaataggcttggtgctgctgatggaggccgtcgctgtgctggtagggccgccctctggcggcaagctgctcgatgcgacacatgtgtacatgtatgtgtttatcctcgctggtgccgaggtgttgacctcttctctgatcctcctgcttggcaatttcttttgcatccgaaaaaagcccaaggagccgcagccggaagtcgccgccgcagaggaggaaaaactgcacaaacctccagcagactccggtgtagacctcagggaggttgaacatttccttaaggctgagcccgagaaaaatggagaggtcgttcatacacccgagacaagcgtc

SEQ ID NO: 316571 - DNA, 1395 bp, Artificial Sequence
  derived and/or modified sequence
atggggggtgctgtggtagatgaaggccctacgggggtgaaagcgcctgatggcggatggggctgggccgtccttttcggttgcttcgtcataactgggttttcctatgcattcccgaaagctgtgtccgtcttcttcaaagaactcatccaagagttcggtatcggctatagcgatactgcctggattagctccatactgctagcaatgctctacggaaccggcccactgtgttcagtgtgtgttaaccgcttcggctgccgcccagtcatgctggtcggcggccttttcgcctctctgggcatggtggccgcctccttttgcagatcaattatacaggtgtatttgaccaccggagttattaccggtctcggactagcactgaacttccagccaagcctgataatgctgaacagatacttttccaagcgtcgtccaatggctaacggcctcgctgcagccggatccccggtgtttctctgcgccctgtcccctttaggccagctactacaggaccggtatggctggcgagggggcttcctgatcctgggaggcttgctgttaaattgttgcgtgtgtgccgcccttatgcgacccctggtggtgaccgcccagcccggatccggccctccccgcccgtcaaggaggcttctggacctgagtgtgttccgtgaccggggttttgtgctctacgctgttgctgcgagtgttatggtcctaggactcttcgtaccgcccgtgttcgtggtctcctacgccaaggatctcggcgtgccagacaccaaagccgcctttctgctcactattttaggatttattgatatttttgccaggccggcagcaggatttgtagcagggctggggaaggtgcgtccgtacagcgtttatctatttagcttctccatgtttttcaacggactggcagatctggcaggctccacggcaggcgactatggcgggttagtggtgttctgcatcttcttcggcattagctatggcatggtgggtgctctccagttcgaggtgcttatggccatcgtgggaacccataaattctcctccgctatcggtctggtcctcctcatggaagccgtcgctgtcttggtggggccaccgagtgggggtaagctgttggacgctacgcatgtgtatatgtacgtgtttatcctggccggtgccgaagtgctgaccagttcccttatcctcctgctcgggaatttcttttgcattaggaagaagcccaaggagccacagcctgaggttgccgctgccgaggaggagaagctccacaagcctccagccgattccggcgtcgatttgcgggaagtggagcacttcctgaaagccgagccagaaaagaatggcgaggtcgtgcatacccctgaaacctctgtc

SEQ ID NO: 316572 - DNA, 1395 bp, Artificial Sequence
  derived and/or modified sequence
atggggggagcagtcgtggatgagggcccaactggagtgaaagcacctgacggaggctggggatgggctgtcctctttggttgcttcgttatcacgggtttttcttatgcattccctaaggccgtgtccgtgttctttaaagaattgattcaagagttcggcattggttactcggataccgcctggatttcctcaattttgcttgcgatgctttatggcactgggccgctatgctccgtctgtgttaatcgctttgggtgtcggccggttatgcttgtaggggggctcttcgcttctctgggcatggtggctgcatcattttgtcgctcaataatccaggtataccttacaacgggcgtgattaccggccttggtttggccttaaatttccaaccttcgcttatcatgcttaatcgatacttctcgaaacggcgccctatggcaaatggtctggcagcagccggctctcctgtcttcttgtgtgcgttgtcgccgctgggacaactcctacaagaccggtatggttggcgcgggggatttttaattttgggtggtctgctgctgaattgttgtgtttgtgcggcgctcatgcggccgctagtggttactgcccaacccggatcaggacccccccgcccatctagacgccttttggacctgagtgtcttccgagatcgggggttcgttctttatgctgtggcagctagcgtgatggtgctgggattgttcgtgcctcctgtttttgtggtttcctatgctaaggatttgggggtccccgacacgaaggcagctttccttctaaccattctcggattcatcgacatcttcgcccggccagctgctggctttgtggctggccttggaaaggtccgaccttacagcgtttacctcttctcgttctcgatgttcttcaacggcttagccgatctggcaggatcaactgcaggagattatgggggtctcgttgtattctgtatcttcttcgggatatcgtacgggatggtaggcgcacttcagttcgaagtgctgatggctatcgtagggactcacaaattctcaagtgctattggcctcgttcttcttatggaggcagttgcagtacttgtgggccctccttccggaggtaaactgctagacgctacacatgtctatatgtatgtctttattttagctggagctgaggttctgacaagttccctcatcttgttgttaggaaacttcttttgcattcggaaaaagcctaaggagcctcaaccggaagtcgcagcagctgaagaggagaaacttcataaaccaccagcggatagcggagtagacctgcgtgaagtagagcacttcttgaaggctgaaccagaaaagaacggagaagttgttcatacgcctgagacctccgtg

SEQ ID NO: 316573 - DNA, 1395 bp, Artificial Sequence
  derived and/or modified sequence
atgggcggagcggtcgtcgacgaaggcccgacaggcgttaaagcgccggacggcggctggggttgggctgtactcttcggttgcttcgttattacaggtttctcttatgcatttccaaaagcagtctccgtattttttaaggaactgatccaagaattcgggatcggttactctgacacggcttggatttcgagcatactccttgccatgctgtatggaacgggtcctctgtgctcagtctgtgttaatcgctttgggtgccgcccggttatgcttgtaggtggattgtttgcatcattagggatggtcgccgcgagcttctgccgatcaattattcaggtttacctgacaacaggggtgatcacaggtttaggcttggccttaaatttccaaccgtctttgattatgcttaatcgatattttagcaaacgtcgtccgatggctaatggactggcagcggcgggatcgcctgtctttctgtgtgcgttgagcccgctgggacaacttttgcaagatcggtatgggtggcgcgggggctttttaattctgggtggattgttgcttaattgctgtgtctgcgctgcccttatgcggcctttggttgtaacggcgcagcccggttccgggccgccaagaccaagcaggcgtttacttgatctgtctgtatttagagacagaggattcgttctgtacgcggtcgctgccagcgttatggtcctgggactcttcgtgcctcctgtttttgttgtttcttacgcaaaggacttgggcgtgccggatacaaaagcagctttcctgcttacaatcttagggtttatagatatttttgcacgtcctgctgcagggtttgttgcaggtctgggaaaagtcagaccgtattcagtgtatttattcagcttttcaatgttctttaatggccttgcggatctagctggttccacagcgggcgactatggaggactcgttgtcttttgcattttttttggtatctcatatggcatggtgggcgcccttcaatttgaggtgttgatggcaattgtcggaacgcataaattctcatctgccattggcctggtgctgcttatggaagcggtcgcggtcttggttggaccgccatcaggtggaaaattattagacgcaacccatgtgtatatgtacgtgtttattttagcgggcgcagaagttcttacatcaagccttattttgctcctgggcaatttcttctgcattcgcaagaaaccgaaggaaccccaaccggaggtggcagcggctgaggaagagaaactccataaaccaccggcggattcaggagtggatttgagggaagttgaacacttccttaaggctgaaccagaaaagaacggggaggtcgtgcacacgccagagacgtcagtt

SEQ ID NO: 316574 - DNA, 1395 bp, Artificial Sequence
  derived and/or modified sequence
atgggcggggcagtcgttgatgaaggtcctacgggggtgaaggcaccagatggaggatggggatgggcagtgctttttggttgtttcgtgatcactggcttttcctacgcattccctaaggccgtttccgtgtttttcaaggaacttattcaagaatttgggattggctactcggacactgcttggatcagctcgatacttcttgccatgctgtacggaactggcccactctgttctgtgtgtgtcaatcgctttgggtgcaggccggtgatgctcgtgggcggactctttgcgagccttggcatggtggcagcatcgttctgccggtcgattattcaggtctatctgacgactggggtgattaccggactcggattggccctgaacttccagccatcacttatcatgctgaatcggtacttttccaaaagacgaccgatggctaacgggcttgccgcagcaggcagcccagtctttctctgcgcactgtcacccctcggtcagctcctccaagatcgctacggttggcggggtggctttcttatccttggtggccttcttctcaattgctgtgtgtgtgcggcgctgatgcggccccttgtggttaccgcacaacccggatcgggacctcccagacctagcaggagactgttggacctttcggtgtttcgcgaccggggtttcgtcctgtacgcagtggccgcctcggtcatggtcttgggactctttgtgccacctgtgtttgtggtgagctatgcaaaagaccttggtgtccctgatactaaggcggcatttctgcttactattctgggctttatcgacatcttcgccagacctgccgcagggtttgtggcagggctcggtaaggtccgaccttactcggtgtaccttttctcattctcgatgttctttaacggacttgcagacttggcaggcagcaccgcgggagattacgggggactcgtggtgttctgtatcttttttggaatttcatacggtatggtgggggcacttcaattcgaggtgcttatggccatcgtgggaacccacaagttttcatctgcgattggtttggttcttctgatggaagccgtcgcagtccttgtgggcccaccgtcgggaggtaaacttctcgacgcaactcatgtgtacatgtacgtctttatcctcgctggtgcagaggtgctgacctcctcgctcattctccttctgggtaactttttctgtatacggaagaagccaaaggagcctcaacccgaggttgccgcggcagaggaagagaagctgcataaaccgcctgctgattccggtgtcgatctgcgagaggtggaacacttccttaaggcagaacccgaaaagaatggggaggtggtgcatactccagaaacttcggtg

SEQ ID NO: 316575 - DNA, 1395 bp, Artificial Sequence
  derived and/or modified sequence
atgggaggcgccgtggttgacgaaggccctaccggggtcaaggccccggatggcggatggggatgggcagtgctgtttggttgtttcgtcatcactggtttctcatacgcattccccaaggccgtctcggtctttttcaaagaactgatccaggagtttggcatcggatactccgacaccgcctggatctcctcgatactgctggcaatgctctacggtaccggccctctctgttcggtgtgcgttaatcgctttggatgcagaccagtgatgcttgtcggaggcctgttcgcctccctgggcatggtggccgcctcattctgcagatctataatccaggtctacctgactaccggggtgatcactggattgggtctggccttgaacttccagccgtcgctcatcatgctgaaccggtacttctctaagagaaggccaatggcaaacggcctggcagccgcgggcagcccagtgtttctctgcgccctgtccccactggggcaactcctgcaagatagatacggatggcgcggcggattcctgatcctcggaggcctgctgctgaattgctgtgtgtgcgccgcgctgatgcgcccgctggtggtcactgcccaaccggggtcggggccgccgaggccgtcccggaggctgcttgacctcagcgtgttccgcgaccgcggtttcgttctctatgctgtcgcggcctccgtcatggtgctgggactcttcgtgccaccggtattcgtggtcagctacgcaaaggacttgggcgtcccggatactaaggcagcattcctgctgaccatcctgggattcattgacatcttcgcccggcccgcggccggcttcgtggcgggacttgggaaggtaagaccatactcggtgtacctgttcagcttctcaatgttctttaacggactggctgacctcgcggggagcaccgccggagactacggaggtctggtcgtgttctgtatctttttcggaatttcctacggtatggtgggtgccctgcaatttgaagttctgatggccatcgtggggactcacaaattctcctcggcgatcggactggtcctgcttatggaagcagtggctgttctcgtgggccctccgtcgggaggtaagttgctcgatgccacccacgtctacatgtacgtctttatcctggccggagccgaggtcctgacttcgtcattgattctgctccttggaaatttcttctgcatcaggaagaaaccgaaggaaccgcagccggaagtggccgcggcagaagaggagaaactgcacaagcccccggccgactccggcgtggacctgcgcgaggtcgagcatttccttaaggctgagccggaaaagaatggagaagtggtgcacaccccggaaacttcagtc

SEQ ID NO: 316576 - DNA, 1395 bp, Artificial Sequence
  derived and/or modified sequence
atggggggcgcagtggtggacgaaggacctactggagtgaaggcaccagatggcgggtggggttgggccgtcctgtttgggtgttttgtcataaccggcttctcatacgcgtttccaaaggcggtcagcgtattctttaaggaacttattcaagagtttggtattgggtattcggacaccgcttggatttcctcgatccttctcgctatgctgtacgggaccggacccctgtgttcggtgtgtgtgaatagatttggatgtcggccggtgatgctggtcggggggttgtttgcgtccctgggaatggtggcagcatcattttgtcgttcgattattcaggtctacctgactacgggagtcatcactgggctgggtctggcactgaactttcaaccatccctcattatgttgaatagatactttagcaaacggcgacctatggctaacggtctggccgcagccggatcgcctgtgttcctgtgcgccctctcacctctggggcagctgttgcaagatcgctacgggtggcgcggggggtttcttatactcggaggtttgctgctgaattgctgtgtgtgtgccgcgcttatgcgcccccttgtggtcaccgcacaaccaggatccggaccaccccggccttcgagacgcctgctggatctttcagtatttagggatagaggttttgtgctctacgcagttgcagcaagcgtcatggtgctgggtctgttcgttcctcctgtgtttgtggtgagctacgcaaaagatttgggtgtccctgatacgaaagcagcattcctgctgaccatcctcggatttatcgacatcttcgcgcgtccagcagcgggatttgtggcaggtctgggtaaagtaagaccctactcggtgtacctctttagtttctcgatgttcttcaacggacttgcggatcttgcaggatccaccgcaggtgattacggcggtcttgtggtcttttgcatattcttcggtatcagctacggcatggtgggagcattgcagtttgaagtgctcatggcaatcgtgggaacccacaagttcagttcagccataggattggtacttctgatggaggcagtggccgtccttgtgggacctccttccggtgggaagctccttgacgccactcatgtgtatatgtacgtgtttatactcgcgggagctgaagtccttactagctcacttatcctcttgctcggtaacttcttttgcattaggaagaaaccaaaggaaccgcagccagaggtggccgccgcagaagaagaaaagctgcataagccgccagcagattccggagtggaccttagagaagtcgaacactttctgaaggccgagcccgagaagaacggcgaggtggtgcatacccctgaaacttcggtc

SEQ ID NO: 316577 - DNA, 1395 bp, Artificial Sequence
  derived and/or modified sequence
atgggaggcgccgtggtggatgaaggtcccactggggtgaaggctccagacggcggctggggctgggccgtgctgtttgggtgctttgtgataaccgggttttcctacgccttccccaaggccgtgtccgtgtttttcaaggaacttatccaggagtttggaatcgggtatagcgacactgcgtggatctcttcaattctccttgccatgctgtatggcacaggtcccctctgctccgtttgtgttaatagatttggctgtaggcccgttatgttagtgggcgggcttttcgcttcgctgggcatggtcgctgcaagtttctgtaggtctatcattcaggtgtacctaactacaggggtgattactggcttaggactcgcgctcaatttccagccatccttgattatgctaaacaggtatttttctaagcgacgaccaatggccaacggactggcagccgctggctccccagtgttcctctgcgccttgtcaccattgggtcaactcctgcaggacagatatgggtggcggggcgggttcctgatcctgggtggactcctgctgaactgttgcgtatgcgctgctttaatgaggcctttggtcgtaacagctcagcctggttcggggcccccaagacctagccgccgcctcctggacctgtccgtctttcgtgatcgggggtttgtcctctatgccgttgcagccagcgtaatggtgctgggattatttgtgccacccgtgttcgtggtgagctatgccaaggacctaggcgtgccagatactaaagcggcttttctgctcactatactaggctttatcgacatttttgcaagacccgcggctggctttgtcgccggcctgggaaaggttcgcccatacagtgtgtatctgttttctttcagcatgttcttcaacggactcgctgaccttgccggttcaaccgccggcgattacgggggtctcgtggttttttgcatcttttttggcatctcgtacggtatggttggggccctgcagttcgaagtcctcatggccatcgtgggaacacataagttcagttccgccattggcctggtgctcctgatggaagctgtcgcagttcttgtggggccaccctcaggagggaaactactcgatgccacccacgtttacatgtatgtttttattctggccggggcagaggtgctgacgagctctcttatcctgctattgggaaacttcttctgcatcagaaagaagcccaaggaacctcagcccgaagtggctgcggcagaggaagagaagctgcataaaccaccagcagacagtggcgttgatctgagagaagtggagcactttctcaaggcagaacccgaaaagaacggtgaggtggtgcacacaccagagacatccgtc

SEQ ID NO: 316578 - DNA, 1395 bp, Artificial Sequence
  derived and/or modified sequence
atggggggggccgtggttgacgaaggccctacaggagtcaaggcccctgatggcggatggggctgggcggtcctgtttggatgttttgtgatcacaggattctcctacgcctttcccaaggccgtgagtgtcttctttaaagagctgattcaggagttcggaattggttacagtgacactgcatggatatcctccattttgctcgccatgctctacggaacagggccgttgtgctccgtctgcgtgaataggttcgggtgtaggcccgtgatgttggtgggaggacttttcgcttcactgggaatggtggccgcctccttctgcaggagcatcatccaggtctatctgacaacaggagtgattaccggactgggtctggccctgaacttccagccatctcttatcatgcttaaccgctattttagcaagaggaggcctatggccaatggactggctgcggctggctccccggtttttctgtgcgccctttcgccactgggccagcttcttcaggaccggtatgggtggcgcgggggatttctgatcctcgggggtctgctgctcaactgttgtgtttgtgccgcactaatgcgtcctttagtcgtaacggcccagcccggcagcggacctcctcgcccctctaggagacttctggatctatcagtcttcagggatagaggcttcgtgctgtatgctgttgccgcctctgtgatggtacttggtctattcgttccccctgttttcgtcgtgagctacgccaaagatttaggagttcctgacactaaagctgcttttctgctgactattctaggatttatcgatatcttcgcccgaccagccgctggcttcgtggccgggctgggcaaagtaaggccatattctgtctatctattttctttctctatgttctttaacggcttagccgatctggccgggtcaacagcaggagactacggcggactcgtggtgttctgtattttttttgggatctcctacggcatggtaggagcgctgcagtttgaggtgcttatggctattgtggggacccacaagttcagtagcgccattggcctcgtgcttctgatggaagctgtcgcggtactagtgggtcctcctagcggtggcaaactcttggacgccacacacgtttacatgtatgtgttcattcttgctggggccgaagtgttgacttctagtctgatcttactacttggaaattttttttgtataaggaaaaagcctaaagaaccccagcccgaggtagcagccgctgaggaggagaagcttcacaagcctcccgccgatagcggcgtagacctccgggaggtagaacattttcttaaggcagaaccagaaaagaacggcgaggtggttcataccccggagacctcagta

SEQ ID NO: 316579 - DNA, 1395 bp, Artificial Sequence
  derived and/or modified sequence
atgggaggagcagttgtagatgaaggaccaactggtgtaaaagcaccagacggaggatggggatgggcagttttatttggttgttttgtaattacgggattcagttatgcatttccaaaagctgtgagtgtttttttcaaagaacttattcaagaatttggaattggatattcagatactgcatggatttcaagtattttacttgctatgctttatggaactggtccattatgttcagtgtgtgttaatagattcggatgtagaccagtaatgcttgttggtggtctttttgcatcacttggtatggtagctgcttctttttgtagatctattattcaagtttatttaacaactggtgttattacgggtttaggtcttgctcttaattttcaaccaagtttaattatgttaaatagatactttagtaaaagacgtccaatggctaatggactcgcagcagctggatctcctgtattcctttgtgcactttctccattaggacaattacttcaagatagatatggatggcgtggtggatttttaattcttggtgggttattattaaactgttgtgtgtgtgcagctcttatgagaccattagtagttactgctcaacctgggtcaggaccaccaagaccatcacgtcgtcttctagatttaagtgtttttagagatagaggttttgttttatatgctgttgctgcttctgtaatggttctcggattatttgttccaccagtttttgttgtttcatatgcaaaagaccttggagtgccagatacaaaagctgcatttcttcttacaatacttggattcattgatatttttgcaagaccagcagcaggatttgttgcaggacttggtaaagttagaccatattctgtatatcttttttcattctcaatgttctttaacggtttagcagatttagcaggatctacagccggagattatggaggacttgttgttttttgtattttctttggaatttcatatggaatggtgggagcattgcaatttgaagttttaatggcaattgttggtacacataaattttcatcagcaattggacttgttttattaatggaagcagttgctgttcttgttggaccaccaagtggtggaaaattactagatgctacacatgtttatatgtatgtttttattcttgcaggagctgaagtattaacttcttctttaattttattattaggaaattttttctgtatcaggaagaaaccaaaagaacctcaaccagaagtagcagcagctgaagaagaaaagttgcataagccaccagctgatagtggagttgatttgagagaagtagaacattttctaaaggcagaacctgaaaaaaatggtgaagttgttcatacacctgaaacttctgtc

SEQ ID NO: 316580 - DNA, 1395 bp, Artificial Sequence
  derived and/or modified sequence
atgggtggagccgtggtcgacgagggacctacaggtgtgaaggcgcctgatggcggatggggctgggcggtcctctttggatgtttcgtcatcaccggcttttcttacgctttcccaaaagccgtatccgtgttttttaaggagcttatacaggagtttgggatcggatacagcgacaccgcttggatttcctcaatcctgctcgccatgctgtatgggaccggccccctgtgctcagtttgcgtgaacaggttcggctgtcggcctgtgatgcttgtaggcggcctgttcgcctcattggggatggtggccgctagcttttgtagatccattattcaagtctacctgaccacaggagtgatcacgggattaggtcttgccctgaatttccagcctagcctgattatgcttaataggtatttctcaaaacgccggccaatggctaacggtctcgctgccgcgggctcacccgtcttcctgtgtgctctaagcccccttggacagcttttgcaggaccgctacggctggagagggggatttctaatacttggcggtttgctgctcaattgctgtgtgtgcgctgcccttatgcggccattggtggttacagcccagcccgggagcgggccgcctcggccctcacggcgtttgttagatctctctgtgttcagagaccgtggcttcgtgttgtacgccgtggctgcaagtgtaatggtcttgggactgttcgtgccccccgttttcgtcgtatcttatgctaaagatctcggagttcccgacaccaaggcggctttcctcctcaccattcttgggttcatcgatatttttgcacgccctgctgctggcttcgtggctggtctcggtaaagttcgaccctacagtgtctatttattctccttttcaatgttttttaacggcttggcagatctggcaggtagtactgcgggtgactatggagggctggtggtgttttgcatctttttcggcataagctatgggatggtcggagcattgcagttcgaggtgctcatggctatagtggggacacacaagttttcatcagcaatcggcctcgtgttactgatggaggcagtcgctgtgctcgtggggccaccctccggaggcaaactactggacgccacccacgtctatatgtacgtttttatcctcgccggagcggaagttcttacatcctctctgatcctcctcctgggcaatttcttctgcatccggaaaaagcccaaggaacctcagccagaagtcgctgcagctgaagaggaaaaactgcacaagcctccagcagacagtggcgtggatttacgagaagtggagcacttcctgaaggcggagcccgaaaagaatggtgaggttgtgcacacccctgagactagtgta

SEQ ID NO: 316581 - DNA, 1395 bp, Artificial Sequence
  derived and/or modified sequence
atggggggtgcagtcgttgatgagggacctaccggggtaaaggctcccgacggcggatgggggtgggctgtgctttttgggtgttttgtgatcacgggtttttcctatgcgttcccgaaggccgtaagcgtctttttcaaggaactcatccaagaatttggaatcggatactccgacacggcctggatcagttccattctgcttgctatgctctatggcaccggccccctctgcagtgtgtgcgtaaacagattcgggtgtaggcccgtcatgctggtcgggggccttttcgccagcctggggatggtggcagcctctttttgtcgatcaattattcaggtctatctaacaacaggcgtcataactggtctggggctggcattaaattttcagcctagcctgattatgctgaatcggtatttttcaaaaagaagacccatggctaacggattggccgctgctggtagcccggtgttcttgtgcgcactcagccccctgggacagctcctgcaggatcgttacggttggcgcggcggctttctgattcttggaggcctccttttgaactgctgcgtgtgtgctgccttgatgagacccctagtggtgactgctcagccggggtccggtccccccaggccctccagacgtctgttggatttgtccgtctttcgcgatcgggggtttgtgctgtatgccgtggcggcttctgttatggtcctaggtttgttcgtgccccctgtgttcgtcgtcagttacgccaaggatctgggtgtccccgatacgaaggcagcgttcctactcaccatcctgggcttcatcgacatctttgccagacccgcagctggcttcgtcgccggcctgggcaaggtccggccctactcagtgtaccttttttcattttcaatgttcttcaacggcctcgctgatctcgccggcagcactgctggagattatggcggcctggtagtgttctgcatcttcttcggcatttcatacggcatggtgggggcactacagttcgaggtccttatggccattgtcgggactcacaagttctcttccgccatcggcctggtcctgctcatggaagcagttgctgtactggtgggcccgccctccggagggaagctgctcgacgcaacccacgtctacatgtacgtgttcatcctcgccggggctgaagtcctgacatcctccttgattctcctacttggcaactttttttgcatcaggaaaaagcccaaggagcctcagccagaggtcgccgccgccgaggaggaaaagctgcataaacctcctgctgactctggagtagatctgagagaggtggaacactttctgaaagctgagcccgaaaagaatggagaggtggttcacacccccgagacctccgtg

SEQ ID NO: 316582 - DNA, 1395 bp, Artificial Sequence
  derived and/or modified sequence
atgggtggcgctgtggtggacgaaggcccaaccggggtgaaggcacctgatggagggtggggctgggcagtgttgttcggatgcttcgtgatcacgggtttcagttacgctttcccaaaggctgtgagcgtgttcttcaaggagcttatccaagagtttggaatcggatattccgataccgcgtggatctcttcaattttgctggctatgttatatggtaccggtccgctttgttccgtctgtgtgaatcggttcggctgtcgcccagtcatgctggttggcggcctcttcgccagtctcggaatggttgctgcctctttctgcagatcaattatccaggtgtatctgaccacaggggtgattactgggcttggcctggctctgaacttccaaccatctttaatcatgttgaacaggtacttctcgaagaggcgaccgatggccaatggccttgctgctgccggctctcctgtttttctttgcgctctttctcctctgggacagctcctgcaggacaggtatgggtggaggggagggtttctcatcctggggggcttactgcttaactgttgtgtgtgcgcagccctgatgaggccactagtggtgactgcacagcctggatccgggcctcccaggcccagcaggaggttgcttgacctgagcgtgtttagagaccgcggatttgtgctgtatgctgtcgcggcatcagtgatggtgttgggcctgtttgtccctccagtgttcgtcgtgtcctacgccaaagatctcggagtgcctgataccaaagcagcattcctgttaacaatccttgggttcatcgacatcttcgcccgcccggccgcaggcttcgttgcaggactggggaaggtgcgaccctatagcgtgtacctctttagcttttccatgttctttaacggactggcagacctcgctggttctactgcaggagattatggcggattggtcgtgttctgtatcttctttggaattagctacggaatggtgggagcgctgcaatttgaagtgctgatggcaatcgtgggtactcataaattctccagcgcaatcggcctggttttgctcatggaagcagtggccgtcctggtcggcccaccttccgggggaaagctcctcgatgctacacacgtatacatgtacgtcttcattttggccggcgctgaagtgctgacctctagtctaatcctgctcctgggcaacttcttttgcatccgcaaaaaacccaaagagccgcagcccgaggtggctgctgctgaggaagaaaaactgcacaaacctcctgcagattcaggtgtggatctgcgggaggttgagcatttcctgaaggccgagcccgagaaaaatggggaagttgtgcacacacctgagactagcgtc

SEQ ID NO: 316583 - DNA, 1395 bp, Artificial Sequence
  derived and/or modified sequence
atgggcggagccgttgtggacgaaggaccaacgggagtgaaggctccggacggaggatgggggtgggctgtgctcttcggatgctttgtaattaccggatttagctacgcgttcccgaaggctgtctctgtgtttttcaaggaactcatccaggagtttggtatcggatactccgacactgcctggatctccagcattctgcttgccatgctgtacgggacgggacccctgtgcagtgtatgtgttaatagattcgggtgtagaccggtgatgttggtagggggattgttcgcctccctcggaatggtggccgcttcattctgcagaagcataatccaggtttacctcaccaccggagtgattaccggactgggactggccctcaactttcagccctcgctcatcatgctgaaccggtacttctccaaacgacgcccgatggctaacggcctcgctgcagccggctcgcccgttttcctctgtgccctcagccctctgggacaactgctgcaggatcggtacggatggcggggcgggttcctgatcctgggaggactgttgctgaattgctgtgtgtgcgccgcactcatgcgccctctggtggtgactgctcaacccggatcaggcccgccacgcccgtcaagacggctcctcgatctgtcggtgtttcgggatcgtggtttcgtcctctacgctgtcgcggcatcggtgatggtcctcgggctgttcgtgccgccggtgtttgtcgtgtcctacgcaaaggacctcggggtcccagacactaaggccgcgttcctcttgaccattctggggtttatcgatatcttcgcacgcccagcggcgggttttgtggcaggactcggaaaggtgaggccctatagcgtgtatttgttctcattctccatgttcttcaatggcttggcggacctggctggatccactgcgggggattacggcgggctggtggtgttttgcatcttctttggaatctcctacggcatggtgggagcccttcagttcgaggtgcttatggctatcgtcgggacccacaaattctcctctgccatcggtttggtgctgctgatggaggcggtcgcagtcttggtcggcccgccatcgggaggtaaactgcttgacgcgactcacgtgtacatgtacgtgttcatcctcgccggagccgaagttctgacctcctcattgatcttgcttctgggaaacttcttctgcatccggaagaaacctaaagaaccccaaccggaggtcgcggcggctgaagaggagaaactccataagccgccggcggatagcggagtggacctgagagaggtcgagcacttcctgaaggccgaaccagaaaagaacggagaagtggtgcacactccagaaaccagcgtg

SEQ ID NO: 316584 - DNA, 1395 bp, Artificial Sequence
  derived and/or modified sequence
atgggcggagcggtggtggacgagggaccgacgggagttaaggcccctgacggcggatggggatgggccgtgcttttcggatgcttcgtgatcaccggcttttcgtacgcattccctaaggcagtgtccgtctttttcaaagagctgatccaggaatttggaatcggatactcagatactgcctggatttccagcatcctccttgcgatgctgtacggcaccgggccgctctgctccgtgtgtgtgaaccggtttggatgccgcccagtcatgcttgtaggaggactcttcgcatccctcggaatggtggccgcgtcattctgtcgctcaatcatccaggtgtacctgaccactggcgtcatcaccggactcggcctggccctcaattttcagccgagccttatcatgctcaaccggtatttctcgaagagacggcctatggcaaatggcttggctgccgccggttcgccggtgttcctgtgcgctcttagtccactgggacagctgctccaagaccgctacggctggcggggaggattcctgatcctgggaggacttctgctgaactgctgcgtgtgcgccgcgctcatgcgcccgctcgtggtgactgcgcaaccgggatcggggccacctcgaccgtcgagaaggctgctcgacctctcagttttccgtgatcgtgggttcgtgctgtacgctgtggccgcttccgtgatggtgcttggcctgttcgtgccgccggtgttcgtggtgagctacgccaaggatctgggtgtccccgacactaaggcggcgttcctgctgaccatactcggctttattgatatcttcgctaggcctgctgccggttttgtggctggcctcggaaaggtgcgcccgtacagcgtctacctgttctccttttcgatgtttttcaacgggctggccgacctggctggatcgaccgccggtgactacggcgggctcgtggtgttttgtatctttttcggaatctcatacgggatggtgggagcccttcaatttgaagtgcttatggcgatcgtgggaactcacaaattcagctccgccatcggactcgtgctgctgatggaggccgtggccgtgctggttggaccaccatcgggaggcaaactcctggacgcaactcacgtgtacatgtacgtgttcatcttggccggagccgaagtcctgacctcgtcactgattctcctcctgggaaatttcttctgtatccggaaaaaacctaaggagccccagcctgaagtggcggccgctgaagaagagaagctccataagccaccagcagactcaggagtagatctgcgggaagtggagcacttcctgaaggccgagccggagaaaaatggggaagtggtgcatacgcctgaaacctccgtt

SEQ ID NO: 316585 - DNA, 1395 bp, Artificial Sequence
  derived and/or modified sequence
atgggaggtgcagtggtcgatgagggaccaactggagtcaaagccccagacggcggctggggttgggcggtgttgtttggctgttttgtgatcaccggtttctcatacgcattcccgaaggcagtcagtgtgtttttcaaagagctcattcaggagttcgggatcggttacagcgatacggcgtggatctcctcgattctcctcgccatgttgtacggaacgggaccgctgtgttcggtctgtgtgaatcgctttggctgtaggccagtgatgctggtgggaggtctttttgcatcgcttggcatggtcgcagcatccttttgtagatcgattattcaagtgtacctcaccactggtgtgattactggtctgggtctggcgctgaattttcagccatccctcattatgcttaaccgctatttctccaagagacgtccaatggcaaacggactcgcagcagctggaagccccgtctttctttgtgcactctcacctttgggacagcttctccaggatcggtacggttggaggggcggtttcttgattctgggcggattgcttcttaattgctgtgtgtgcgccgccctcatgcggccccttgtcgtgactgcacagccaggttctggtcctccccgcccatcgcgcagactcttggatctttcggtgtttcgggacagaggcttcgtgctgtacgccgttgcagcatcggtgatggtgctgggactctttgtgccgcccgtgtttgtggtttcatacgctaaggatctcggagtcccggacaccaaagcggctttccttcttaccatccttggtttcattgacatattcgctagacctgcagctggctttgtcgccggactgggaaaagtcagaccttactcggtctacctgttctccttttccatgtttttcaacggcctggcagatctggctggctccactgccggagattacggaggccttgtggtgttctgcatcttttttgggatctcgtacggtatggtcggcgcactgcaattcgaggtgcttatggctattgtaggaactcataagttttcgagcgctattggacttgtactgttgatggaggcagtggcggtcctggtgggaccacctagcggtggaaagctgctcgacgccacccatgtctacatgtacgtgtttatcttggctggagccgaagtgctgacctcctcccttattctgctgctgggcaactttttctgcattcggaagaagcctaaggaaccacagccggaagtcgcagctgcagaagaagaaaagctccataagcctccagcagactcaggagtggatctcagagaagtggagcattttcttaaggcagaacctgaaaagaacggggaagtggtgcacactcctgagacttcggtg

SEQ ID NO: 316586 - DNA, 1395 bp, Artificial Sequence
  derived and/or modified sequence
atgggaggtgctgtggtcgatgaaggtcccaccggggtgaaggcccctgacgggggctgggggtgggctgtgctttttggttgttttgtgatcactggtttctcttacgccttccccaaagctgtgagcgtgtttttcaaggaattgatccaagaatttggcattggatatagcgacacagcctggatcagctccattctacttgcaatgctgtatggtacaggccccctgtgctccgtttgtgtgaaccgcttcggttgcaggcccgtcatgcttgtggggggactcttcgcctctctgggaatggtagctgcctcattttgcaggagtataatccaggtgtacctcactacaggcgtcattacagggctgggtctcgccctcaactttcagccaagcctgattatgctgaacaggtacttctccaagcgccgtccaatggctaacggcctggcagccgctgggtcaccggtttttctctgtgctctgagccccctcggccagctgctgcaggaccgttacggctggagaggaggctttcttatactgggcggtctgctcctcaattgttgtgtttgcgccgcactgatgaggcctctggtcgtgaccgcccagcccggctcaggcccgccgcggcctagtagaagattgctggatctgagtgtgttcagagaccggggattcgttctctacgctgttgcagcaagcgtcatggtgctgggattgtttgtaccacccgtgtttgttgtgtcatacgccaaagatctcggtgtgcccgataccaaagcagcttttctcctgactatcctgggatttatagacattttcgcccggccagctgccgggttcgtcgccggtctcggcaaagtcaggccctattctgtgtatttattctcattttcgatgttcttcaatggattagccgacctcgcagggtctactgctggagactacggggggctggtagtgttttgtattttctttggaatttcatatggcatggtcggggcactgcagttcgaggttcttatggccatagtcgggacgcataaatttagttcggctattggtctggtgcttttgatggaagcggtggccgttttggtgggaccaccgtctggaggcaagctgctagacgcaacccacgtgtatatgtatgtgttcatcctagctggtgcggaggtgctcacaagcagcctgatcctcctactcgggaacttcttctgtattcgcaaaaagcccaaggagccccagcccgaggtcgctgccgcagaggaggagaagttgcacaaacctccggctgattctggggtggacctgagggaggtagaacacttcctgaaggcggaacccgagaagaacggggaagtggtgcatacccctgagacgagcgtc

SEQ ID NO: 316587 - DNA, 1395 bp, Artificial Sequence
  derived and/or modified sequence
atgggaggcgccgtggtggacgaaggacccaccggagtcaaggcgccggacgggggttggggctgggccgttctgttcggatgtttcgtcatcaccggattctcatatgcgttccctaaagcggtatccgtgttcttcaaagagctcattcaagagttcggtatcggctactcagataccgcttggatctctagcatcctcctggccatgctgtatggaactggtccgctgtgtagtgtgtgcgtgaataggttcggttgccggcctgtgatgctggtggggggactgttcgcttcactgggtatggtggccgcgtccttttgccggtcgattattcaggtctacctgactacgggggtgatcacgggactgggcctcgcactgaacttccaaccctcgctcatcatgctcaacagatacttctccaagaggcgcccgatggcaaacggactggctgccgcgggttcaccggtgtttctgtgtgccctgagcccgctcggacagctccttcaggaccggtacggttggcgcggcgggttcctgatcttgggagggctgctgcttaattgctgcgtttgcgcagccctgatgcgtcctctcgtcgtgaccgctcagcctggatcggggccgccaaggccgtcccggcgcctcctggacctgtcagtgttccgggacagaggattcgtcctgtacgccgtggctgcttctgtcatggtgctcggattgtttgtcccacccgtgtttgtcgtgagttacgcaaaggacctcggcgtcccagacacgaaagccgcatttttgcttaccatcttgggattcatcgatatctttgctcgcccagctgcgggatttgttgccggactggggaaagtgcgcccctactcggtctacctcttctccttcagcatgttctttaatgggctcgccgacctggcaggatcgaccgcgggagattacggaggtttggtggtgttttgcatcttcttcggaatttcgtacggaatggtgggcgccctgcagttcgaagtgctcatggcgattgtgggaactcacaagttcagttcagctatcggcttggtgcttctgatggaggctgtggcggtgctcgtcggtccaccttccgggggaaagctcctggatgcgacccacgtctacatgtacgtgttcatcctggccggcgccgaagtgctgacttcgtcccttatcttgctcctgggcaacttcttttgcattcggaagaagccaaaggaaccgcaaccggaggtggccgctgcggaagaggaaaagctccataaaccaccggccgattcgggagtggaccttcgggaagtggagcatttcctcaaagcggaaccggagaagaacggagaggtcgtacacaccccggaaacttcggtg

SEQ ID NO: 316588 - DNA, 1395 bp, Artificial Sequence
  derived and/or modified sequence
atgggaggcgcagtcgtggatgaaggaccgactggggtcaaggccccagacggcggatggggttgggcagtcctgtttggatgttttgtgattactggtttttcctatgcattcccaaaagcagtgtcggtgttctttaaggaactcattcaagagtttggaatcggttactcggatactgcgtggatttcctcgatccttctggcgatgttgtacggtacgggccctctctgctctgtgtgtgtgaaccgatttggttgtaggcctgtcatgctggtgggaggtcttttcgcctctcttggtatggtggccgcctccttttgcagatccataattcaggtgtatctcactacgggggttattaccggattgggcctggcactgaacttccaaccatcgctcattatgctcaataggtacttctcgaagagacgaccaatggctaacgggcttgccgcggcagggtcacccgtgttcctgtgtgccctctcgccactgggacaactgctgcaggatagatacggttggcgaggcggatttctgattctggggggacttctgctgaactgttgtgtctgcgcggcactgatgcggccactggtggtcactgcacagcccggcagcggacctcccaggccttcccggagacttcttgacctcagcgtgttcagggataggggcttcgtgctttatgcagtcgccgcgtcggtcatggtgcttggcctgtttgtgccccctgtgttcgtggtgagctacgcaaaggatcttggcgtcccagataccaaggccgcatttctgttgaccattctggggtttatcgacatttttgcacgtccagcagcaggatttgtcgctggccttggaaaggttcggccctactccgtgtatctgttttcgttttcaatgttcttcaacgggttggcagatcttgccggatccaccgcaggtgattacggtggacttgtggttttctgtatcttttttggcatctcgtacggaatggtgggtgctttgcagtttgaggtactgatggctattgtgggaactcacaagttctcctccgcaatcggccttgtgcttctcatggaggcagtggcagtgcttgtgggaccgccatcgggaggaaaacttcttgacgcaacccatgtgtacatgtacgtgtttatactggcaggcgccgaggtgcttacgtcctcgctgatcctgcttctggggaatttcttctgtatcagaaagaagccaaaggaaccacaacctgaggtggcagctgctgaagaagaaaaactgcataagccgcctgcggattccggggtggacctgagagaagtggaacatttccttaaggcagaaccagagaagaatggtgaagtggtacatactcctgaaacgagcgtc

SEQ ID NO: 316589 - DNA, 1395 bp, Artificial Sequence
  derived and/or modified sequence
atgggcggtgccgtggtcgatgaagggccgaccggggttaaggcccctgatgggggatggggttgggctgtgctgttcggctgcttcgtgatcactgggttcagctacgcgttcccgaaggctgtctccgttttcttcaaagagttgattcaggagtttgggattggttactcggacaccgcctggatctcgtccattctcttggcaatgctgtacggaacgggcccgctctgctccgtgtgcgtcaatcggtttggatgtcgaccggtgatgctggtcggaggcctcttcgcgtcactcggtatggtggcagcctccttctgccgctcaatcatccaggtgtacctcactactggagttattactggactcgggttggccctgaactttcaaccgagcctcatcatgctgaacagatacttttcaaagaggcgcccgatggccaacggactggcagccgcaggatcgccggtgttcctgtgcgcactgtccccgttgggtcaactcctccaggacagatacggatggagagggggattccttatcctgggaggccttctgctcaactgctgcgtgtgcgctgccctcatgcgcccacttgtagtgactgcacagcctggatcaggacctccacggccttcgcgcagactgctcgacctgtccgtctttagggatagaggatttgtgctgtacgcagtcgcggcttccgtgatggttcttgggctgttcgtgccacctgtgttcgtggtatcgtacgccaaggacctgggagtgccggacaccaaggcggccttcctgttgacgatcctgggctttatcgacatcttcgcgcgcccagcggccggcttcgtcgcaggcctgggtaaggtgcggccgtactcggtgtaccttttcagcttctcaatgtttttcaatggactggcggatctcgcgggcagcactgcaggggattacggagggctggtcgtgttctgcatcttttttggcatctcgtacggcatggtgggcgccctgcagttcgaggtgctgatggctatcgtgggaactcataagttctcctcggcaatcggcctggtgctgcttatggaggctgtggctgtgctggtcggacctccgtccggaggaaaactgctcgatgcaactcacgtctacatgtacgtgttcatcctggctggtgcggaagtgctgacctcgtccctgattctgctcctgggcaacttcttctgcatccgcaaaaagccgaaggagccccagccagaagtggccgctgccgaagaagaaaagctccataaaccaccggccgattcaggcgtcgacctgcgggaggtcgaacattttctgaaagcagaaccagaaaagaatggcgaagttgtgcacaccccggaaacgtccgtc

SEQ ID NO: 316590 - DNA, 1395 bp, Artificial Sequence
  derived and/or modified sequence
atggggggagccgtcgtggacgaagggcccacgggcgtaaaagcacccgatgggggttgggggtgggccgttttgttcggctgtttcgtaattacgggctttagctatgcttttcccaaggcggtcagtgtgttcttcaaggagctgatccaggagtttgggatcggttactccgacacggcatggatttcgagcatcctcctggccatgctgtatggaacaggacctctttgctcagtctgtgtgaatcggttcggatgtcggcccgtgatgctcgtgggggggctctttgcttcactcggaatggtggctgcctccttttgccggtccatcatccaggtgtacctgactacaggcgtcattacaggattgggacttgcactcaactttcaaccatctctcatcatgttgaaccgatacttctctaaacggagaccgatggccaatgggctagcagccgcagggtcccctgtattcctctgcgccttgagccctttggggcagctactacaggatcgatacggctggcgaggggggttcctgatacttggcggactgctgcttaactgctgtgtctgtgctgctctgatgcggccactggtggtaactgcccaacctggctcaggaccaccccgtcctagccggcgccttcttgacctcagtgttttccgcgacaggggctttgttctctatgcggtcgcagcctccgttatggtcctggggctttttgtcccacctgtgttcgtagtcagctacgccaaggacctcggtgttccagacaccaaagctgcttttttgctaacgatcctcggtttcattgatatatttgctcgcccagccgccggtttcgtcgcggggttgggaaaggtgcgcccttactctgtgtatctgttttccttttcaatgttcttcaatggactggctgacctggccgggagcacagccggcgattatggtggacttgtagtgttctgcatcttttttgggattagctatggaatggtgggcgctttgcaattcgaggttctgatggcaattgttggaactcataaattttcctccgccatcggactcgtcttgctgatggaggctgtggcggtcctcgtgggccccccctccggcggcaagctgctcgatgccacccatgtgtatatgtacgtgtttattctcgccggagcggaagtcctcacatcttccctgatactgctcctcgggaacttcttttgtatcagaaagaagcctaaggaaccacagcctgaagttgccgctgcggaagaggagaaacttcacaagccaccagccgactccggagtggacttgagagaggttgaacatttccttaaagctgagccagagaagaatggagaggtggtgcatacaccagagaccagtgtc

SEQ ID NO: 316591 - DNA, 1395 bp, Artificial Sequence
  derived and/or modified sequence
atgggcggggccgtggtcgatgagggaccaaccggagtcaaggcgcctgatggcggctggggctgggccgtgctgttcggatgtttcgtcatcactgggttcagctacgcatttccgaaggctgtgagcgtgttctttaaggagctcatccaggagttcggaattggttactcagacactgcttggatttcctcaatcctgctcgcaatgctttacggcactggaccactgtgctccgtctgtgtgaaccggtttggatgccggcctgttatgctggttggtggcctcttcgctagcttgggaatggtcgcggcttccttttgtcggtccatcatccaagtgtacctcactaccggcgtgataaccggcctgggcctggccctgaacttccagccgagcctgatcatgctcaatcggtacttttcgaagcggcggccgatggccaacggtctggcggcggctggctctccagtgttcctctgcgccctgagcccgttgggtcagctcctccaggacaggtacggttggagaggtggtttccttatcctgggaggcctgttgctgaactgctgtgtgtgcgccgcgctcatgaggcctctcgtcgttacggcacagccaggtagcggacctccacgcccgtccaggaggctgctggacctctcagtctttcgggaccggggctttgtgctgtacgccgtggcggcctcggtgatggtgcttggtctgttcgtgccgcccgtgtttgtggtatcgtacgctaaggatctgggagtgcctgacactaaggcggcgttcctgctgaccatccttggctttatcgacatctttgcccgcccggctgccgggtttgtggcaggattgggaaaggtgcggccctactccgtgtacctgttcagcttctcgatgttctttaatggtctggcggacctcgccgggtccaccgccggggattacggaggacttgtcgtgttttgcatcttctttgggatctcgtacggaatggtgggggcattgcaattcgaggtgctcatggcgattgtcggtactcataagttctccagcgcgatcggtctggtgctgctgatggaggcggtggctgtgttggtgggaccgccatcgggaggcaagctcctcgacgcgacccacgtgtacatgtacgtgttcatcctcgcgggagcagaggtgttgaccagctcgctgatccttctgctgggcaacttcttctgcatccgcaaaaaaccgaaagagcctcagcctgaggtggctgcagccgaagaagaaaagctgcacaagccaccagcagattccggcgtcgacctgcgtgaagtcgaacatttcctgaaagccgagccggagaagaacggggaagtggtgcacactccggaaacctccgtc

SEQ ID NO: 316592 - DNA, 1395 bp, Artificial Sequence
  derived and/or modified sequence
atgggaggagctgtggtggacgaggggccgacgggcgtgaaagccccggatggtggatgggggtgggctgtcctgttcggttgcttcgttatcaccggctttagctacgcttttccgaaggcggtgtctgtgttctttaaggaactcatccaagaattcggaatcggctactcggatactgcctggatctcgagcatcttgctggctatgctctacggaactgggccgttgtgttcggtgtgtgtgaaccggttcggatgccggcctgtgatgctggtcgggggcctgtttgcgtccctcggaatggtggcagcgagcttctgtcggtccatcatccaggtgtacctcactaccggagttatcaccggacttgggctggccttgaatttccagccatccctgatcatgttgaatcgctactttagcaagcgccgcccgatggccaacgggctcgcagcagccggctcgcccgtgttcttgtgcgccctgtccccactgggacagctgttgcaggatagatacggctggcgcggaggatttctgatcttgggtggactgcttctgaactgttgcgtgtgcgcagccctgatgcgccccctggtggtgacggcccagccgggatccggtccgccaaggccgtccaggcgcctgcttgacctctccgtgttcagagatcggggattcgtgctctacgcggtggcagcctcggtcatggtgctgggactgttcgtcccgcccgtgttcgtggtgtcgtacgcgaaagacctcggtgtgccggataccaaggccgctttcctgctgactatcctggggtttatcgacatttttgctagacctgcggcgggtttcgtggctggactcggaaaagtcagaccgtactcagtgtatctctttagctttagcatgttcttcaacggtctggccgatttggctggctcaactgcgggagactacgggggactggtcgtgttctgcatcttcttcggtatttcgtacggtatggttggagccctgcaattcgaagtgctgatggccatcgtgggcacgcacaaattctcctctgcgatcgggttggtgctccttatggaggccgtcgctgtcctggttggcccaccgtcaggtggtaagctgcttgacgcgactcatgtctacatgtatgtgttcatcttggctggcgctgaggtcctcactagcagcctgattctgctgttgggaaatttcttttgtatccggaagaagccgaaggagccacaacctgaagtggccgcggccgaggaagaaaagctccacaaaccaccggcagactccggtgtcgacctccgagaggtcgagcatttccttaaggcggaaccagaaaagaacggagaggttgtgcacactcctgagactagcgtg

SEQ ID NO: 316593 - DNA, 1395 bp, Artificial Sequence
  derived and/or modified sequence
atgggcggcgccgtcgtggatgaagggccgactggggtgaaagcgcccgacggtggctggggctgggcagtgcttttcgggtgctttgtgatcaccggattctcctatgcattccctaaggccgtgtccgtgtttttcaaggagcttatccaagaatttgggatcggctactcggataccgcctggatttcctcgatcctgctggccatgctgtacggtaccggaccgctgtgttcggtgtgtgtgaaccggttcggatgccgtccggtgatgttggtgggaggactgttcgcctcgctcgggatggtggccgcatcgttctgcaggtcaatcatccaggtctacctcactaccggcgtgattactggtttgggtcttgcactgaatttccagccttcactgatcatgctcaacagatacttcagtaagaggcgccctatggcgaatggcctcgcggccgcgggatcaccggtgtttctctgcgcgcttagccccctgggacagctcttgcaggataggtacgggtggagaggtggattcctcattctgggcggccttctgctgaactgctgcgtgtgcgcggccctgatgcgccccctcgtggtcaccgctcaaccaggatcgggccccccacgcccttcgcgccgactgctggatctttccgtgttccgcgacaggggattcgtgctgtacgccgtcgcggcgagcgtcatggtgctgggactttttgtgccgccggtgtttgtggtgtcgtacgctaaggacctgggcgtgccggacactaaggcggcctttctgctgaccattctcggtttcatcgatatcttcgcacgacctgccgcgggattcgtcgcaggattggggaaagtcagaccatactccgtgtacttgttctcattttccatgttcttcaacggcctcgctgacttggcggggtcgacggctggggactacggtggcctcgtcgtgttctgcatcttctttggaatttcgtacggtatggtcggcgctcttcagttcgaagttctcatggcaatcgtcggtacccacaaattctcgtccgcgatcggactggtcctgttgatggaagcggtcgctgtgctggtggggcctccatccggaggtaaactcctggacgctactcacgtttacatgtacgtgttcatcctggcgggagcggaagtgttgacgtcatcgctgatcctgctgctcggtaacttcttctgcattagaaaaaagccgaaagaaccgcaaccggaagtcgcagcggcggaggaagagaagttgcataagccaccggccgattccggcgtggatcttcgggaggtcgagcacttcctgaaagccgagccggagaagaacggagaagtcgttcatacccccgaaacctccgtg

SEQ ID NO: 316594 - DNA, 1395 bp, Artificial Sequence
  derived and/or modified sequence
atgggaggagccgtcgtggacgagggtccgacgggcgtgaaagctccggatggcggttggggttgggccgtgctcttcggctgttttgtgattaccgggttctcgtacgcgttccccaaagcagtgtccgttttcttcaaggaactcatccaggaatttgggatcggctactcggacactgcgtggatctcgtcgattctgctggccatgctgtacggaactggccctctgtgttccgtttgcgtgaacaggttcggatgccggccagtgatgctcgtcggaggcctgttcgcctcgcttggaatggtcgcagcctcgttttgcagaagcatcatccaggtgtatcttaccaccggagttatcactggtctgggcctggccctcaacttccaaccgtcactgatcatgttgaatcgctacttcagcaaacggcggccgatggcaaatggactggccgccgccggaagccccgtctttctttgcgccctgagtccgttgggacagctgctgcaggacagatacggctggaggggaggctttttgatcctcggaggattgctgctgaattgctgcgtgtgtgctgcactgatgcggccgctggtcgtgactgcgcaaccgggatcgggtccgccgaggccatcgagacggctgctggatctcagcgtctttcgggacaggggattcgtcctctacgccgtggcagcatccgtcatggtgctgggcctttttgtccctccggtgttcgtggtgtcatatgccaaggatcttggagttcctgacactaaagccgccttcctgttgaccatcctgggcttcatcgatatcttcgccaggcctgctgcaggttttgtggccggactgggaaaggtgcgcccgtacagcgtgtaccttttctcattcagcatgttctttaacgggctcgctgacctggctggctccaccgcgggagattacggcgggctcgtggtgttctgcatcttcttcggaatctcttacggaatggtgggggccctccagttcgaagtgctcatggctatcgtgggcacccacaagttcagctcggctatcggtttggtgctgctgatggaagcagtagccgtgctggtcggcccaccctccggcggaaagctcctggacgcgactcacgtctacatgtacgtgttcatccttgcgggtgcggaagtgctcacgtcgtccctgatcctcctgctgggtaatttcttctgcatccgcaagaaacctaaggagccgcagccagaggtggcggccgccgaggaggagaaacttcacaagccaccagctgattccggggtggacctgcgcgaggtggagcacttcctcaaggccgaacccgagaaaaatggagaagtggtgcacactcctgagacttccgtg

SEQ ID NO: 316595 - DNA, 1395 bp, Artificial Sequence
  derived and/or modified sequence
atgggtggagcagtggtggatgaaggtccaactggcgtgaaggctcccgacggcggttggggatgggcagtgctctttggctgcttcgtgattaccgggttctcatacgcatttccaaaggctgtgtcggtgttctttaaggaacttatacaagagtttggaattgggtattcagatactgcgtggatttcctccattctcctcgcaatgctttacggcaccgggcctctttgtagtgtctgcgtgaatcgatttggctgtagacctgtgatgctcgtgggcggtctttttgcatcactcggaatggtcgcggcatccttttgcagaagcatcattcaagtctaccttacgaccggcgtgatcaccggactgggtctggcacttaacttccaaccttcgctgataatgctgaaccgctactttagcaagcgaaggccgatggccaacggactcgcggcagccggatcccctgtattcttgtgtgcactttcgccactcggccagctccttcaagacaggtacggatggagagggggctttctcattctgggaggcctcctgttgaattgttgtgtgtgtgccgcactcatgcgccctttggttgttaccgctcagccaggtagcggaccaccaagaccttcgaggagactccttgatctctcggtgttccgggatcggggattcgtgctttacgccgttgcagcatcagtgatggtgttgggactgttcgtgcccccggtttttgtggtgagctacgcaaaggatctcggagtccctgacaccaaagcagcgtttctcttgactatcctgggatttatcgacatctttgcccgtcctgccgcaggctttgtagcaggcctgggaaaggtcagaccttactcggtgtatcttttctcgtttagcatgttctttaatgggctggcagacctggcaggtagcaccgcgggcgactacggaggtcttgtggtcttttgcatcttttttggtatatcgtacggtatggtaggagcactccagtttgaagtccttatggccattgtgggaactcacaagttcagctcagcaatcggactggtccttttgatggaagccgtggcggtccttgtggggccaccgtccgggggaaaattgctggatgccactcatgtctacatgtacgtattcattcttgcaggagctgaagttttgactagctccctcattttgctgcttggtaacttcttctgtataaggaagaagcccaaggaaccacagccggaggttgcagccgctgaagaagagaaacttcataaaccacccgccgattccggggtggatttgcgggaggtcgagcactttcttaaagcagaaccagagaagaacggggaagtggtgcatacccctgaaacgagcgtg

SEQ ID NO: 316596 - DNA, 1395 bp, Artificial Sequence
  derived and/or modified sequence
atgggaggggctgtcgtcgacgaagggccaaccggcgtgaaggctcccgacggcggatgggggtgggcagtactgttcggctgctttgtcatcactgggttttcatacgcctttcctaaagccgtcagcgtgttctttaaggaactgatacaagaattcggaatcggttatagcgatacagcatggatatccagtatcctgctggccatgctctatgggaccggaccactctgttcagtttgcgtcaatagatttggatgccgacctgtgatgctggtcggcggtctcttcgcctccctgggaatggtagccgctagtttttgtcggtccatcatccaagtgtacctgaccacaggcgttattaccggacttggccttgccctgaatttccagccgtcgttgattatgctcaataggtatttttcaaaacggcgccccatggcaaatgggctagcagctgcgggatctcctgtttttctgtgtgctctgagccctctcgggcagctgctgcaggacaggtacgggtggcggggcggcttccttatcctggggggtctcctgctgaactgttgcgtgtgtgcggctctcatgcggcctctggttgtgacggctcaacccggctcaggccctcctcggccgagcagacggttgttggacctgtccgtgtttcgggaccgggggttcgtgctttatgctgtggctgcatccgtaatggttctgggtctgtttgtcccgcctgtgtttgtagtaagctatgccaaggacctgggcgtgcccgatacaaaagcagccttcttgctgacaatcctggggttcatcgacatcttcgcccggccggccgctggattcgtggcaggcctggggaaggttcgcccatactccgtgtaccttttttctttttctatgttctttaatggcctggctgatctcgccgggtctacagcgggcgactacgggggtcttgttgtattctgcattttctttggcatatcttacggaatggtaggcgccctacagtttgaagtattgatggctatcgtcggtactcacaaattcagtagcgctatcggactggtcctgctgatggaagcagtggccgtgttggtcggcccgccttccggagggaagcttttggatgctacccatgtctatatgtacgtgtttattctggcaggcgccgaagttctaacttctagcctgatcctcctgctgggtaactttttttgcattagaaagaaaccgaaagagccccagccagaagtggcggcggctgaagaagaaaaactccataagccgccagcagactcaggcgtggatctaagggaagtggaacacttcctgaaggcggagcctgagaagaatggcgaggttgtgcatacgccagaaactagcgtg

SEQ ID NO: 316597 - DNA, 1395 bp, Artificial Sequence
  derived and/or modified sequence
atgggtggcgcagtggtggatgaaggacccactggtgtgaaggcgcctgacggtggttggggttgggcagtactttttggatgtttcgtgatcactggattctcttatgcgtttccaaaagctgtgtccgtgttctttaaggaactgattcaagaatttggaattggctactcggacaccgcatggatttcttctatcttgcttgcaatgctctacggaaccggtcctctctgctcggtgtgcgtgaatagattcggctgccgcccagtgatgctcgtcggaggactgttcgcatcactgggtatggtggcagcatcattttgtcggagcattatccaggtctaccttaccaccggagtgatcactggcctcggtcttgccctcaactttcaaccatctcttatcatgctcaatagatacttttccaaacgtagacctatggcaaacggactcgccgcagctggatcaccagtctttctgtgcgcgctgtcgccactgggtcaacttcttcaagacagatatggctggaggggcggctttctcatcctgggcggacttcttcttaactgttgtgtgtgtgcggccctcatgcggcctctggtcgtgaccgcacagccagggtccggccctccaagaccatcccgccggttgcttgatttgtccgtgttccgcgatcggggatttgtgctttacgcagtcgcggcatccgtcatggtgcttggactgtttgtccctcccgtttttgtggtgtcctacgccaaggaccttggggtgccggataccaaagccgcattcctgcttactattctcgggtttattgacatttttgcaaggccagccgcaggatttgtggcgggtctgggtaaggttcgaccttactcggtgtacctcttttcgttctcgatgttcttcaacggtcttgcagatctcgctggctccaccgcaggagattacggtggtctggtggtcttttgtatattcttcgggatatcatacggtatggtgggtgcacttcagtttgaggtgctcatggccattgtcggtactcataagtttagctcagcgattggactggttcttctcatggaagccgtggcagtcttggtcgggcccccgtccggaggtaaactccttgatgccacgcacgtctacatgtacgtgtttatactcgcgggggcagaagtgctgacctctagcctcatcctcctccttggcaactttttctgtattagaaaaaagccgaaggagccccagcccgaagtcgctgcggcggaggaggaaaagttgcacaagcctccagccgactctggcgtggatcttcgtgaggtggaacactttctcaaggccgaacccgaaaagaatggtgaagtggttcatacgcctgagactagcgtc

SEQ ID NO: 316598 - DNA, 1395 bp, Artificial Sequence
  derived and/or modified sequence
atgggaggcgctgttgttgacgagggacccacaggcgtgaaagcacccgacgggggatggggatgggccgtgctcttcggatgctttgtgattacagggttctcttacgcattccccaaggctgtcagtgtttttttcaaagagttgatccaggagtttgggatcggatactcagacactgcatggatttctagtattctgctcgctatgctttacggcacgggaccgctgtgctctgtctgcgtgaatcgctttggctgtaggcctgtgatgctggtgggaggcctatttgcctccctgggtatggtcgcagcttcattttgccggtcaattatccaggtataccttaccacgggggtcatcactggtcttggactggccctgaattttcaaccatccctgataatgctcaataggtacttctccaagcgccgtcccatggcaaacggcttggcggcagcgggatcccctgtcttcctctgtgccctctcgccacttgggcaactgctgcaagacaggtacgggtggaggggggggttcctgatcctcggagggctgcttctgaattgctgtgtttgtgccgccctgatgagaccactcgttgtaaccgcacaacctggtagtggaccacctaggccttccagaagacttcttgacctctctgtgtttagagaccgtgggttcgtgctgtacgcggtggcagcatcagtcatggtgctgggcctgttcgtccctcccgtcttcgtggtatcgtacgccaaagacctgggggtccccgacactaaggccgccttcctcctgaccattctgggcttcatcgacatttttgccaggcctgccgcaggctttgtggctgggctcggaaaagtcaggccctactcagtgtatctcttctctttctctatgtttttcaacggcctcgccgacctcgcgggctctactgccggtgattacggcggactggtcgtgttctgcattttttttggcatttcatacggaatggtaggggccctccaattcgaagtgctgatggccatcgtagggacccataagttctccagtgcaattggcctggttcttctcatggaggcggtcgctgtgttagtgggacctccttctggaggtaagctactcgatgccactcacgtgtacatgtacgtttttatactggccggcgctgaggtgcttacatctagcctcatactgctcctggggaactttttttgtatcagaaaaaagcctaaggagcctcagcctgaggtcgcagcagcagaggaggaaaaactacataagccgcccgccgacagcggggtggacctgagggaagtggaacactttttaaaagcagagcctgagaaaaatggggaggtcgtccatacccccgaaacatctgtc

SEQ ID NO: 316599 - DNA, 1395 bp, Artificial Sequence
  derived and/or modified sequence
atgggaggagcagtcgtcgacgaagggccaactggtgtgaaggcccctgatggcgggtggggatgggccgtgctctttgggtgcttcgtgatcactgggttctcctacgctttccccaaagcagtctcagtgttcttcaaggaactcatccaagaatttggaatcgggtactcggatactgcatggatttcgtcaatcttgctggccatgctgtacggcaccggaccactgtgctcagtttgcgtgaaccgctttggatgcagaccggtcatgctggtcggcggattgttcgccagcttgggaatggtggccgcctcattttgccggtcgattatccaagtgtacctcactaccggagtgattaccggtctggggctcgcgctgaatttccaaccgtccctgatcatgttgaaccgctacttctcgaagcgccggccgatggccaacgggctggcagccgccggatcgccagtgtttttgtgcgctctgtcaccactcggacagctgctccaggatcgctacggttggcggggaggattcctgatactgggcggattgctgcttaattgctgtgtgtgcgccgccctgatgaggcctctggtggtgaccgctcagcctggatcgggtcctccaaggccttcaaggcggttgctggatctctccgtgttccgggaccgcggattcgtgctttacgccgtggctgcctcggtcatggtgctggggctttttgtgccgccagttttcgtcgtcagctacgctaaagatttgggtgtgccagacaccaaggccgccttcctgctcactatcctcggcttcatcgacattttcgcccggccagcggcgggatttgtcgccggactgggtaaggtgcggccctactcggtctacctgttttccttttccatgtttttcaacggactggctgacctcgctgggagcaccgcgggagactacggagggttggtggtgttctgcatctttttcggcatctcgtacggaatggttggagcccttcagttcgaagtccttatggcaatcgtcggtacccacaaattctcctcggcgatcgggttggtgttgctgatggaagccgtcgcagtgctggtgggaccaccgtcgggcgggaagctgctggacgcgacccatgtctatatgtacgtgttcattctggctggcgcggaagtgctcacctccagtttgatcctgctgctggggaactttttctgcattcgcaaaaagcctaaagaacctcagccggaagtcgctgcggccgaggaggaaaagctgcacaaacctccggccgattccggagtggatctgcgggaggtcgaacatttcctcaaggcggagccggaaaagaatggagaggtggttcacacgccggaaacttctgtg

SEQ ID NO: 316600 - DNA, 1395 bp, Artificial Sequence
  derived and/or modified sequence
atggggggagctgttgtggacgaagggccaacaggggtcaaggccccagatggtgggtggggttgggctgtgttgttcggttgtttcgttataaccggtttcagttatgcatttcccaaggccgtgagcgtcttctttaaagagttaatccaagagtttggtataggttactccgatactgcttggatcagcagtattttgctcgcaatgttatacggtacaggtcctctttgctcagtttgtgtcaatcgcttcggttgtagaccagttatgctcgttggtggacttttcgcaagtcttgggatggttgccgcttctttctgtaggagcataatacaggtttacctaaccaccggtgttataactggccttggactagctttgaatttccaacctagtcttataatgcttaaccggtactttagcaagaggcgacctatggccaacggattggcagcggccggtagccctgttttcctttgcgccttatcccctttaggtcagctcctgcaagacaggtatggctggcgtggtggatttctgatcctgggtggtttattacttaattgttgcgtctgtgctgctttgatgcgccccttggtggttaccgcccagcctggttctggcccaccaaggcccagccggcgtctgctcgatctttcagtgttccgagatcgcggtttcgtcctttatgccgttgcagcgtcagtgatggtgttgggacttttcgttccaccggtgtttgttgttagctacgcaaaggacctgggagtgcccgatactaaggcggcttttttgttaacaatcctcggatttatcgatatatttgctaggcctgccgctggtttcgtagccgggcttggtaaagttagaccttattctgtgtatcttttctccttctctatgttttttaatggattggcagatttggctggctctactgcaggagattatggaggattagtcgtcttctgtattttctttggtatctcctacggtatggtcggagctctccaattcgaagttttgatggctatcgtaggtactcataagttttcgtcggccattggactggtgcttctgatggaggctgtagcagtactcgttggtcccccttcgggcggtaagttgttagacgcgacacatgtttacatgtatgtgttcattttagcaggtgccgaggtgctaacttcttcactaattttattgcttggtaactttttctgcattcgaaagaaacccaaggagccccaacccgaagtagccgcggccgaggaggaaaagcttcataaaccacctgctgattcgggtgttgacttaagagaggtggaacattttctcaaggccgagcccgaaaaaaacggcgaggtggttcatacgccagagacctcagtt

SEQ ID NO: 316601 - DNA, 1395 bp, Artificial Sequence
  derived and/or modified sequence
atgggtggtgccgtggttgacgagggcccgactggcgtgaaagccccagacggcggatggggctgggccgtcctgttcggatgcttcgtgattactggtttctcgtacgcattcccgaaggccgtgtccgtgttcttcaaagagctgatccaggaattcggcatcggatactctgataccgcatggattagctcgatcttgctggccatgctgtacggaaccgggccgctttgctcggtgtgcgtgaatcggttcggatgccggccggtgatgctggtcggaggactgtttgcctcgctgggcatggtcgctgcatccttctgccgctcaatcatccaagtgtacctgactactggcgtcatcaccggactcggattggcgctcaactttcaaccgtcattgatcatgctgaaccggtacttctcgaagagacggccgatggctaacggactggcggctgcgggatcgccggtgttcctctgcgctctttcgccgctgggacagctgctgcaggaccgctacgggtggagagggggattcctgatcctcggaggactgctcctgaattgctgcgtgtgcgctgccctgatgaggccactggtcgtgaccgctcaaccgggatcaggacctcccagaccgtcccggcgcctgctggacctgagcgtgtttcgagacagaggttttgtcctctacgccgtcgccgccagcgtgatggtgctgggactcttcgtgcccccagtgttcgtggtcagctacgccaaggatctgggagtgccggatacgaaggcggcatttctcctcaccatcctgggatttatcgatatcttcgcgcgcccggccgccggtttcgtcgctggactcggaaaagtgcgcccctactcggtgtacctgttctcattctctatgtttttcaatggactcgccgacctggctggctccaccgccggcgattacggtggacttgtggtgttctgcattttctttggcatcagctacggaatggtgggagctctgcaattcgaggtcttgatggcaatcgtgggtactcataagttttcatcggcgatcggactcgtgctcctgatggaagccgtggccgtgctggttggacccccgtcaggagggaagttgctcgacgcaactcacgtgtacatgtacgtgttcatcctcgcaggcgccgaggtgctcacctccagcttgattctgctgctcggaaacttcttctgcatccgcaaaaagccgaaggagccacagcccgaagtggctgcggctgaggaagagaagctgcataagccgccggccgactcgggagtggacttgagggaagtggaacatttcttgaaagcggagccggaaaagaacggagaggtggtgcacaccccggaaacttcagtg

SEQ ID NO: 316602 - DNA, 1395 bp, Artificial Sequence
  derived and/or modified sequence
atgggaggagctgtggtcgacgagggaccgactggagtcaaggccccggacggtggctggggatgggctgtcctgttcggatgtttcgtcatcactggcttttcctacgcatttccgaaggctgtgtccgtgttcttcaaggagctcatccaagagtttgggatcggctactcggacaccgcgtggatcagcagcatccttctggccatgctctatggcacgggcccgctgtgctccgtgtgtgtgaaccgatttggttgtagaccggtcatgcttgtgggaggactcttcgcctcgctgggaatggtcgcggcgtcattttgcagatctatcatccaggtgtacctcaccacgggagtcatcaccggcctcggactggccctcaatttccaaccatcactgatcatgctcaataggtacttttcaaagcggcgccctatggccaacgggctcgcggccgcgggctcacctgtgttcctttgcgccttgagcccactggggcagttgctccaggaccgctacggatggcgcggtggattccttattctcggaggtctgcttctcaattgctgcgtgtgtgcagcacttatgcggccactggttgtcaccgcccaacctggatcgggacctccacgaccatcacggcgcctcctggaccttagcgtgttcagggatcgcgggttcgtgctgtacgcggtggccgcctcagtgatggtgctgggcttgttcgtccccccggtctttgtggttagctacgccaaggacctgggtgttccagacaccaaggccgcattcctgctcactatcctggggtttatcgatatctttgcacggcctgccgcggggtttgtggccgggctcggcaaggtgcgcccttacagcgtgtacctgttttcgttctcgatgttcttcaacggacttgccgacctggccggaagcaccgcaggggactacggaggacttgttgtgttctgcatcttctttggcatctcgtatggcatggtgggagcactgcagttcgaggtgctgatggcgatcgtgggcacccacaagttttcgtcagccattggcctggtgttgctgatggaagctgttgccgtgctcgtgggcccgccgagcgggggaaagttgctggatgctactcatgtgtacatgtacgtgttcatcctggccggagcagaagtgctgactagctccctgatcctgctgctcggaaacttcttctgtatccgcaagaaaccgaaggagccccagccggaagtggccgcggcagaggaagagaagttgcataagcctccggcggactcgggcgtggatctgagggaagtggaacacttcttgaaagcggagccggagaagaacggagaagtggtccacaccccggagacttcggtc

SEQ ID NO: 316603 - DNA, 1395 bp, Artificial Sequence
  derived and/or modified sequence
atgggcggtgctgtggtggatgaaggccccactggtgtgaaggcccccgatggcggatggggttgggccgtgctgtttgggtgttttgtcatcactggcttttcctacgcattcccaaaagctgtttcagttttctttaaagaactcatccaagagtttggcattggatactcagatacagcctggatttcctccattctactcgcaatgctgtacggaaccggtcctttgtgcagtgtctgtgtgaatcgatttggctgcagacccgtgatgctggtgggaggattatttgcctccctgggcatggtcgcagcctcattctgcaggtctatcattcaggtgtacctgactaccggggtgataaccggcttaggcctggctttgaattttcagccttccctgattatgctcaatcggtatttttccaagagaagacctatggccaatggcctagcagctgccggctctccagtctttctctgtgccctgtctccactgggccagctgctgcaggaccgatacggttggcggggcggtttcctcattttagggggactgctgctgaattgctgtgtgtgcgctgccctcatgaggcccctggtggttacagctcagccagggtccgggccacctaggccttcccgtagattgttagatctctccgtgttccgggatcgcggcttcgtgctgtacgcggtggctgcgagcgtcatggtcctaggactatttgttccacccgtgttcgtagtgtcgtacgctaaagacctaggagtccctgacacaaaggccgcattcctactgacaatcctgggattcattgatatcttcgcacgacccgcagccggcttcgttgcagggttaggaaaggtgcggccatactccgtgtacctgttctcattctctatgttctttaatgggctggctgatttggcaggctctacagctggcgattatgggggccttgtggttttttgcatcttcttcggaatatcttacggaatggtgggcgccctgcaatttgaagtgctcatggctatcgttggcacacacaagttctccagcgccattggcctggtcctcctgatggaagcagtcgctgtcctggtcggacccccttctggcggtaaactgctggacgcaactcacgtttatatgtatgtgttcatcttggcgggtgccgaggttttgaccagctccctgatcttgctcctcggaaactttttctgcattcggaagaagccaaaagaaccccaacctgaggtggccgctgcagaagaggagaagttgcataaaccgcctgccgatagtggggtcgatctgcgggaggtggaacactttcttaaggctgagccagagaagaacggagaggtggtgcacacccccgaaactagcgtg

SEQ ID NO: 316604 - DNA, 1395 bp, Artificial Sequence
  derived and/or modified sequence
atggggggagcagtcgtggatgaaggcccgaccggcgtcaaggccccggacggcgggtggggatgggccgtcttgttcgggtgttttgtgattaccggtttttcgtacgcattcccgaaggccgtatcagttttcttcaaggagctgatccaggagtttggaatcggatactccgacaccgcttggatttcgagcatcctgctcgccatgctgtacggtaccggaccgctgtgctccgtgtgcgtgaaccgcttcgggtgccgccccgtcatgctggtgggcggcctgttcgcctccctgggcatggttgctgctagcttctgtcggagcatcatccaggtgtatttgactactggagtcatcactggactcggcttggcccttaatttccagccaagcctcataatgctgaacagatacttctccaagagaaggccgatggcaaatggattggcagccgccggctcacccgtgttcctgtgcgctctttcgcctctcgggcaactccttcaggaccgctacggatggcgcggaggattcctgatcctgggtggactcctcctcaactgctgtgtgtgcgccgcgctgatgaggccgctggtggtgaccgctcaaccaggatccggacctccacggcctagcagacgcctgttggacctgagcgtgtttcgggatagaggttttgtgctttacgcggtcgcggcatcagtgatggtgctggggctgtttgtgccgcctgtgtttgtggtcagctacgccaaggatctcggcgtgccggatactaaggctgcgttcttgctgaccatcctgggatttatcgacatcttcgctcggccagcggcaggctttgtggccggactgggtaaagtgcggccgtattcggtgtacctcttctccttctccatgttcttcaacgggctcgcggacctcgctggttctactgccggcgattacggtggactggtcgtgttctgcatcttcttcggaatctcgtacggcatggtgggggcactgcagttcgaggtgcttatggcgattgtgggaacgcataagttttcatccgccatcggactcgtgctgctcatggaagccgtcgcggtcctggttggaccaccttcgggaggcaagctcctcgacgcaacccacgtctacatgtacgttttcattctggccggagccgaagtccttacctcgtcactcatcctgctgctgggaaacttcttctgcatccgcaaaaaacccaaagaaccacaaccggaagtggcagcggcggaggaagagaagctgcacaagccgcctgcggatagtggagtggacctgcgagaggtcgaacatttcctgaaagccgagccagaaaagaatggagaagtcgtgcacacgcccgagacttcggtg

SEQ ID NO: 316605 - DNA, 1395 bp, Artificial Sequence
  derived and/or modified sequence
atgggaggagctgtcgttgatgaagggcctactggagtgaaagcccccgatgggggatgggggtgggccgtactattcggatgcttcgtcattacagggttctcttacgcttttcccaaagctgtgagtgtgttctttaaagaactaatccaggaattcggaattgggtattctgacacagcatggatatcatccattcttctggcgatgctctacggaactgggcctctatgctccgtgtgcgtcaaccggttcgggtgcaggcccgtaatgttagttggaggattatttgcttcacttgggatggtagcagctagtttctgtcgctctatcatacaggtttatctgactacaggggtcattacagggcttggactcgctctcaatttccagcccagtctcatcatgctcaataggtatttctctaaaagacggcctatggctaatggactagccgcagccggatcacccgttttcctctgtgccttgtcacccctcggacagttactgcaggatcggtatgggtggagaggaggattcctcatcttaggagggctgctcttaaactgctgcgtgtgtgccgcactcatgagaccactggtagttactgcccagcccgggtcaggaccccctcgcccttcccggcggttgctggatctctcagtttttcgagatagaggattcgtcctctacgctgtggccgcctccgttatggttctgggacttttcgtgcctcccgtgtttgtggtctcttatgctaaagacctcggagtgcccgatactaaggccgctttcctcctcactatcttgggattcatcgatattttcgcccggcccgctgcgggatttgtggctgggctcggaaaagtgcgaccttattcagtatatctgttttcattttccatgttttttaatgggctcgcagatcttgccggatctacagcaggagactatggagggttggtcgtattctgtatcttttttgggatatcctacggaatggttggggctcttcagtttgaagtgctgatggcaattgtaggaactcataagttttcctcagccattggacttgtattattaatggaggccgttgctgtcttagtgggacccccttcaggaggaaaacttctcgatgcgactcatgtctatatgtatgtctttatacttgccggagctgaagtgttgacatcatctctcatcctgctcctcgggaattttttctgtattaggaagaaacctaaagaaccacagcccgaagtggccgctgctgaggaagagaaattacataaaccccccgctgactctggagtggatttaagggaagtcgaacattttctcaaagctgaacctgaaaaaaatggagaagtggtccatactcctgaaacatctgtc

SEQ ID NO: 316606 - DNA, 1395 bp, Artificial Sequence
  derived and/or modified sequence
atgggcggcgcagttgtggacgagggacccaccggagtgaaagcccccgacggaggttggggttgggctgtcctgttcggctgttttgtcatcacaggcttcagctacgcttttcccaaggccgtctccgttttctttaaggaactgatacaagagtttggaatcggatactctgacacagcctggatcagctccatcctcctggccatgttgtacggaactggccctctgtgcagcgtgtgtgttaatcgctttggatgtaggccagtcatgttggttggaggattgtttgcatcactcggtatggtcgccgcttccttttgccgttccatcatccaggtttacctcactactggagtgattaccggtctgggtttggccctgaatttccagccctccctgatcatgcttaatcgctacttcagcaagaggagaccaatggctaacggtttggctgccgctggttcccccgtctttctctgtgcactttctcctttgggccaactgctccaggatcgctacggctggagaggcggttttctcattctgggaggtctcttgttgaactgttgcgtgtgtgcagccttgatgcgtcctctggtggtgaccgctcagcccggaagcggaccaccacgccccagccgtcgcttgcttgatttgagtgtttttcgcgaccgcggcttcgtgctctacgcagtggcagcttctgttatggtgttgggcctgttcgttccccctgtattcgttgtttcttacgccaaggatttgggagtccccgacacaaaagccgccttcctgctgacaatcttgggtttcatagatatttttgcacgcccagcagccggctttgtggccggcctcggtaaggtgaggccctatagcgtttaccttttctctttcagcatgttttttaatggcctcgccgatctggccggttccaccgcaggtgattatggaggtctggtcgtgttctgtatcttttttggcatctcctatggcatggtaggtgcattgcagttcgaagttctgatggcaatcgttggtactcacaagttctcctctgctatcggtctggtccttctgatggaggccgtcgccgtgctggtcggcccaccctccggtggcaagctgttggacgccacacatgtgtatatgtacgtcttcatcctggctggagccgaggtgctcacttcttcattgatactgcttctgggcaacttcttctgtataaggaaaaagccaaaagagccccaacctgaagtggctgccgctgaggaagagaagcttcataagccccctgccgactccggcgttgacttgcgcgaggtagagcacttcctgaaagcagagccagagaagaacggagaggtcgtacacacacctgaaacctctgtg

SEQ ID NO: 316607 - DNA, 1395 bp, Artificial Sequence
  derived and/or modified sequence
atgggtggcgctgttgtcgacgagggcccaaccggagtgaaggcgcctgatggtggatggggttgggctgtgcttttcggttgcttcgtgatcactggattcagctacgccttcccaaaagctgtgtctgtgttttttaaagaacttattcaagagtttggaatcggctacagcgatactgcatggatatcttcaatcttgctggcaatgctttacggaacaggtcctctttgcagtgtttgcgtcaataggtttggctgcagaccggtaatgctggtaggcggcctcttcgcttctttgggaatggtcgctgcaagtttctgtagatcaatcatacaggtgtatctgaccactggagtgatcaccggcctcggcctggctctgaattttcagccttctctcataatgctgaataggtatttctcaaagaggagacctatggcaaatggactggctgccgctggatcaccagtgttcctctgtgctctcagtccgctcggacagcttttgcaggacaggtacggctggaggggtggtttccttatcctcggaggtctcctgctgaactgttgcgtctgtgctgccttgatgaggcctttggtagtcaccgcccagccaggctcaggacctccacgcccaagtaggcgccttctggacctcagtgtgtttagagatagaggcttcgtgctctacgccgtcgctgcctctgtgatggtcttgggactgttcgttccccctgttttcgtggtttcttacgcgaaggatctcggagtacccgatacaaaagccgccttcctcctcacaatcctcggctttattgacatctttgccaggcccgccgcaggattcgttgctggactcggcaaggttagaccgtactccgtataccttttttcattttcaatgttctttaacggactcgctgacctggccggttctaccgctggtgactacggtggtctcgtggtgttctgcatctttttcggaatctcttatggcatggtaggtgccctccagtttgaagttttgatggcgatcgttggtacacacaagttttcttcagcaatcggcctggtgctcctcatggaagctgtcgctgtcttggttggacccccgtccggaggaaagttgctcgatgccactcacgtgtacatgtatgtattcattttggctggtgctgaggtcctgacatcctctcttatcctccttcttggcaacttcttctgcatcaggaaaaagccgaaagagccacaaccagaagtagctgcagccgaggaggaaaaactgcataaacctcccgctgattctggcgtggatctgcgcgaagttgagcactttttgaaggctgagcctgaaaagaacggcgaagtggttcatactccagagacatcagtg

SEQ ID NO: 316608 - DNA, 1395 bp, Artificial Sequence
  derived and/or modified sequence
atgggcggagctgttgtcgatgaaggacctactggggtcaaagcgcctgacggtggatggggatgggcagtgctgtttggctgctttgtgattacgggtttctcctacgcgtttccaaaggccgtctcggtattctttaaggaacttattcaggagtttggaattggatactcagacactgcatggatttcctccatactgcttgctatgctttacggaactggccctctgtgttccgtgtgtgtgaatagatttggctgtcgtcctgtcatgctggtcggtggactgtttgccagcctgggcatggtggccgcctcattttgtcgttcgattattcaagtgtacctcaccactggggtgattactggactcggactggcccttaactttcaaccatcactcatcatgctgaatagatacttttcgaagagacggccaatggcaaacggtctggctgcagcgggctcccctgtattcctttgtgccctgtcgcccctgggacaacttcttcaagataggtacggttggcgcggtggttttctgatcctgggaggccttttgctgaactgttgcgtgtgtgcagcactgatgcgaccgcttgtggtgaccgcacagcctgggtccggacctccacgcccctcaagacgtctccttgatctgagcgtgttccgcgacagaggttttgtgctgtacgccgtggcggcctcggtcatggttttgggactgttcgtgcctccagtgtttgtggtgtcatacgcaaaggatcttggcgtgcctgataccaaagcagcttttcttcttaccattctggggtttatagacatatttgcacgaccagccgcagggtttgttgcgggtcttggaaaggtgcgcccatactccgtgtacctgttttcgtttagcatgttctttaacggcctggcagacctcgcaggatccactgccggagactatggtggtttggtggtgttttgtatcttttttggtatttcctacggcatggtgggcgcactgcagttcgaagtcctgatggccattgtcggaactcacaaattctcctcggcaattgggcttgtgcttcttatggaggctgtcgctgtgcttgtgggtcctccctccggaggaaaattgcttgatgcgacccatgtctacatgtacgtgtttattctggcaggagccgaagtgctgacctcctccctcattctcctccttggaaacttcttctgcatcagaaagaagccgaaggaaccgcagcctgaagtggcggcagccgaagaagagaagctgcataaacccccagcggattcaggagtggacctcagagaagttgaacatttcctgaaggcagaaccggaaaagaacggggaagtggtgcataccccagaaacctcagtt

SEQ ID NO: 316609 - DNA, 1395 bp, Artificial Sequence
  derived and/or modified sequence
atgggaggggccgtggtggatgagggacctaccggtgtgaaagcgcctgatggtggttggggttgggcggttctgttcggctgtttcgtgattaccgggtttagctacgcctttcccaaggcagtgagcgtattctttaaggagctgatccaagagttcggaatcggctactctgacactgcgtggatatcctcgatcctgctggcaatgctgtacgggactggccctctgtgttccgtgtgcgtgaaccgcttcggctgtcggccagtcatgttggtcggaggccttttcgcatccctgggaatggtcgccgcttcattttgtagatccattattcaggtctacctgacgactggagtcattacgggattggggctggcacttaactttcaaccttccctgatcatgcttaacagatacttttccaaaaggcgcccaatggcaaacgggttggccgcggctgggtcgcctgtgttcctttgtgccctttccccgctgggccaacttcttcaagataggtacggatggcgcggaggtttccttatccttggaggactgctgcttaattgttgtgtgtgcgcagccctcatgcgtccgctcgtggtcactgcacagcctggatcgggtccaccaagaccgagccgacgtctgcttgatctttcagtctttagggatcgcgggtttgtgctctatgcagtcgcggccagcgtgatggtgctcgggctgttcgtgccccctgtgttcgtggtgtcatacgcgaaggacttgggagtccccgatacgaaggctgctttcctgctcaccattctcgggtttatagacatttttgctcggccggcagcagggttcgtggccgggctgggaaaggtccgtccctactccgtgtaccttttctcgtttagcatgtttttcaatgggcttgcagatctggcaggctccacggcaggggattacggcgggcttgtggtgttttgtattttctttggaatcagctacggtatggtgggagcactccaatttgaagtgttgatggcaatcgtcggtacccataagttttcttccgctattgggctggtgctgctcatggaagccgtggccgtgcttgtgggtcctccatccggcggaaaacttctcgatgcaactcacgtctacatgtatgtgtttattctggcgggagcagaagtgcttactagctcgctcatcttgctcttggggaatttcttttgcatccgtaagaaacctaaagaacctcagcctgaggtcgcagcagcagaggaggaaaaacttcacaaaccccctgcagactcaggagtcgaccttagagaagtcgagcattttctgaaagccgaaccagaaaagaacggagaagtcgtgcatactcctgagacttcagtc

SEQ ID NO: 316610 - DNA, 1395 bp, Artificial Sequence
  derived and/or modified sequence
atgggaggcgccgtagtcgatgaaggcccaaccggcgtaaaggctcccgatggggggtggggctgggccgtcctgttcggatgcttcgtgattactggctttagctacgctttcccaaaggccgtgtctgtgttctttaaagagctaatacaggagttcgggatcgggtatagcgacaccgcttggatttcctctattttgctcgccatgctgtatggaactggccctctatgttccgtctgcgtaaatagatttggatgtagacctgtgatgctggtgggtggtctgtttgcatcactgggaatggtagctgccagtttctgtcgcagtatcattcaggtgtacctgacaactggggtgattacaggactggggctggccctgaacttccagccgtcactgatcatgctgaatcgctacttctcaaagaggcggccaatggctaatggcctggccgcggcagggagcccagtttttctatgcgcgttgagccctctaggacagctactgcaggaccgatacggttggcgcggggggttcctgattctaggcggcttactgctgaactgttgcgtgtgcgcggcactcatgagacccctcgtcgtgacggcccagcccgggtctggccccccacgtcctagtaggcgccttctcgacctgagcgtctttagggacagggggtttgtgttatacgcggtggcagctagtgtaatggtgctgggcttgttcgttccccccgtttttgtggtgtcatacgctaaggacctgggcgttcccgatacaaaagcagcctttctgctgacaattcttggtttcattgacatattcgccaggccggcagccgggtttgtggctgggctggggaaggtgagaccatacagcgtctatctcttcagtttttccatgtttttcaacggattggctgatctggcaggttccaccgcaggcgattacggaggccttgtggtgttttgtatcttcttcgggatttcctatggaatggtgggcgccctgcagtttgaagttctaatggccatagtcgggacacataagttctcttcggcgatcggtttggtgctgcttatggaagctgtggccgtgctcgtagggcccccttcggggggaaaacttttagacgccacacacgtatacatgtatgtttttatcttggctggggccgaggtgctcaccagctccctgattctcctcctgggaaatttcttttgcataagaaagaaacctaaggagccccagccagaagtggccgcagccgaggaggaaaagctacataagccacccgctgatagcggggtcgacctgcgcgaagtggaacacttcctaaaggctgagcccgaaaagaatggagaagtggtacatacccctgagaccagcgtg

SEQ ID NO: 316611 - DNA, 1395 bp, Artificial Sequence
  derived and/or modified sequence
atggggggagcagtcgtggacgaaggacctacaggcgtcaaagctcccgacgggggatgggggtgggcggtccttttcggctgttttgtaataaccggcttttcctacgcttttcctaaagccgttagtgtattttttaaagaactgatccaggaatttgggatcggctactccgatactgcctggataagcagcatccttctggccatgttatatggcacaggacccttatgcagcgtgtgtgtgaatagatttggatgccgccctgttatgctggtggggggcttgtttgcaagcctggggatggtggcagcctccttctgtcgtagcatcattcaagtgtacctcacgaccggagtgataaccggactcggactggcacttaactttcagcctagtctgattatgctgaatcgctacttttctaagagacgaccgatggccaatgggctggcagccgcgggctctcctgtgttcttgtgcgcactgtccccactgggtcagctgctccaggatcgctacgggtggcggggcgggttccttattcttgggggcttgcttctgaactgctgtgtctgtgctgccctcatgagacctctggtggttaccgcccagccaggctccggccccccccgtccatcccggcgcctgctagatctgtctgtgttcagggaccggggctttgtgctgtacgctgtggccgctagcgtgatggttttgggacttttcgtgccgcctgtttttgtagtgtcttatgcaaaggacctgggtgtgcctgacacgaaggcagctttcctactgacaatcttaggcttcatagacatttttgcccgtcctgcagccgggttcgtagccgggcttggtaaggtccggccctatagcgtgtacttgttttctttctcaatgttttttaatggcctggcggacctcgcaggctctaccgccggtgattatgggggcttggtcgttttttgtattttctttggcatcagttatggcatggtgggcgctctgcagttcgaagttttgatggcgattgtgggaacacacaagttttcctctgccataggactggtgctcctgatggaagccgtggctgtactagtggggccaccatctggcgggaagctgttggatgctacacatgtctatatgtacgtatttatccttgccggggccgaagtgctcacatcatccttgatcctccttctgggtaatttcttctgtatcagaaagaagcccaaagagccccaacccgaagtggccgccgccgaagaggaaaagctacataagcccccagctgactccggagtggatttgcgagaggtagagcacttcctgaaagccgagcctgaaaaaaatggtgaggtggttcacacacccgagacatccgtc

SEQ ID NO: 316612 - DNA, 1395 bp, Artificial Sequence
  derived and/or modified sequence
atggggggcgctgttgtggatgagggaccgacaggagtgaaagcacccgatggcggatggggctgggccgtacttttcggctgcttcgtgattaccggattttcttatgccttccccaaggctgtcagcgtgttttttaaggagctcatacaagagttcggaatcggctattccgacacagcgtggatatcatcaatactgttagctatgttgtacggcactggacccctgtgttccgtatgtgttaaccgatttggctgccgacctgtgatgttggttgggggcctgttcgcctctctcggaatggtggctgcgagtttttgcaggtccatcatacaggtctatctaaccaccggcgtcataactggtctgggcttggctttgaactttcagcccagcctgatcatgctgaataggtactttagcaagcgtcgccctatggccaacgggctggctgcagcaggatctccggtattcctgtgtgcgctttcaccactcggccaattgctccaggaccgctatggatggcggggcggatttctcatcctgggcggattgctcctcaactgctgcgtctgtgccgcgctgatgcgcccattggtggtgaccgctcaacctgggtctgggccacccaggcccagtaggaggctccttgatctttctgtgtttagagacagaggatttgtgctatatgcagtagccgcctctgtcatggtcctgggactctttgttccccctgtgttcgtagttagctacgccaaagatctcggagtccccgataccaaagccgccttcctcctgactatattgggatttattgacatcttcgctcggcccgctgccggctttgtcgctggactcggaaaagtaaggccctatagtgtctacctattttctttctctatgttttttaatggtctggcagatctggctggaagtaccgcaggggactacggcggcctagttgttttttgtatcttttttggcataagttacgggatggttggtgctttgcaattcgaagtgttaatggccatagtgggcacacacaagttttctagtgctatagggttagtgctgctcatggaagcagtagcggtgctcgtagggccccctagtggtggaaagcttctggacgctacacatgtgtatatgtacgtctttatcctggccggcgcagaggttctgacgtcctcactgatactcctcctcgggaattttttttgtattcgcaagaagccaaaggaaccccaacctgaagtggcagccgccgaggaagaaaagctccataagcctcccgcggattccggggtggacttgcgagaagtggaacacttcctgaaggccgagcccgagaagaatggagaggtggtccatacacctgaaaccagcgtc

SEQ ID NO: 316613 - DNA, 1395 bp, Artificial Sequence
  derived and/or modified sequence
atggggggcgcggtcgttgacgaaggacctaccggagtgaaggcccctgatggcggctggggctgggctgtgctgtttggatgctttgtgatcaccggattttcttatgcctttcctaaagctgtgagcgtctttttcaaagagttaatacaggaatttggaatcgggtacagtgacaccgcatggatttcatcaatcttgcttgccatgctttacggcacaggacccttgtgctcagtctgcgtgaacaggttcggctgtcggccagtgatgttggtaggcgggttattcgcaagccttgggatggtggcggctagcttttgcaggagcatcatccaggtgtatctgacaaccggagtaatcactggcctgggactcgctttaaacttccagccgtctctcatcatgctcaaccgctatttctctaaaagaaggcctatggctaacggcctggcagctgcaggatcgcccgtgttcctttgtgcacttagccctttaggccagttgctgcaggacagatacggctggaggggtggctttctgatcctgggaggactgctgctgaactgttgtgtgtgcgctgcgctcatgaggcctctggtggtcacggcacagccaggctcaggaccacccaggcccagcaggaggttgttggacctgtctgtgtttagagacagggggttcgtgttatacgcagtggctgcctctgtcatggtgcttggcctcttcgtacccccagtgttcgtggtttcgtatgcaaaagatctgggagtcccagacaccaaggccgccttcctgttgacaatcctcggattcatagacatcttcgcgagacccgcagctggatttgtcgcaggcctgggcaaggtccggccatactctgtgtacttgttcagcttttctatgttctttaacggattagctgacctggcgggcagcaccgctggcgattacggcggactggtcgtcttttgcatatttttcggcatttcatacggcatggtgggagctctacaattcgaggtcctgatggccattgttggcacacacaaattctcgtcggctatcggtcttgtgctgctgatggaagccgtcgccgtgctggtgggtccacccagcggtggaaagctcctggacgccacccatgtttacatgtacgttttcatcctggcaggcgcggaggtgctgaccagtagcctcatcttgctcctcggtaactttttctgtatccggaaaaagccaaaagagccccaaccggaggttgccgcggcagaggaagaaaagcttcacaaaccacccgctgactcaggcgttgacctgagagaggtcgagcattttctgaaagcggaacctgaaaagaacggcgaggtggtgcatacacctgaaacaagtgtg

SEQ ID NO: 316614 - DNA, 1395 bp, Artificial Sequence
  derived and/or modified sequence
atgggcggcgctgtcgttgatgagggtccgacgggcgtgaaggcaccggatggcggctggggctgggcggtgctgttcggttgttttgtcattaccggttttagctatgcctttccaaaggcggtatccgtctttttcaaagagttgattcaggaatttggtatcggttacagcgataccgcatggatctcctccattctgctagcgatgctctatggtactggtccgctgtgttcagtgtgcgtgaatcgctttggctgccgacctgtgatgctggtgggtggcctgttcgccagcctggggatggttgctgcctccttctgccgcagcattattcaggtttacctgactacgggtgtgattacagggctgggtctggcactcaacttccagcctagcttgatcatgctgaatcgatatttctctaaacgtcgcccaatggccaacggattagctgccgctgggtcacctgtcttcctgtgtgcactgagcccgctggggcagctgctgcaggaccgctacggatggcgcgggggtttcttaatcctgggaggcctgctgttaaactgctgtgtttgcgctgcactgatgcgcccgctcgtcgtaaccgcccaaccaggatcgggcccgccgcgcccgtcccgccgactcctggatctaagcgtgtttagggaccgcgggttcgtactttatgccgtggcggcctcagtgatggtgctggggttgtttgtcccaccggtgtttgtggtgtcctatgcgaaagatctgggggtgcctgataccaaggccgcatttctgctaaccatcctgggattcattgatatttttgcccgccccgcggctggctttgtggccgggctcggtaaagtgcgcccttactctgtttacttgttctccttttccatgttctttaacggcctggcggatttggctggtagcaccgcgggggactacggcggcttggtcgttttttgcattttcttcggtattagttacggtatggtgggagccctgcagttcgaggtgttaatggcgattgtcggcactcacaagtttagcagcgctattggtctggtgttactcatggaggcagtcgccgtgttggtcggcccgccatctggtggcaagttgctcgacgccacccatgtttacatgtacgttttcatcttagctggtgccgaggttctgacttctagcctgatactactcctcggtaactttttttgcattaggaagaagccgaaggaaccacaaccagaagtagcagcagcggaagaagagaagctgcacaagcctccagcggactctggcgtcgacctgcgcgaggttgagcattttctgaaggcggagccggagaagaacggggaagttgtgcacaccccagagaccagcgtg

SEQ ID NO: 316615 - DNA, 1395 bp, Artificial Sequence
  derived and/or modified sequence
atgggaggtgcagtggtcgatgaaggaccaacaggagtaaaagcaccagatggaggctggggttgggccgtgttgttcggatgcttcgtgatcacaggattctcatatgcattcccaaaggcagtctctgtctttttcaaggaactgattcaggagttcggaatcggatactccgatacagcttggattagttcaatactgctagcgatgttatatggaaccggaccattgtgtagcgtgtgtgttaaccgcttcggatgtcgcccggtaatgctggtcggtggactgttcgcctcattgggaatggtcgcagcttctttttgtagatcaattattcaagtgtacttgactacaggggttatcactggactaggactcgctcttaacttccaaccgtcattgattatgctcaatagatatttcagcaaacgtagaccaatggcaaatggtttggcagcagctgggagtccagttttcttgtgtgctttatctccactgggacaacttttacaagatcgatatggatggcgtggaggattcttgattttgggcggactcctcttgaattgttgcgtttgcgctgctctcatgcgacccctcgtcgtgaccgcacaacctggtagcggtccaccaagaccatcccgtaggctcttggatctgtccgtctttagggaccggggatttgttttgtatgcggttgctgcttcagtcatggttctgggactctttgtcccaccagttttcgtagtaagttatgctaaagatttgggggtccctgatacaaaggcagcttttctgctcacgatccttggattcattgacatcttcgcaagaccagcagcgggatttgttgcaggtctgggcaaggtacgaccatactctgtgtatcttttttctttctcaatgttttttaacggactcgcagatttggctggatcaacggcaggagattatggaggattggtggttttttgcatttttttcggtatttcatacgggatggtaggcgcactacaatttgaagttctcatggctatagtaggaacacacaagttttctagtgctatcggcctagtgctattgatggaagctgttgcagttttggtggggccgccatccggtggaaagttgcttgacgcaacgcatgtgtacatgtatgtatttattctggcaggagcggaggtgctcacctcgtcccttatactacttctgggaaattttttctgtattcgtaagaaaccaaaggaaccgcaaccagaagtcgcggctgccgaggaggagaaactgcataaaccgcctgcagatagtggggtggatttgcgggaagtcgaacactttctcaaagctgaacctgagaaaaatggagaagttgttcatacacctgagacttccgtg

SEQ ID NO: 316616 - DNA, 1395 bp, Artificial Sequence
  derived and/or modified sequence
atggggggcgctgtggtcgatgagggacccactggtgtaaaagcacctgacggaggctggggatgggctgtactttttggctgttttgtcataacaggtttcagctacgcatttcccaaggccgtgtcagttttcttcaaggagctcatccaggaattcgggattggttatagtgacacagcctggatcagtagtattttgttggccatgctctacggaaccggtcctctgtgctcagtctgcgtcaacaggttcggatgtcgcccagtgatgctggttgggggactctttgcatctttgggaatggtggcggcctccttttgccggtctatcatccaggtgtaccttaccaccggagtaatcacaggccttggcttggcgttgaactttcagccaagtctgattatgcttaacaggtacttttccaaaaggcgcccaatggccaacggactcgccgccgctgggagccctgttttcctgtgcgcactctcccctctgggccagctgctgcaggatcggtacggctggaggggcggatttctgatcctggggggactcctgctgaactgttgcgtatgcgccgcacttatgcggcctctggtcgtgaccgctcagccaggttccggcccgccaaggcctagcagaagactgctggacctgtccgtgttcagggaccggggattcgtgttgtacgctgtggccgctagcgtgatggtgcttgggctgttcgtgcctccggtcttcgtcgttagttacgctaaggacctcggcgtgcctgatacaaaagccgcgttccttctgactattctcggctttattgatatctttgcccgacccgccgcgggttttgtggctgggctggggaaggtgcgaccctattccgtctacctttttagcttctccatgttctttaacgggcttgctgatctggctggatccacagctggggattatggcgggctggtcgtgttttgtattttcttcgggatttcttacggcatggtcggtgctctgcagttcgaagtgctgatggccattgtggggacccacaagtttagtagcgctatcggcctcgtgctgctgatggaggcggtcgccgtgttggttggccccccgtcaggaggcaagcttctcgacgcgacacatgtgtatatgtacgtgttcatcctggcgggagctgaggtgctgactagctcactgatcctcctgcttggaaactttttctgcatacggaaaaagcccaaggagcctcagcccgaggtggcggctgccgaagaggaaaagttgcataagccccctgccgattccggggtggatctgcgcgaagtggaacacttcctgaaagcagagcccgaaaagaatggcgaggtagtgcatacgccagaaacaagcgtc

SEQ ID NO: 316617 - DNA, 1395 bp, Artificial Sequence
  derived and/or modified sequence
atgggcggagccgtggtcgacgaaggcccaaccggagtgaaggccccggacgggggctggggatgggcagtgctgttcgggtgttttgtcataactggtttctcatacgctttcccgaaagcagtgtccgtattcttcaaagaactcatccaggagttcggaatcggatactcggacacggcctggatctcgtcgatccttctggctatgctctacggcaccgggccgctgtgcagtgtttgcgtgaacagatttggatgccgcccggtgatgctcgtgggaggcctttttgcgtcgctgggcatggtcgcggcttcgttttgccgttcaatcatccaagtctacctcactaccggggtgattactggactgggacttgccctgaattttcagccgagcctgatcatgctgaaccgctacttcagcaaacggcgtccaatggcgaatggcctcgcagccgccggctccccggtgttcctttgcgccctctcacctctgggacaactgctgcaggatagatacggctggagaggaggattcttgatccttggcggtctgctccttaattgttgtgtatgcgcggctctgatgcggccacttgtcgtgactgctcagcctgggagcggtcctccgcgcccgagtcgccggctgctcgacctgtccgtgtttagggatcggggattcgtgctttatgccgttgcggcatcggtgatggtgctggggctctttgtgcctccagtgttcgtagtgtcgtacgcgaaggatctgggagtgcccgacaccaaggccgcctttctgctgaccattcttggattcatcgacatctttgcacggccagcggcaggattcgtggctggactgggcaaagtccgcccctactcagtctatctcttctctttctcgatgttcttcaacggactggcagatctggctggatcgaccgccggagactacggcggcctcgtggtgttctgcattttcttcggtatctcctacggaatggtgggtgccctccagttcgaggtgcttatggctatcgtcgggactcacaagttctcttccgccatcggactggttctcttgatggaagcggtcgctgtcttggttggaccaccaagcgggggaaagctgctcgatgcaacccacgtgtacatgtacgtgtttatcttggccggagccgaggtcctcacgtcctcactgatcttgctgcttggcaactttttctgcattcgcaagaagccgaaggagcctcaaccggaagtggctgcggccgaggaggagaaactgcataagccgcctgcggacagcggagtggatctgagggaagtggagcatttcctgaaggccgaaccagaaaagaacggtgaagtcgtccacaccccagaaacttccgtg

SEQ ID NO: 316618 - DNA, 1395 bp, Artificial Sequence
  derived and/or modified sequence
atggggggagcggtggtcgatgaaggcccgaccggtgtcaaggcccccgacggcggttggggttgggcagtcctttttgggtgttttgtgatcactggtttctcgtatgcgttcccgaaggccgtgtccgtgttctttaaggagcttattcaagaatttggcattggttactccgatactgcatggatttccagcattctgctggctatgttgtacggtactggacctctttgctcagtgtgcgtgaataggtttggatgtaggccagtcatgctcgtcgggggactgtttgcgtccctgggaatggtggcagcctctttttgtaggtcgattatccaggtgtacctgacgaccggtgtgattacgggtcttgggctcgcactcaactttcaaccaagtctcattatgctgaaccgctacttcagcaagaggcggccgatggcaaacggactcgccgcggcaggttccccggtgtttctttgtgcactcagccccttgggccaactcctgcaagatcgctacggatggagaggagggttcctgattctcggtggactcctcctgaactgttgtgtgtgcgcggccctcatgcggccactcgtggtcaccgcccagccgggatccggtcctccgcggccttcacgccgactcctggacctttcggtgtttagagataggggatttgtgctgtacgccgtcgccgcgtcggtcatggtccttggcctttttgtccctccagtgttcgtggtgagctatgcaaaagatttgggtgtgccagatactaaggctgcatttctgctgaccattcttggttttatcgacatttttgcaagacctgcagcggggttcgtggcaggacttggcaaggtgcgtccatactcagtctaccttttcagctttagcatgtttttcaatggattggcagatcttgcaggttcgacggctggtgattacggtggtttggtggttttctgtattttctttggcatcagctacggaatggtgggagccctgcaatttgaagtgctgatggcaatcgtggggacgcacaagttctcctcagcaattgggctcgtgctccttatggaagctgtggcagtgctcgtggggcctccaagcggtggaaaactcctggatgcaactcacgtctacatgtacgtgtttattcttgccggcgctgaggttctcacctcgtccctgatccttctgctgggcaactttttctgcatcagaaagaaacctaaggaaccacagccagaggtcgccgcagcagaggaagaaaaactgcataagccccccgcagacagcggtgtcgatctgagagaagtggagcatttccttaaagctgaaccagagaaaaatggtgaagttgtccacactccagagacttcagtg

SEQ ID NO: 316619 - DNA, 1395 bp, Artificial Sequence
  derived and/or modified sequence
atgggaggcgctgtcgtggacgaaggaccaaccggagttaaggcaccagatggaggttggggctgggcagtcctgtttggatgttttgttattaccggcttctcgtacgcatttcccaaagccgtcagcgtgtttttcaaggagctgattcaagagttcggtatcgggtactccgacactgcttggattagctccatactccttgctatgctctacggaacgggtcccttgtgctcggtctgtgtcaataggtttggctgcagacccgtgatgcttgttggaggacttttcgcttcgcttggaatggtggcagcctcgttttgtagaagcattatacaggtatatctgactaccggagtgatcaccgggttggggctcgcattgaattttcagccgtcactgataatgcttaacagatacttttcgaaacgacgaccgatggcgaacggccttgcagcggcagggtcccctgtgtttctgtgtgctctctcgccactgggtcaactgcttcaagaccggtacgggtggcggggtgggtttctcattctgggcgggcttctgctgaactgttgcgtgtgtgcagctcttatgaggcctctcgtcgtgaccgcccagcctggttcaggacctccacggcctagtcgaagattgcttgatctttccgtattcagggatcgcggcttcgtcctctacgcggtggccgcatcggtcatggtcctcggacttttcgtgcctcccgtctttgtggtaagttatgcaaaagatctcggtgtgccagatactaaggcagcatttctgttgaccatcctcggattcattgatatctttgcacgccctgccgcaggctttgttgcaggactgggaaaggtgcgtccttactctgtgtacctcttctccttttcaatgtttttcaatggacttgccgaccttgcgggatctactgcaggcgattacggcggtctggtggtgttttgcatattctttggaatttcctacgggatggtgggagcgctgcaatttgaggtgttgatggcaattgtcggaactcacaaattctcttccgccattgggctcgtgttgctgatggaggcagttgcagtgcttgtgggtcctccgtcgggcggtaagctgctcgacgcgacccatgtctacatgtacgtgtttatcctggcgggagcggaagtgctgaccagctcccttatcctgcttttgggtaacttcttctgtattcgtaaaaagccgaaagaaccacagccagaagtcgcagccgcagaagaggaaaagctccacaagcccccagcagactccggagtggatcttagagaagtggaacatttcctgaaggcagaacctgaaaagaacggggaagtggtgcatacgcccgagacttccgtg

SEQ ID NO: 316620 - DNA, 1395 bp, Artificial Sequence
  derived and/or modified sequence
atgggaggtgccgtcgtagacgagggacctaccggggtgaaggcccctgacggaggctgggggtgggctgtgctctttggttgcttcgtcattactgggttcagttatgcatttccaaaggccgtgtctgttttcttcaaggagcttatccaggagttcggcatcggatattctgacactgcttggatctctagcatccttctagccatgctatatgggaccgggccgctgtgttcagtctgcgtaaaccgtttcggctgtcggcctgtaatgctagtcggcgggctctttgccagcctgggcatggtagcagcctccttctgtcggtccatcatccaggtatacctgacgaccggggtgatcaccggtctaggcctggccttgaatttccagcctagtctaattatgcttaatcggtacttctcaaagcggcgacccatggcaaacggcctggccgcagctggatcgccagtattcctctgtgccctcagtcccctcggccaactacttcaagacagatacggctggagaggtggattcctgattctgggtgggcttcttctgaattgctgtgtgtgcgcagccttgatgcgacctctggtcgtgacggctcaacccggcagcggcccgcctaggccaagccgcagactgctggacctcagcgtctttagagacaggggctttgtgctgtacgcagtggcggcatctgtaatggtactggggttatttgtgcctcctgtcttcgtggtcagctacgccaaggatctgggcgttcccgataccaaggcggcgtttctcctcacgatccttggcttcatcgatatcttcgcacgacctgccgctggttttgttgcaggattaggaaaggttagaccatatagcgtgtacttattctcttttagcatgttcttcaatggcctggcggatcttgcagggagtactgctggagattacggaggcttggtggtgttttgtattttctttgggattagttacggcatggtcggggccctgcaattcgaggtcctgatggccattgttggaacccataaattttcttcggccattgggttggtactgctgatggaagccgtcgcggtccttgtcgggccaccctccggagggaagttgctggatgctacccacgtgtacatgtacgtgttcatcctggctggagcggaagtgcttacatcaagcctgatcctgttactcggcaacttcttctgtatccgaaaaaagcctaaggagccacagcccgaagtggctgccgccgaggaggagaaactgcataagcctcctgcagatagcggggtagacctgcgagaggtggagcatttcctgaaggcggaacccgaaaagaacggcgaggtggtgcacacaccggaaacatccgtg

SEQ ID NO: 316621 - DNA, 1395 bp, Artificial Sequence
  derived and/or modified sequence
atgggaggggccgtggtggacgagggacctaccggcgtgaaagcccctgatgggggctggggctgggcagtcttgttcgggtgctttgtgataacggggtttagttatgcctttccaaaggctgtttccgtgttctttaaagagctcattcaagagtttgggatcggatattccgatacggcttggattagctctatcctgctggccatgctctacggaaccggacccctttgctctgtgtgcgtcaatcgcttcggttgtagacccgtgatgcttgtgggtggtctgttcgcctcactgggaatggtggccgcatccttttgtaggagtatcatccaggtgtacctcacaacaggagtgattactgggctcggcctggccctgaatttccagccatccctgatcatgctgaacagatatttcagcaagagacggcccatggccaacggcctggctgcagctggcagtccggtctttctctgtgccctgtctcccctgggccaattgctgcaggatcgatacggatggaggggcggcttcttgattctgggcggtctcctcctgaactgctgtgtctgcgctgccttgatgagaccattggtggtgacagcccaacccggctctggacctccacgcccctctagaaggctcctggatctttctgtgttcagggatcgaggcttcgtgctgtacgccgttgcggctagcgtcatggtcctcggcctgttcgtgccaccggtgtttgtcgtgagttacgctaaggacctgggtgtgccggacactaaagccgccttccttctcaccatactgggctttatcgatattttcgcccggccggccgccggtttcgtggctgggctgggcaaggttaggccttatagcgtgtatttgttctccttcagtatgtttttcaacgggctggccgacctggccggatcaacagcaggggattatggtggtctcgtggtgttctgcatcttctttggcatttcttacggtatggttggggcccttcaattcgaagtgctcatggctatcgtggggacccacaagttctcctctgcaatcggccttgtgctcctcatggaggccgtggctgtgctcgttggcccaccctccggcggtaaactccttgatgccacacacgtctatatgtatgtgtttattctggccggagccgaagtgttgaccagctccctgatcctgttgctggggaacttcttctgtatcagaaagaagccaaaagagcctcagcccgaagtcgcggcagctgaagaggaaaagctgcacaagccacctgcagactcaggcgtcgacttgcgcgaggttgagcatttcctgaaggctgaacccgaaaaaaatggggaggttgtccacacgcccgagacgagtgtt

SEQ ID NO: 316622 - DNA, 1395 bp, Artificial Sequence
  derived and/or modified sequence
atgggcggcgctgtggttgacgaagggcccacaggcgtcaaagccccggatggaggttggggttgggccgtgctgttcggatgctttgtaattacgggattctcgtacgctttccccaaagctgtgtccgtatttttcaaagagcttattcaggagttcggcattggttatagcgataccgcttggattagcagtatactcctggccatgctgtatggcacaggcccgctatgcagtgtctgtgtgaaccgcttcggttgcaggccagtcatgttggtgggtggactgttcgcctccttaggcatggtagccgccagcttctgccgcagcataattcaggtgtacctgactacaggcgtaataaccggattgggactggcgctgaacttccagccctccctgatcatgctgaaccgctactttagcaagcgacgccccatggccaatggtctggcagcagctggctcccccgtctttttatgcgccctgtcaccgttaggccagctgcttcaagatcgatatggatggcggggcggttttctgattctgggaggtttgctgctgaactgttgcgtatgcgctgccttgatgcgcccccttgtagtgaccgcacagcctggcagtgggccgccgcgcccctcccgccgactgctggacctcagcgtgttccgtgaccgtggatttgtactgtacgcggtggcggcgtccgttatggtgttaggcttgttcgtccccccggtgtttgtagtcagctacgccaaggacttgggcgtgccggataccaaggcagccttcctgctgaccattttaggattcatcgatatttttgcacgcccagcagctggatttgtggccggcttgggtaaggtccgaccatatagcgtgtaccttttttcattctcgatgttttttaacggcctggcggatctggctggctctactgcaggcgactacggtggtctggtggttttttgtattttcttcggtataagttacggtatggtgggagccctgcagttcgaagtgcttatggccatagtggggactcataagttcagctcggcaatcggtctcgtgctgctgatggaagcagtcgctgtgctcgtcggcccgccctcgggaggtaagttgttagacgccacccacgtttatatgtacgtgttcatcctcgctggtgccgaggtgttgacgagtagccttattctgttgctcggcaatttcttctgcattcgcaagaagcccaaggagccacaacctgaggtcgctgccgccgaggaggagaagttgcacaaaccacccgctgactccggcgtggacctccgggaggtggagcacttcctgaaggccgagcctgaaaagaatggcgaagtcgtccacaccccggagacgtcggta

SEQ ID NO: 316623 - DNA, 1395 bp, Artificial Sequence
  derived and/or modified sequence
atgggcggcgccgtggtcgatgaaggaccgactggagttaaggccccagacggcgggtggggctgggccgttctcttcgggtgctttgtgatcacgggtttttcctacgcatttcccaaagcagtgtccgtgttctttaaagagcttatccaagaattcggcatcggctattccgacactgcatggatctcttcaatcctgctggctatgctgtatggcactggcccactctgttctgtgtgtgtaaaccgattcggctgccgccccgtgatgctggttggcggtctcttcgcaagtttggggatggtggccgcatctttttgtcgctctatcatccaggtgtacctgacaacgggggtaatcactggcctgggccttgccttgaacttccagccaagtctgataatgctgaatagatacttctctaagcggcgcccaatggctaatggactggcggccgcggggagccccgtgttcctgtgcgccctctccccactgggtcagctgcttcaggaccgatatggttggcggggggggtttttgattctgggaggattgttgctcaattgctgtgtgtgcgccgcactcatgagaccgctggtggtgaccgcccagccgggctctggtccaccacggccatctcggcggctgctcgatctgtccgtctttcgagatagaggcttcgtcctttatgctgtggcagcttcagtgatggtcttggggttgtttgtccccccagtgttcgtcgtgagttacgccaaggatctgggagtgcctgacactaaggcagccttcctgttgacaattctgggctttatcgacatcttcgccagacctgctgctggcttcgtggccggtctcggaaaggtgagaccttatagcgtgtatctcttttccttttccatgtttttcaatggcttggctgatttggctggcagcacagctggtgactacggaggtttggtggtcttctgtatattttttggcatcagctatgggatggtgggcgcgctgcaattcgaggtcctcatggccatcgtcggcacacacaagttcagctctgccattggtctcgtcctgctgatggaggctgtggcggtgttggtggggcctccttctggagggaagttgctggatgcaacgcatgtctacatgtacgtgttcattctcgctggggctgaggtgctgacctcatctctgatcttgctcctgggtaactttttctgtatccgcaaaaagcccaaagaacctcaacctgaagtggccgccgccgaggaagaaaagctgcacaagccaccggctgattccggtgtggatctgcgagaagtcgaacacttcctcaaggccgagcccgagaaaaatggggaggtggtccacacgcctgaaacgagcgtg

SEQ ID NO: 316624 - DNA, 1395 bp, Artificial Sequence
  derived and/or modified sequence
atgggcggcgcggtggtggacgaaggacctacaggagtcaaagcccctgatgggggctggggctgggcggttcttttcgggtgtttcgtgataacaggcttttcctatgcatttcctaaagcagtatccgtgtttttcaaagaactgattcaagaattcggcattgggtattcagatacggcatggatatctagcattctgctggccatgctgtatggaaccggcccactctgctccgtgtgcgttaacaggttcggatgcagaccggtgatgctcgttggcggattatttgcttcacttggtatggttgcagcctcattttgtaggtctatcattcaggtctatctgaccacaggcgtaatcactgggcttgggctggcattgaactttcaaccctctttgattatgctgaaccgctatttctccaagcggagaccgatggctaacggtttagcagccgctgggtccccagtgtttttgtgcgcccttagtcccctaggacagctgctgcaagaccggtacggctggaggggaggtttcctgatcctcggcggcttgctcctgaactgttgcgtatgcgccgcactgatgcgcccgctcgtggtgacagcacagcccggttcaggccctccaaggccgtctcgccgcctcctggatctttccgtttttagagataggggcttcgtactctacgctgtggctgcaagtgtgatggtgctgggcctgtttgtacccccagtgtttgtcgtttcttatgctaaagatctcggagttcctgatacaaaggccgcgtttctattaaccatactgggcttcatagacatttttgcacgtcccgccgccgggtttgtagcaggattgggtaaggtgcggccctattccgtgtaccttttttcgtttagcatgtttttcaatgggctggctgacctggccggctccactgccggagattatggaggattggtagttttctgtatcttcttcggcatctcatacggcatggtaggcgccctccagttcgaagtactcatggctatcgtcggtactcataaattttcttctgcaattggcttggtgctcctgatggaggccgtggctgtgctcgtgggcccaccttctggcgggaagctccttgacgcaacccatgtctatatgtatgtcttcatcctggcaggcgccgaggtgctgacatccagtctcattctgctactcgggaattttttctgtattcggaaaaagccgaaggagccgcagcccgaagttgctgccgcggaggaagaaaagcttcacaagccgcccgcggacagcggggttgacctgcgggaggtggaacactttcttaaagctgagcctgagaagaatggagaggtcgtccacaccccggaaacatcagtg

SEQ ID NO: 316625 - DNA, 1395 bp, Artificial Sequence
  derived and/or modified sequence
atgggcggcgccgtggtcgacgaaggccccacaggggtcaaagcccccgatggcggctggggctgggcggttctgtttgggtgtttcgtgataacaggattttcatatgccttccctaaggccgtctcagtgttttttaaggagcttatccaggagttcggaatcggatactccgacaccgcctggattagctctatcctcctggccatgctttatggcacgggacccctatgctccgtgtgcgtgaaccgcttcggatgtaggcccgtaatgttggtcgggggcctgtttgctagtctggggatggtggccgcgtcattctgtagatctataatccaggtttacctcacaaccggggtcattacaggcctggggcttgccctcaacttccagccaagcttgatcatgctgaacaggtactttagcaagcgccggcccatggccaatggacttgcggcggctggctctcccgtcttcttgtgcgccctctcccctttgggtcagctgctgcaggacagatatggctggagaggcggattccttatcttgggaggactgctcttgaactgctgtgtgtgcgccgctctgatgaggcctttggtcgtcaccgcacagcccggttcaggaccccctagaccctccaggcgccttttggacctctctgtttttcgggatcggggctttgtgctgtacgccgtggccgccagtgtcatggtgctggggctgtttgtgcctcccgtgtttgtcgtgtcttatgccaaggaccttggtgtgcccgacacaaaagccgcatttctgcttactatactggggttcatcgacatcttcgccagaccagccgctggcttcgtggccggacttggcaaagtgcgtccttacagtgtgtacctattttccttcagtatgttttttaatggcctcgcagacctggcgggaagcaccgctggtgattacggagggctcgtcgtcttttgcattttttttggcatttcttatggaatggtgggagctttgcagtttgaagtactgatggccatagtgggaactcacaagttcagctctgcaatcggcctggtcctgctcatggaggctgttgcggtgctggtggggcccccttctggcgggaagttgctggatgctacccacgtgtacatgtatgtgtttatcctagccggggccgaggtgctcacttcatccctcattctgctgttggggaattttttctgcatccggaagaagcccaaggagccgcagcccgaggtggcagcagccgaagaggagaagctgcacaagcctcctgcggattctggcgtggaccttcgggaggtggaacacttcttaaaagctgaacccgagaagaacggcgaggtcgtccacactcctgagacaagcgta

SEQ ID NO: 316626 - DNA, 1395 bp, Artificial Sequence
  derived and/or modified sequence
atgggcggcgcggtggttgatgagggccccacaggagtcaaggcacctgacggagggtggggctgggccgtcctgttcgggtgtttcgtcataaccggcttcagttacgcattcccaaaggcagtcagtgtgttcttcaaggagctgattcaggagttcggaatcggctattccgacaccgcctggattagtagcatcctgctagccatgctctacggtacgggccccctgtgctcagtgtgcgtcaacaggttcggttgcagaccggtgatgctggtgggggggctattcgccagtctggggatggttgccgccagcttttgccggtcgatcatacaggtttacctaactaccggcgttatcaccgggttgggattggcgctcaactttcagccatccctgatcatgctcaacaggtacttcagtaaacggcgtccaatggcaaatgggctggccgctgccggaagcccagtttttctgtgcgcactatcgccattgggtcaactattgcaggacagatatggatggcgtggcggctttctcatcctgggaggcctcctcctgaattgttgtgtgtgtgccgcactgatgcgccccctggtggtgacagctcaaccgggctccggacccccccgtccttcccggcggctgctcgatctgtctgtattccgggaccgaggtttcgtcctgtatgctgttgccgcctctgtgatggtgcttggcttattcgtcccaccagtgtttgtagtgagttacgctaaggatcttggtgtccctgataccaaagccgctttcctccttaccatcctcggtttcattgacatcttcgctcggcccgctgcaggctttgtggcgggtctgggtaaggtaagaccgtactcggtatacttattcagtttctccatgttttttaatgggctggccgatctcgccggttcgacggcgggagactacggtggcctggttgtcttttgtattttttttggcatatcttacggaatggttggagccttacagtttgaagtgttgatggccatcgtgggcactcacaagtttagctcagcaattggcctggttctacttatggaagcagtggcggttttagtgggacctcctagtggcggaaagcttctcgatgctacacatgtttacatgtatgtgttcatcttagcaggggccgaggttctcacgtcttcattgatcttgttgctgggaaactttttctgcatcaggaaaaaacctaaggagcctcagccggaagtggcggccgccgaggaggaaaagctgcacaagccgcctgccgattctggtgtggacctgcgcgaggtcgagcactttctgaaagcagagccagagaaaaacggtgaagtagtccatacacctgagacctccgtc

SEQ ID NO: 316627 - DNA, 1395 bp, Artificial Sequence
  derived and/or modified sequence
atggggggcgccgtggttgacgagggccctacaggcgtgaaagctcctgacggcgggtggggatgggccgttctgttcggctgtttcgtgattacaggattctcctatgcgtttccgaaagccgttagtgtttttttcaaagaactgattcaggaatttggtatcggatatagtgatacggcctggatctcgtctatacttcttgccatgctctatgggactggtcctttgtgtagtgtctgtgttaacaggtttggatgtcgcccagtaatgcttgtggggggactgttcgcaagtctgggcatggtggcggcctcgttttgtaggtctatcatccaggtttatctgactaccggagtaatcaccggtctaggcctggcgctgaatttccaaccctcactgatcatgcttaatcggtatttttccaagagaaggccgatggccaatggcctggcagccgctgggagccccgtgtttctctgtgcactgtctcccctggggcagctgctgcaggaccgctatggctggcggggagggttccttatactgggcggcctactcctgaattgctgcgtttgcgccgccctgatgaggccattggtggtcaccgcccagccaggaagcgggcctcctcgcccatcccgacgactcctcgacctgtctgtctttagagacagaggtttcgtactgtacgccgtggccgcctctgtcatggtcctggggctcttcgttccacccgtgttcgtcgtgtcctacgctaaagacctcggagttccagacacaaaagcagccttcctcctgaccatactggggtttatcgacatttttgctcgtcctgcggccggtttcgtggccgggctgggcaaggtaaggccgtactctgtgtatttattctctttctcaatgttttttaacggtcttgccgacctggcagggtctacagctggagattatgggggtttggtggtgttttgtatcttcttcggcataagctatggaatggtcggggctctccaattcgaggtgctcatggcaattgtgggcacccacaaattctcctcggcaattggtctggtgctcctaatggaggctgtagccgttctggttggaccaccctcgggcggcaagctgcttgacgctacacatgtgtacatgtacgtttttatcttggccggtgccgaggtgctaacctctagtctgatcctgcttctgggcaatttcttctgcatcagaaagaaacctaaagaaccgcaacctgaggttgcagcagccgaggaggagaaactgcacaagccacccgcagatagcggcgtggacctgcgagaagtggagcactttctaaaagcagaacccgagaaaaatggcgaagtggtccatacaccagagaccagcgtc

SEQ ID NO: 316628 - DNA, 4830 bp, Artificial Sequence
  derived and/or modified sequence
tccttggccttgcatggcctgtttatttttaaaagtgcaaacttgcaaccccaaacaagctggggccctgaggccgtcaacccctccagtctcccctgtgacccgcagtctgcgtcctgttcccagtttcattcctcaagtgcatatatttttatttttttattttttttttgagacagagtctcgctctgtggcccaggttggagcgcagtcgcgcgatctcggctcactgcaagctctgcctcctgggttcacgccattctcctgcctcagcctcccgagtagctgggactacaggcgcctgccactgcgcccagctaattttttttatttttagtagagacggggtttcaccgtgttagccaggatggtctcgatctcctgacctcgtgatccgcccgccttggccccccaaagtgctgggattacaggcgtgagccaccgcgcccggcctcagtgcatatatttttaatatcttgtagttaccctgctgtatactgtcatcttagggaccttttaaacaataccagtatgagcgggacctaccctgctgctcagtgaccccaggcagtgtgtcctaaggtggtgtgtcctgaggcgtgcgacactctgtcctgtcccaggcactgtggtgggggcatccggtgtccaggtgcagaggcaaaagctgctcccgggtttcccagaaatggttccgaggcctgggtcccagagagccagtgcaggttggggggtggacctctggctctgtgggggggtctgttctgctccagtgggccgtgtctgccttgtcatcatccagacagccacagctggctcctgggtcccctcgtcaagcagcatttcccagtaacagtgacttcgtggaacacttaggaagcccttaaaaaccatcctcggacctctgaggcagggactccagggggcacagcacctgtggtggggacaggcaggcaggctggatgcggggagggcccgggaggaggagtgaggagccacgcacggaactgctcagactctcccagcaaaggtcctggcccttgtgcatgcctttagttacatgtctgccttagaggcaaagacgagccgtcacgggggacccaccgggtcaggggtctgcggacacgcttgcaggaggaacccaaggaaagggggtgggggtggagccccacagattgcgtcgtgggtgggcgtggagcttgcacagcaggcctgctgctgcctcccagggcgctggttcacagcacggtcccagcagggagaggctgagccggttggactagaccacccaaggtctcaggttgcagctccctggtgaggagaggacaaggtgacttctgggtggggtggggcatgaagatggaagtctgacctcgggttccaacttgactcaaacgagctgagctcctggagtttagaaagggacaccagcttcagacatcgtgggggctggcatggtttgctctcgtgggctggatgggagcctccctagcccctcctgatttcaggctgcagcctatgggtcactccaggcacaggtggggtgagtcaagatctcactggaggagtcactgagcaagagggccggtgggaggcaagggggcatccagggacaaggggccagctctgcccccacttccccaccccacccactctaatactgcagcccctgtgcttccaactgccccctccagcctggggcccagcccctcaccgccagagactgcccgcctcctcttgggcaagctcctggtgggctccactgaagccaaagtgggcccttgggggcaggagagccagagcaaggcacgctccacctagatttagaccgggagagacctggaggatgccaaccccagaggtcctggggcgagctcagtgctggggaccggaggtgccgtctgctgccagaatcatggtgtgcgtggtccctgcccagcacgggtcagccagagcgagccagggcagaaatgacggccaggtcgatgttcctgtcgggggctgcttgtcccaggaggtaatctgagtcctggccgagcccaaaaaagccactgccctttagagccagctgtgagggtgcaggaggcagtgcagagggagtgggacccacagctgctagcctccctccaaaccctcctgcctccaccagacaccaggtcagggggccacaagtgtgggtgccgggcagctgcccctcagctgagctgccgggccacccagctcgtgtccctcccctgccaggctgcagctgggatggtcacccgggcagcctgagtcagcctgctttctctctcaggtgaggcggaaccaaccctcctggccatgggaggggccgtggtggacgagggccccacaggcgtcaaggcccctgacggcggctggggctgggccgtgctcttcggctgtttcgtcatcactggcttctcctacgccttccccaaggccgtcagtgtcttcttcaaggagctcatacaggagtttgggatcggctacagcgacacagcctggatctcctccatcctgctggccatgctctacgggacaggtccgctctgcagtgtgtgcgtgaaccgctttggctgccggcccgtcatgcttgtggggggtctctttgcgtcgctgggcatggtggctgcgtccttttgccggagcatcatccaggtctacctcaccactggggtcatcacggggttgggtttggcactcaacttccagccctcgctcatcatgctgaaccgctacttcagcaagcggcgccccatggccaacgggctggcggcagcaggtagccctgtcttcctgtgtgccctgagcccgctggggcagctgctgcaggaccgctacggctggcggggcggcttcctcatcctgggcggcctgctgctcaactgctgcgtgtgtgccgcactcatgaggcccctggtggtcacggcccagccgggctcggggccgccgcgaccctcccggcgcctgctagacctgagcgtcttccgggaccgcggctttgtgctttacgccgtggccgcctcggtcatggtgctggggctcttcgtcccgcccgtgttcgtggtgagctacgccaaggacctgggcgtgcccgacaccaaggccgccttcctgctcaccatcctgggcttcattgacatcttcgcgcggccggccgcgggcttcgtggcggggcttgggaaggtgcggccctactccgtctacctcttcagcttctccatgttcttcaacggcctcgcggacctggcgggttctacggcgggcgactacggcggcctcgtggtcttctgcatcttctttggcatctcctacggcatggtgggggccctgcagttcgaggtgctcatggccatcgtgggcacccacaagttctccagtgccattggcctggtgctgctgatggaggcggtggccgtgctcgtcgggcccccttcgggaggcaaactcctggatgcgacccacgtctacatgtacgtgttcatcctggcgggggccgaggtgctcacctcctccctgattttgctgctgggcaacttcttctgcattaggaagaagcccaaagagccacagcctgaggtggcggccgcggaggaggagaagctccacaagcctcctgcagactcgggggtggacttgcgggaggtggagcatttcctgaaggctgagcctgagaaaaacggggaggtggttcacaccccggaaacaagtgtctgagtggctgggcggggccggcaggcacagggaggaggtacagaagccggcaacgcttgctatttattttacaaactggactggctcaggcagggccacggctgggctccagctgccggcccagcggatcgtcgcccgatcagtgttttgagggggaaggtggcggggtgggaaccgtgtcattccagagtggatctgcggtgaagccaagccgcaaggttacaaggcatcctcaccaggggccccgcctgctgctcccaggtggcctgcggccactgctatgctcaaggacctggaaacccatgcttcgagacaacgtgactttaatgggagggtgggtgggccgcagacaggctggcagggcaggtgctgcgtggggccctctccagcccgtcctaccctgggctcacatggggcctgtgcccacccctcttgagtgtcttggggacagctctttccacccctggaagatggaaataaacctgcgtgtgggtggagtgttaggaccaacggtttcctaggagtatgtggttttgctgtgtggcctgtgtcctgactcgcacgtctgctgatggcctggctgttcctaccgtggctctgtcctcgccagctttccctgcagcggcatagcattcgtagcaggggcaggcgctgcatggagggggctgcggggcaggtgcctggaggccgctgtgccagggtggcctctgaaatgtgccagggagcccctacgtggtggttagatgggagctgaggtggaacaagccactttattcactgctgtgtttaagaaacaggaccctcctgccttccctttttcgcccctctgcctggctggcagtgtgcgtggtgtggtcagtgcccagggctggtctttgcaccctgtcctccatccagcccggcccagcgcttgggcttgtcctggacacctaacacccacctgccctcgtggccagcagtggcctgcgtggctgggagcccggtcagaggccgccggggccctcagtaggtgcgtcgtgggcgctggggacggcagcgggtgccctggcgggccgcgtgcagccggagagatgccatgtccctgctcctctgcaatgaaaagcaagcgaaaag

SEQ ID NO: 316629 - DNA, 2002 bp, Artificial Sequence
  derived and/or modified sequence
ggagcggaccggcagaggcgggcagaggcggcgagaggcggcgagaggcgggctgaggcggcccagcggcggcaggtgaggcggaaccaaccctcctggccatgggaggggccgtggtggacgagggccccacaggcgtcaaggcccctgacggcggctggggctgggccgtgctcttcggctgtttcgtcatcactggcttctcctacgccttccccaaggccgtcagtgtcttcttcaaggagctcatacaggagtttgggatcggctacagcgacacagcctggatctcctccatcctgctggccatgctctacgggacaggtccgctctgcagtgtgtgcgtgaaccgctttggctgccggcccgtcatgcttgtggggggtctctttgcgtcgctgggcatggtggctgcgtccttttgccggagcatcatccaggtctacctcaccactggggtcatcacggggttgggtttggcactcaacttccagccctcgctcatcatgctgaaccgctacttcagcaagcggcgccccatggccaacgggctggcggcagcaggtagccctgtcttcctgtgtgccctgagcccgctggggcagctgctgcaggaccgctacggctggcggggcggcttcctcatcctgggcggcctgctgctcaactgctgcgtgtgtgccgcactcatgaggcccctggtggtcacggcccagccgggctcggggccgccgcgaccctcccggcgcctgctagacctgagcgtcttccgggaccgcggctttgtgctttacgccgtggccgcctcggtcatggtgctggggctcttcgtcccgcccgtgttcgtggtgagctacgccaaggacctgggcgtgcccgacaccaaggccgccttcctgctcaccatcctgggcttcattgacatcttcgcgcggccggccgcgggcttcgtggcggggcttgggaaggtgcggccctactccgtctacctcttcagcttctccatgttcttcaacggcctcgcggacctggcgggttctacggcgggcgactacggcggcctcgtggtcttctgcatcttctttggcatctcctacggcatggtgggggccctgcagttcgaggtgctcatggccatcgtgggcacccacaagttctccagtgccattggcctggtgctgctgatggaggcggtggccgtgctcgtcgggcccccttcgggaggcaaactcctggatgcgacccacgtctacatgtacgtgttcatcctggcgggggccgaggtgctcacctcctccctgattttgctgctgggcaacttcttctgcattaggaagaagcccaaagagccacagcctgaggtggcggccgcggaggaggagaagctccacaagcctcctgcagactcgggggtggacttgcgggaggtggagcatttcctgaaggctgagcctgagaaaaacggggaggtggttcacaccccggaaacaagtgtctgagtggctgggcggggccggcaggcacagggaggaggtacagaagccggcaacgcttgctatttattttacaaactggactggctcaggcagggccacggctgggctccagctgccggcccagcggatcgtcgcccgatcagtgttttgagggggaaggtggcggggtgggaaccgtgtcattccagagtggatctgcggtgaagccaagccgcaaggttacaaggcatcctcaccaggggccccgcctgctgctcccaggtggcctgcggccactgctatgctcaaggacctggaaacccatgcttcgagacaacgtgactttaatgggagggtgggtgggccgcagacaggctggcagggcaggtgctgcgtggggccctctccagcccgtcctaccctgggctcacatggggcctgtgcccacccctcttgagtgtcttggggacagctctttccacccctggaagatggaaataaacctgcgtgtgggtggagtgttagga

SEQ ID NO: 316630 - DNA, 2033 bp, Artificial Sequence
  derived and/or modified sequence
ggccactgcacggacccagggaacgggctgacagtccagcagaggcctcagcgaggcggcggcgctgcgcacaaacctgaggacctaggcgggtgaggcggaaccaaccctcctggccatgggaggggccgtggtggacgagggccccacaggcgtcaaggcccctgacggcggctggggctgggccgtgctcttcggctgtttcgtcatcactggcttctcctacgccttccccaaggccgtcagtgtcttcttcaaggagctcatacaggagtttgggatcggctacagcgacacagcctggatctcctccatcctgctggccatgctctacgggacaggtccgctctgcagtgtgtgcgtgaaccgctttggctgccggcccgtcatgcttgtggggggtctctttgcgtcgctgggcatggtggctgcgtccttttgccggagcatcatccaggtctacctcaccactggggtcatcacggggttgggtttggcactcaacttccagccctcgctcatcatgctgaaccgctacttcagcaagcggcgccccatggccaacgggctggcggcagcaggtagccctgtcttcctgtgtgccctgagcccgctggggcagctgctgcaggaccgctacggctggcggggcggcttcctcatcctgggcggcctgctgctcaactgctgcgtgtgtgccgcactcatgaggcccctggtggtcacggcccagccgggctcggggccgccgcgaccctcccggcgcctgctagacctgagcgtcttccgggaccgcggctttgtgctttacgccgtggccgcctcggtcatggtgctggggctcttcgtcccgcccgtgttcgtggtgagctacgccaaggacctgggcgtgcccgacaccaaggccgccttcctgctcaccatcctgggcttcattgacatcttcgcgcggccggccgcgggcttcgtggcggggcttgggaaggtgcggccctactccgtctacctcttcagcttctccatgttcttcaacggcctcgcggacctggcgggttctacggcgggcgactacggcggcctcgtggtcttctgcatcttctttggcatctcctacggcatggtgggggccctgcagttcgaggtgctcatggccatcgtgggcacccacaagttctccagtgccattggcctggtgctgctgatggaggcggtggccgtgctcgtcgggcccccttcgggaggcaaactcctggatgcgacccacgtctacatgtacgtgttcatcctggcgggggccgaggtgctcacctcctccctgattttgctgctgggcaacttcttctgcattaggaagaagcccaaagagccacagcctgaggtggcggccgcggaggaggagaagctccacaagcctcctgcagactcgggggtggacttgcgggaggtggagcatttcctgaaggctgagcctgagaaaaacggggaggtggttcacaccccggaaacaagtgtctgagtggctgggcggggccggcaggcacagggaggaggtacagaagccggcaacgcttgctatttattttacaaactggactggctcaggcagggccacggctgggctccagctgccggcccagcggatcgtcgcccgatcagtgttttgagggggaaggtggcggggtgggaaccgtgtcattccagagtggatctgcggtgaagccaagccgcaaggttacaaggcatcctcaccaggggccccgcctgctgctcccaggtggcctgcggccactgctatgctcaaggacctggaaacccatgcttcgagacaacgtgactttaatgggagggtgggtgggccgcagacaggctggcagggcaggtgctgcgtggggccctctccagcccgtcctaccctgggctcacatggggcctgtgcccacccctcttgagtgtcttggggacagctctttccacccctggaagatggaaataaacctgcgtgtgggtggagtgttaggaccaacggtttccta

SEQ ID NO: 316631 - DNA, 2054 bp, Artificial Sequence
  derived and/or modified sequence
cggaagttcagggagggcgaggccgtgccccacatccaggcagcgcaggccgcgggccgctcccctagccaggaagagccgccgtccgcaccgggaccggagaggaagcggaggtgaggcggaaccaaccctcctggccatgggaggggccgtggtggacgagggccccacaggcgtcaaggcccctgacggcggctggggctgggccgtgctcttcggctgtttcgtcatcactggcttctcctacgccttccccaaggccgtcagtgtcttcttcaaggagctcatacaggagtttgggatcggctacagcgacacagcctggatctcctccatcctgctggccatgctctacgggacaggtccgctctgcagtgtgtgcgtgaaccgctttggctgccggcccgtcatgcttgtggggggtctctttgcgtcgctgggcatggtggctgcgtccttttgccggagcatcatccaggtctacctcaccactggggtcatcacggggttgggtttggcactcaacttccagccctcgctcatcatgctgaaccgctacttcagcaagcggcgccccatggccaacgggctggcggcagcaggtagccctgtcttcctgtgtgccctgagcccgctggggcagctgctgcaggaccgctacggctggcggggcggcttcctcatcctgggcggcctgctgctcaactgctgcgtgtgtgccgcactcatgaggcccctggtggtcacggcccagccgggctcggggccgccgcgaccctcccggcgcctgctagacctgagcgtcttccgggaccgcggctttgtgctttacgccgtggccgcctcggtcatggtgctggggctcttcgtcccgcccgtgttcgtggtgagctacgccaaggacctgggcgtgcccgacaccaaggccgccttcctgctcaccatcctgggcttcattgacatcttcgcgcggccggccgcgggcttcgtggcggggcttgggaaggtgcggccctactccgtctacctcttcagcttctccatgttcttcaacggcctcgcggacctggcgggttctacggcgggcgactacggcggcctcgtggtcttctgcatcttctttggcatctcctacggcatggtgggggccctgcagttcgaggtgctcatggccatcgtgggcacccacaagttctccagtgccattggcctggtgctgctgatggaggcggtggccgtgctcgtcgggcccccttcgggaggcaaactcctggatgcgacccacgtctacatgtacgtgttcatcctggcgggggccgaggtgctcacctcctccctgattttgctgctgggcaacttcttctgcattaggaagaagcccaaagagccacagcctgaggtggcggccgcggaggaggagaagctccacaagcctcctgcagactcgggggtggacttgcgggaggtggagcatttcctgaaggctgagcctgagaaaaacggggaggtggttcacaccccggaaacaagtgtctgagtggctgggcggggccggcaggcacagggaggaggtacagaagccggcaacgcttgctatttattttacaaactggactggctcaggcagggccacggctgggctccagctgccggcccagcggatcgtcgcccgatcagtgttttgagggggaaggtggcggggtgggaaccgtgtcattccagagtggatctgcggtgaagccaagccgcaaggttacaaggcatcctcaccaggggccccgcctgctgctcccaggtggcctgcggccactgctatgctcaaggacctggaaacccatgcttcgagacaacgtgactttaatgggagggtgggtgggccgcagacaggctggcagggcaggtgctgcgtggggccctctccagcccgtcctaccctgggctcacatggggcctgtgcccacccctcttgagtgtcttggggacagctctttccacccctggaagatggaaataaacctgcgtgtgggtggagtgttaggaccaacggtttccta

SEQ ID NO: 316632 - DNA, 1395 bp, Artificial Sequence
  derived and/or modified sequence
atgggcggcgccgtggtggacgagggccccaccggcgtgaaggcccccgacggcggctggggctgggccgtgctgttcggctgcttcgtgatcaccggcttcagctacgccttccccaaggccgtgagcgtgttcttcaaggagctgatccaggagttcggcatcggctacagcgacaccgcctggatcagcagcatcctgctggccatgctgtacggcaccggccccctgtgcagcgtgtgcgtgaaccgcttcggctgccgccccgtgatgctggtgggcggcctgttcgccagcctgggcatggtggccgccagcttctgccgcagcatcatccaggtgtacctgaccaccggcgtgatcaccggcctgggcctggccctgaacttccagcccagcctgatcatgctgaaccgctacttcagcaagcgccgccccatggccaacggcctggccgccgccggcagccccgtgttcctgtgcgccctgagccccctgggccagctgctgcaggaccgctacggctggcgcggcggcttcctgatcctgggcggcctgctgctgaactgctgcgtgtgcgccgccctgatgcgccccctggtggtgaccgcccagcccggcagcggccccccccgccccagccgccgcctgctggacctgagcgtgttccgcgaccgcggcttcgtgctgtacgccgtggccgccagcgtgatggtgctgggcctgttcgtgccccccgtgttcgtggtgagctacgccaaggacctgggcgtgcccgacaccaaggccgccttcctgctgaccatcctgggcttcatcgacatcttcgcccgccccgccgccggcttcgtggccggcctgggcaaggtgcgcccctacagcgtgtacctgttcagcttcagcatgttcttcaacggcctggccgacctggccggcagcaccgccggcgactacggcggcctggtggtgttctgcatcttcttcggcatcagctacggcatggtgggcgccctgcagttcgaggtgctgatggccatcgtgggcacccacaagttcagcagcgccatcggcctggtgctgctgatggaggccgtggccgtgctggtgggcccccccagcggcggcaagctgctggacgccacccacgtgtacatgtacgtgttcatcctggccggcgccgaggtgctgaccagcagcctgatcctgctgctgggcaacttcttctgcatccgcaagaagcccaaggagccccagcccgaggtggccgccgccgaggaggagaagctgcacaagccccccgccgacagcggcgtggacctgcgcgaggtggagcacttcctgaaggccgagcccgagaagaacggcgaggtggtgcacacccccgagaccagcgtg

SEQ ID NO: 316633 - DNA, 1556 bp, Artificial Sequence
  derived and/or modified sequence
gggaaataagagagaaaagaagagtaagaagaaatataagagccaccatgggcggagctgtggtggacgaggggcctaccggtgtgaaggcgcctgatggtggctggggctgggcagtcctgtttgggtgtttcgtgattaccggcttttcctacgccttccctaaagcagtgtcagtgttcttcaaggaactcattcaagaattcggcattggctactcggacactgcatggatctccagcattctgcttgcgatgctctacggaaccggaccactttgttccgtctgtgtgaaccgcttcggatgtcggcctgttatgcttgtcggtggtctttttgcctcacttggtatggtcgcagcatcgttttgtcgctccatcattcaagtgtatctgaccactggtgtcattaccggtctgggtcttgcacttaactttcagccgtctctgataatgcttaatcgatacttttcaaagagacggcctatggcgaacgggctggcagcagcgggatcgcctgtgtttctctgtgcactttcgccgctgggacagcttctccaagaccgatacgggtggagaggcggattccttattcttggtggattgttgctcaattgctgtgtgtgcgcagccctgatgcgtccgctggtcgtgactgcacagccagggtcgggaccaccaagaccttcgaggaggctgctggatctcagcgtgttccgtgatagaggatttgtgctgtacgccgtggcagcaagcgtgatggtgcttggactttttgtgccacccgtctttgtggtgtcgtacgccaaggatctgggtgtgcctgatactaaggccgcattcctcctgaccattctgggctttatcgacatcttcgccagaccagcagctggctttgtggccggacttggaaaggtccgcccatacagcgtgtacttgttttccttctcaatgtttttcaatgggctggctgatctggcaggtagcactgctggagattacggcggtctggtggtcttttgcatcttctttggcatctcgtacggaatggtgggtgccttgcaatttgaagttctgatggccatagtgggaacccacaagtttagctcggcaattggactggtcttgctgatggaagcagtcgctgtgcttgtcggacctccttccggtgggaaacttcttgatgcaacccatgtgtacatgtatgtgtttatcctggcgggagcggaagtgctcacttcctcactcattctcctccttgggaactttttctgcatacggaaaaagcccaaagaacctcagcccgaggtggcagcagccgaagaggaaaagctgcataagcccccagcagacagcggagttgatctcagggaggtcgaacactttctcaaagcggaacccgaaaagaacggagaggtggtccatacgccagagacgtccgtctgataataggctggagcctcggtggccatgcttcttgccccttgggcctccccccagcccctcctccccttcctgcacccgtacccccgtggtctttgaataaagtctgagtgg

SEQ ID NO: 316634 - DNA, 1584 bp, Artificial Sequence
  derived and/or modified sequence
taatacgactcactatagggaaataagagagaaaagaagagtaagaagaaatataagagccaccatgggaggggccgtggtggacgagggccccacaggcgtcaaggcccctgacggcggctggggctgggccgtgctcttcggctgtttcgtcatcactggcttctcctacgccttccccaaggccgtcagtgtcttcttcaaggagctcatacaggagtttgggatcggctacagcgacacagcctggatctcctccatcctgctggccatgctctacgggacaggtccgctctgcagtgtgtgcgtgaaccgctttggctgccggcccgtcatgcttgtggggggtctctttgcgtcgctgggcatggtggctgcgtccttttgccggagcatcatccaggtctacctcaccactggggtcatcacggggttgggtttggcactcaacttccagccctcgctcatcatgctgaaccgctacttcagcaagcggcgccccatggccaacgggctggcggcagcaggtagccctgtcttcctgtgtgccctgagcccgctggggcagctgctgcaggaccgctacggctggcggggcggcttcctcatcctgggcggcctgctgctcaactgctgcgtgtgtgccgcactcatgaggcccctggtggtcacggcccagccgggctcggggccgccgcgaccctcccggcgcctgctagacctgagcgtcttccgggaccgcggctttgtgctttacgccgtggccgcctcggtcatggtgctggggctcttcgtcccgcccgtgttcgtggtgagctacgccaaggacctgggcgtgcccgacaccaaggccgccttcctgctcaccatcctgggcttcattgacatcttcgcgcggccggccgcgggcttcgtggcggggcttgggaaggtgcggccctactccgtctacctcttcagcttctccatgttcttcaacggcctcgcggacctggcgggttctacggcgggcgactacggcggcctcgtggtcttctgcatcttctttggcatctcctacggcatggtgggggccctgcagttcgaggtgctcatggccatcgtgggcacccacaagttctccagtgccattggcctggtgctgctgatggaggcggtggccgtgctcgtcgggcccccttcgggaggcaaactcctggatgcgacccacgtctacatgtacgtgttcatcctggcgggggccgaggtgctcacctcctccctgattttgctgctgggcaacttcttctgcattaggaagaagcccaaagagccacagcctgaggtggcggccgcggaggaggagaagctccacaagcctcctgcagactcgggggtggacttgcgggaggtggagcatttcctgaaggctgagcctgagaaaaacggggaggtggttcacaccccggaaacaagtgtctgataataggctggagcctcggtggccatgcttcttgccccttgggcctccccccagcccctcctccccttcctgcacccgtacccccgtggtctttgaataaagtctgagtgggcggctctaga

SEQ ID NO: 316635 - DNA, 1584 bp, Artificial Sequence
  derived and/or modified sequence
taatacgactcactatagggaaataagagagaaaagaagagtaagaagaaatataagagccaccatgggcggagctgtggtggacgaggggcctaccggtgtgaaggcgcctgatggtggctggggctgggcagtcctgtttgggtgtttcgtgattaccggcttttcctacgccttccctaaagcagtgtcagtgttcttcaaggaactcattcaagaattcggcattggctactcggacactgcatggatctccagcattctgcttgcgatgctctacggaaccggaccactttgttccgtctgtgtgaaccgcttcggatgtcggcctgttatgcttgtcggtggtctttttgcctcacttggtatggtcgcagcatcgttttgtcgctccatcattcaagtgtatctgaccactggtgtcattaccggtctgggtcttgcacttaactttcagccgtctctgataatgcttaatcgatacttttcaaagagacggcctatggcgaacgggctggcagcagcgggatcgcctgtgtttctctgtgcactttcgccgctgggacagcttctccaagaccgatacgggtggagaggcggattccttattcttggtggattgttgctcaattgctgtgtgtgcgcagccctgatgcgtccgctggtcgtgactgcacagccagggtcgggaccaccaagaccttcgaggaggctgctggatctcagcgtgttccgtgatagaggatttgtgctgtacgccgtggcagcaagcgtgatggtgcttggactttttgtgccacccgtctttgtggtgtcgtacgccaaggatctgggtgtgcctgatactaaggccgcattcctcctgaccattctgggctttatcgacatcttcgccagaccagcagctggctttgtggccggacttggaaaggtccgcccatacagcgtgtacttgttttccttctcaatgtttttcaatgggctggctgatctggcaggtagcactgctggagattacggcggtctggtggtcttttgcatcttctttggcatctcgtacggaatggtgggtgccttgcaatttgaagttctgatggccatagtgggaacccacaagtttagctcggcaattggactggtcttgctgatggaagcagtcgctgtgcttgtcggacctccttccggtgggaaacttcttgatgcaacccatgtgtacatgtatgtgtttatcctggcgggagcggaagtgctcacttcctcactcattctcctccttgggaactttttctgcatacggaaaaagcccaaagaacctcagcccgaggtggcagcagccgaagaggaaaagctgcataagcccccagcagacagcggagttgatctcagggaggtcgaacactttctcaaagcggaacccgaaaagaacggagaggtggtccatacgccagagacgtccgtctgataataggctggagcctcggtggccatgcttcttgccccttgggcctccccccagcccctcctccccttcctgcacccgtacccccgtggtctttgaataaagtctgagtgggcggctctaga

SEQ ID NO: 316636 - RNA, 1556 nt, Artificial Sequence
  derived and/or modified sequence
gggaaauaagagagaaaagaagaguaagaagaaauauaagagccaccaugggcggagcugugguggacgaggggccuaccggugugaaggcgccugaugguggcuggggcugggcaguccuguuuggguguuucgugauuaccggcuuuuccuacgccuucccuaaagcagugucaguguucuucaaggaacucauucaagaauucggcauuggcuacucggacacugcauggaucuccagcauucugcuugcgaugcucuacggaaccggaccacuuuguuccgucugugugaaccgcuucggaugucggccuguuaugcuugucgguggucuuuuugccucacuugguauggucgcagcaucguuuugucgcuccaucauucaaguguaucugaccacuggugucauuaccggucugggucuugcacuuaacuuucagccgucucugauaaugcuuaaucgauacuuuucaaagagacggccuauggcgaacgggcuggcagcagcgggaucgccuguguuucucugugcacuuucgccgcugggacagcuucuccaagaccgauacggguggagaggcggauuccuuauucuugguggauuguugcucaauugcugugugugcgcagcccugaugcguccgcuggucgugacugcacagccagggucgggaccaccaagaccuucgaggaggcugcuggaucucagcguguuccgugauagaggauuugugcuguacgccguggcagcaagcgugauggugcuuggacuuuuugugccacccgucuuuguggugucguacgccaaggaucugggugugccugauacuaaggccgcauuccuccugaccauucugggcuuuaucgacaucuucgccagaccagcagcuggcuuuguggccggacuuggaaagguccgcccauacagcguguacuuguuuuccuucucaauguuuuucaaugggcuggcugaucuggcagguagcacugcuggagauuacggcggucugguggucuuuugcaucuucuuuggcaucucguacggaauggugggugccuugcaauuugaaguucugauggccauagugggaacccacaaguuuagcucggcaauuggacuggucuugcugauggaagcagucgcugugcuugucggaccuccuuccggugggaaacuucuugaugcaacccauguguacauguauguguuuauccuggcgggagcggaagugcucacuuccucacucauucuccuccuugggaacuuuuucugcauacggaaaaagcccaaagaaccucagcccgagguggcagcagccgaagaggaaaagcugcauaagcccccagcagacagcggaguugaucucagggaggucgaacacuuucucaaagcggaacccgaaaagaacggagaggugguccauacgccagagacguccgucugauaauaggcuggagccucgguggccaugcuucuugccccuugggccuccccccagccccuccuccccuuccugcacccguacccccguggucuuugaauaaagucugagugg

SEQ ID NO: 316637 - DNA, 381 bp, Artificial Sequence
  derived and/or modified sequence
atgggaatgaggctgcagttactgagggaccgtcggatcagcagtcgcggtccaggcttgcaccgcgctaaggccgatccacagcaacagaagagactgacaaccggactgatgacacaggcagagacacagaaagaggcccaacagcgacaggccgcaatgcgcaaaaccgctctctggcatactgggcacttacagccaaagactcacactcacactgggatgcatactcagacccaccgagaaagagagcgcaacacccagaggttgcgagatcgagaaaggagggagaatggcagacacacccacacacatacagaaacccacacccaaagacacactgaggaagcgcttaagcacacaccacccggtaatccatag

SEQ ID NO: 316638 - DNA, 1665 bp, Artificial Sequence
  derived and/or modified sequence
atggccaccagcgccgacagccccagcagccccctgggcgccgaggacctgctgagcgacagcagcgagccccccggcctgaaccaggtgagcagcgaggtgaccagccagctgtacgccagcctgagactgagcagacaggccgaggccaccgccagagcccagctgtacctgcccagcaccagccccccccacgagggcctggacggcttcgcccaggagctgagcagaagcctgagcgtgggcctggagaagaacctgaagaagaaggacggcagcaagcacatcttcgagatggagagcgtgagaggccagctgcagaccatgctgcagaccagcagagacaccgcctacagagaccccctgatccccggcgccggcagcgagagaagagaggaggacagcttcgacagcgacagcaccgccaccctgctgaacaccagacccctgcaggacctgagccccagcagcagcgcccaggccctggaggagctgttccccagatacaccagcctgagacccggcccccccctgaacccccccgacttccagggcctgagagacgccctggacagcgagcacaccagaagaaagcactgcgagagacacatccagagcctgcagaccagagtgctggagctgcagcagcagctggccgtggccgtggccgccgacagaaagaaggacaccatgatcgagcagctggacaagaccctggccagagtggtggagggctggaacagacacgaggccgagagaaccgaggtgctgagaggcctgcaggaggagcaccaggccgccgagctgaccagaagcaagcagcaggagaccgtgaccagactggagcagagcctgagcgaggccatggaggccctgaacagagagcaggagagcgccagactgcagcagagagagagagagaccctggaggaggagagacaggccctgaccctgagactggaggccgagcagcagagatgctgcgtgctgcaggaggagagagacgccgccagagccggccagctgagcgagcacagagagctggagaccctgagagccgccctggaggaggagagacagacctgggcccagcaggagcaccagctgaaggagcactaccaggccctgcaggaggagagccaggcccagctggagagagagaaggagaagagccagagagaggcccaggccgcctgggagacccagcaccagctggccctggtgcagagcgaggtgagaagactggagggcgagctggacaccgccagaagagagagagacgccctgcagctggagatgagcctggtgcaggccagatacgagagccagagaatccagctggagagcgagctggccgtgcagctggagcagagagtgaccgagagactggcccaggcccaggagagcagcctgagacaggccgccagcctgagagagcaccacagaaagcagctgcaggacctgagcggccagcaccagcaggagctggccagccagctggcccagttcaaggtggagatggccgagagagaggagagacagcagcaggtggccgaggactacgagctgagactgctgctgctggacccccccgcccccggcctgagaagccccagaagaagaagaggcggcagcggcctgtgcctgccctggccctggccctag

SEQ ID NO: 316639 - DNA, 1665 bp, Artificial Sequence
  derived and/or modified sequence
atggccacttctgcagactccccctcttcccccctgggcgcagaagatcttctgagtgacagctccgagcctccaggactgaatcaggtcagcagcgaggttaccagccagctgtatgcctctctgcgtttgtctagacaggccgaagccacagcgcgggctcagttatatctgccttccacttcacccccacatgagggattagatgggttcgctcaggagctgagcagatctctgagcgtgggtctcgaaaaaaacctgaagaaaaaagatggctctaaacacatcttcgaaatggagtctgttagaggacagcttcagactatgctgcagaccagtagagataccgcgtacagagatccccttattcccggggccgggtccgagcggcgagaggaggactcctttgactccgactccacggctacactgctgaacaccaggcccctgcaggatctctccccgtcctcgagcgcccaggcactggaggagctcttcccccgttatacaagtttgcggccaggtcccccccttaaccctcccgatttccagggattaagggacgcactggacagcgaacacaccaggagaaaacactgcgagcgacacattcagtccctccagaccagggtccttgaactccagcagcagctggcagtcgcagtcgcagccgataggaaaaaggacaccatgatagagcagctggataaaaccctggctcgtgtggtggaaggctggaataggcatgaggcagaaagaactgaagtattgcgcggcctgcaagaagaacaccaagcagcagaactgacgaggtctaaacaacaagagacggtcacgagactggaacagtctttgtcagaggcgatggaagccctcaaccgggagcaggaatcagcgcggctccagcagcgtgagcgagagactctggaagaggaacgacaggctctgacattgaggctggaggcggagcaacagcggtgctgtgtgctgcaggaagaacgcgacgccgcaagagcagggcagctgtccgagcatagggagctcgagaccctccgcgctgcccttgaagaggaaagacaaacctgggcccagcaggagcatcaacttaaggagcactatcaggcactgcaggaagagagccaggcgcagctggaacgcgagaaggagaagagtcagcgggaagctcaagccgcctgggagacacagcaccagctcgctctggtccagtctgaagtgcgacggctggagggtgaactagacaccgctcggcgggaacgagatgctcttcaactggaaatgtcactagtgcaggcccgttacgagtcccaaagaatccagctagaatctgaattggccgtgcagctggagcagcgcgtgaccgagcggctggcccaagcccaggagagcagcctgcgccaggccgcttccctgagagagcaccatcgcaaacagcttcaggatctgtcaggccaacaccagcaagaactcgcttcccagctcgctcagtttaaggtcgagatggctgagcgtgaagaaagacagcagcaagtggccgaggattatgagctgcgtctgcttctgctggaccctccagctcccggactcaggtccccacgtaggcgtagaggtgggagcggcctgtgcctcccctggccctggccctag

SEQ ID NO: 316640 - DNA, 1665 bp, Artificial Sequence
  derived and/or modified sequence
atggccaccagcgctgacagccccagcagccccctgggcgctgaggacctgctgagtgacagcagcgagcccccaggcctgaaccaggtgagcagcgaggtgaccagccagctgtatgccagcctgcggctgagccggcaggccgaggccacagcccgggcccagctgtacctgcccagcaccagcccccctcatgagggcctggatggctttgcccaggagctgagccgcagcctgtctgtgggcctggagaagaacctgaagaagaaggatggcagcaagcacatctttgagatggagagcgtgcggggccagctgcagaccatgctgcagaccagccgggacacagcctacagagaccccctcatccctggggccggcagcgagcggcgggaggaggacagctttgacagcgacagcacagccaccctgctgaacacccggcccctgcaggacctgagccccagcagcagcgcccaggccctggaggagctgttcccccgctacaccagcctgcggcccggcccccccctgaaccccccagacttccagggcctgagagatgccctggacagcgagcacaccaggaggaagcactgtgagcggcacatccagagcctgcagaccagggtgctggagctgcagcagcagctggccgtggccgtggccgctgacaggaagaaggacaccatgattgagcagctggacaagaccctggcccgggtggtggagggctggaacagacatgaagctgagaggacagaggtgctgcggggcctgcaggaggagcaccaggccgctgagctgaccaggagcaagcagcaggagaccgtgacccggctggagcagagcctgtctgaggccatggaggccctgaaccgggagcaggagagcgcccggctgcagcagcgggagcgggagaccctggaggaggagcggcaggccctgaccctgcggctggaggccgagcagcagcgctgctgcgtgctgcaggaggagagagatgctgcccgggccggccagctgtctgagcaccgggagctggagaccctgcgggccgccctggaggaggagcggcagacctgggcccagcaggagcaccagctgaaggagcactaccaggccctgcaggaggagagccaggcccagctggagcgggagaaggagaagagccagcgggaggcccaggccgcctgggagacccagcaccagctggccctggtgcagagcgaggtgcggcggctggagggggagctggacacagcccggcgggagagagatgccctgcagctggagatgagcctggtgcaggcccgctatgagagccagaggatccagctggagagcgagctggccgtgcagctggagcagagggtgacagagcggctggcccaggcccaggagagcagcctgcggcaggccgccagcctgcgggagcaccacaggaagcagctgcaggacctgagcggccagcaccagcaggagctggccagccagctggcccagttcaaggtggagatggccgagcgggaggagcggcagcagcaggtggctgaagattatgagctgcggctgctgctgctggaccccccagcccctggcctgcggagccccaggagaagaagaggaggcagcggcctgtgcctgccctggccctggccctag

SEQ ID NO: 316641 - DNA, 3477 bp, Artificial Sequence
  derived and/or modified sequence
ggctgccaacggttttgagcgtagggggaggcgtgagagggggatctcaggggaggaggtcaatcgcttgccccccactttggcaaattggggactgaggactggaagggtggagagtaggcggaaccaggtggtcgtcggggcagaggatctcgggctaggcttgagggcggcgtgcttcttagggacgacttagggcgtgactgagggttcacaaggtttcttttggggtggtcgggagggagagattctagggaacaaggaagctcgctatggctttcttgccaggaggggtcgaagggaaagtacaagggagctggagctgaccctgggtagaacgggtgaagggatgggggagcgtgaggttccgccctctcttgagactggaaccaattgagggactagtagggcagggggacagaaattgggctcctagtggatttgggtccgtttccgttgggacgttttgggtgtgagaacttaagagctcagttgaccggggatagcctgtgccggagttgatctgcagcttccagcactcgtagtcgggaagaggagcttcagcagcgctgttgtcccacagtaggtcttctgtccgcacccgctctgcgctgcaccctcttaacgctgttcccaggagctggggaaagggatgcttttgcccactcccatggcccctggaactggtggaaacctttcctctaaccagaaagcctcgatatccttaattcaccaaggatccttggcgtggagtcttcctcccttctcccaagtctttctccgtgaacttttcctcctggactttgctaaagcagaacctcccagctctttgctgtctccggttgtctcttccctgtattcatggcaacatcagctgacagccccagttcacccctcggggcggaggatctcctgagtgattcatcagaaccccctgggctcaaccaagtgtcgtctgaagtgacctcccagctctatgcttctttgcgcctcagccggcaggcggaggccacggcccgagcccagctgtatttaccctccacctccccgcctcatgaagggttagacggcttcgcccaagaattgagtcgaagcttgtcagtcggattggaaaagaacttgaagaaaaaggatggttctaagcatatctttgagatggaaagtgttcggggtcagctccagaccatgctccaaacctcacgtgatacagcctatcgggatcctctcattcctggcgctggctcagagagacgggaagaggactcctttgacagtgatagcacagccaccttgctcaacacccggcccctgcaagacttgtctccatctagctcagcccaagccctggaggagctgtttccccgctacaccagccttcggccagggcctccactcaatcccccagattttcaggggctgagagatgcattggattcagagcatacccgccgcaagcattgtgagcgccatattcagagcctgcagacccgagtgttagagctacagcaacaattagccgtggctgtggctgccgaccgcaagaaagataccatgattgaacaactggacaagaccctggcccgtgtggtggagggctggaaccggcatgaggctgagcggacagaggttctcaggggacttcaagaggaacaccaggcagcagagctcaccagaagcaagcagcaggagacagtaacccgcctggaacaaagcctttctgaggccatggaggccctgaatcgtgagcaggaaagtgccagactgcagcaacgggaaagagagacactggaggaggaaaggcaagctctgactctgaggttggaggcagaacagcagcggtgctgtgtcctgcaggaagagcgggatgcagctcgggctgggcaactgagtgagcatcgagagttggagactcttcgggctgccctagaagaagaacggcagacctgggcccagcaagagcaccagcttaaggaacactaccaggcgctgcaggaggagagccaggctcagctggaaagggagaaggagaagagccagagggaagcccaggccgcctgggagacccagcaccagttggcattggtgcagtctgaggtgcggcggctggaaggagagctggatacagctcggagagagagagatgccctgcagctggaaatgagcttggtgcaggcccggtatgaaagccagcggatccagctggagtcggagctggctgtgcagctggagcagcgggtgacagagcggctggcgcaggctcaggagagcagcctacggcaagcagcctccctcagggaacatcacaggaagcagctgcaggacctgagtggacagcaccagcaggagctggccagtcagctagctcagttcaaggtggaaatggcagaacgagaggaacggcaacagcaggtggctgaggactacgagctcaggctcctcctgctggaccctccagccccgggcctcaggagcccgagaaggaggagaggagggtctggactatgcctcccatggccgtggccctgaagcctgtattgcagcagagccgggaagcaagggacgagctacctggagcgcctcctgttctttgcagttcctcctcagatcttagcctcctgttgggcccctcttttcagagccagcattctttccagcccctggagcccaaaccagacctcacttcatccacagctggggccttctctgcacttggggccttccatcccgatcatagggcagaaaggccattccctgaggaagatcctggacctgacggggagggcctcctaaagcaagggctgccgcctgctcagctggagggcctcaagaattttttgcaccagttgctggagacagtgccccagaacaatgagaacccttctgtcgacctgttgccccctaagtctggtcctctgactgtcccatcttgggaggaagcccctcaagtgccacgtattccaccgcctgtccacaaaaccaaagttcccttagccatggcatccagtcttttccgggtccctgagcctccctcctcccattcacaaggcagtggtcccagcagtggttccccagagagaggtggagatgggcttacattcccaaggcagctgatggaggtgtctcaactgttgcgactctaccaggctcggggctggggggctctgcctgctgaggatctcctgctctacctgaagaggctggaacacagcgggactgatggccgaggggataatgtccccagaaggaacacagactcccgcttgggtgagatcccccggaaagagattccctcccaggctgtccctcgccgccttgctacagcccccaagactgaaaaacctcccgcacggaagaaaagtgggcaccctgccccgagtagcatgaggagccgggggggagtctggagatgagcccccctaccctctctcctctttgttctctcattgttgttattttaataaatgctcattagtctgt

SEQ ID NO: 316642 - DNA, 1665 bp, Artificial Sequence
  derived and/or modified sequence
atggccaccagcgccgacagccccagcagccccctgggcgccgaggacttgctgtccgactcttctgaaccaccgggtctcaatcaggtttcctccgaagtcacatcccaactctatgcctccctgcgcttatcacgccaggcggaggctacagctagagcccagctttacctgcccagcacttcaccccctcatgaagggttggacggcttcgcccaggagctttctcgaagcctttcagtgggcctcgagaagaatttgaaaaagaaagatggttcaaagcacatctttgaaatggaaagcgttagaggtcagttgcaaactatgttacagacctcacgggataccgcgtacagagatcccttgattcctggggccggaagcgagaggcgggaggaggatagttttgactctgatagtacagcaaccctgctcaacactagacccctccaggacctcagcccctcatcgtccgcacaagcacttgaagagttgtttcctaggtacaccagtctgcggccaggcccccctctgaatccccccgactttcagggacttcgggatgcattggactccgagcatactaggagaaagcactgcgaacggcacatacagagtctccagactcgggtcctcgaactccagcagcagctcgccgtggctgtggcagctgataggaaaaaggacacaatgatagagcagctcgataaaacactcgcacgagttgttgaaggatggaatcgccacgaagcagagagaactgaggtgttgagggggctgcaggaggagcaccaagcggctgaactcacacgcagtaaacagcaggagaccgtgacccggctggagcagtctctttcagaggctatggaagccctgaaccgagaacaggagtccgccaggctccaacaacgggagcgagagacactggaggaggaaagacaggccttaacgttgcggctggaagcagagcagcagcggtgttgtgtgctccaggaggaaagggatgcagctagggccggccagttatcagagcaccgggagctggagacactcagagccgcactggaggaagagcgccaaacatgggcgcaacaagagcatcagctgaaggagcattatcaggcgctgcaggaggaatctcaggctcagctggaacgcgaaaaagagaagtctcagagagaagctcaggctgcctgggaaacccagcaccagttggctctggtgcagagtgaggtccgaaggctggaaggggaattagacaccgcccggagagaaagagacgcgctgcaactggaaatgtccctcgtccaggcccgttatgagagtcagaggattcagctcgagagcgaacttgctgtgcaactggagcagcgagtgactgagcgactggcccaggcccaagagtcttccctcagacaggccgcatcactgagagagcatcaccgtaaacagctgcaggacctgtccggtcagcatcaacaggaattagccagccaacttgctcagttcaaagtcgaaatggccgagcgtgaagagagacaacagcaggttgccgaggattacgaacttaggcttctcctgctggatccgccggcacctggtctgcgctctccgagacgaaggcgagggggatcgggcctttgccttccttggccgtggccttag

SEQ ID NO: 316643 - DNA, 1665 bp, Artificial Sequence
  derived and/or modified sequence
atggctacaagcgccgacagtcccagcagcccactaggagccgaggacttgctatcagattctagtgagcctccaggacttaaccaggtctcgagcgaagtgacatcccaactctacgcttctcttcgattgagcagacaggctgaggccaccgcaagagcccaactgtaccttccctctacctcccccccacacgaaggcctggacggatttgcccaagagttaagccggtcgttgagcgtcggcctagaaaagaatctgaagaagaaagatgggagtaaacatatatttgagatggagtccgttcggggacaactgcaaacaatgctccaaactagccgggacacagcttatcgggacccgctgattcccggtgcaggctccgaacgtagggaagaggattcattcgacagcgacagcaccgcaactctcctgaatacacggccactccaagacctgagtcccagctcttcagcccaggcattagaagaattatttcctcgttatacttcactgcggcctgggccaccgctcaaccctccggatttccaaggcttaagagatgcattggactctgagcataccaggcgcaaacactgcgagcgacatatccagtctcttcagacccgtgtcctggaactgcagcagcaactggctgtagcagtggccgctgaccggaagaaagacaccatgatagagcagcttgataaaactctggctcgggtggtggaagggtggaaccgccacgaagccgagcgcaccgaagtgttgcgaggcctgcaggaagagcaccaggctgccgagctgacgcggagtaaacaacaggaaaccgtgaccagattggagcagtccctgtccgaggctatggaagccctcaacagagagcaggagtcagcacgactccagcagcgcgagcgggaaactctcgaagaggagcggcaggccttaaccctgaggttggaagcggagcagcagcgctgttgcgttctacaggaggagcgtgacgccgctcgtgctgggcagttgtcagagcaccgtgagcttgaaaccctgagagcagccctggaggaagagcgccagacctgggcccaacaggagcaccagttgaaggaacactaccaggctctgcaagaggaatcgcaagcccagctcgagcgcgaaaaagagaagtcacaacgcgaggcccaggctgcctgggaaacccagcaccagctagccctcgtgcagtcggaagtccgtcggcttgaaggcgaactggatacagcgagacgggagcgagatgccttgcagcttgagatgtccctcgttcaggcccgatacgaatctcagcgtatccagctcgagtctgaacttgctgttcagctggaacagcgcgtaaccgagcggctagctcaggctcaggagtcctcactgcgacaagccgcatcactgagggagcatcataggaaacaactgcaggatctcagtggccagcaccagcaagagctcgcatcacagctggctcagtttaaggtggagatggcagagcgcgaggagcggcagcaacaggtggcagaggactacgagctacgactgttgctgcttgaccccccagctcccggactgcgcagcccaaggaggcggcgtgggggaagcgggctctgtctgccttggccctggccctag

SEQ ID NO: 316644 - protein, 573 aa, Artificial Sequence
  derived and/or modified sequence
MAPTLATAHRRRWWMACTAVLENLLFSAVLLGWGSLLIMLKSEGFYSYLCTEPENVTNGTVGGTAEPGHEEVSWMNGWLSCQAQDEMLNLAFTVGSFLLSAITLPLGIVMDKYGPRKLRLLGSACFAVSCLLIAYGASKPNALSVLIFIALALNGFGGMCMTFTSLTLPNMFGDLRSTFIALMIGSYASSAVTFPGIKLIYDAGVSFIVVLVVWAGCSGLVFLNCFFNWPLEPFPGPEDMDYSVKIKFSWLGFDHKITGKQFYKQVTTVGRRLSVGSSMRSAKEQVALQEGHKLCLSTVDLEVKCQPDAAVAPSFMHSVFSPILLLSLVTMCVTQLRLIFYMGAMNNILKFLVSGDQKTASSTVGLYTSIFGVLQLLCLLTAPVIGYIMDWRLKECEDASEEPEEKDANQGEKKKKKRDRQIQKITNAMRAFAFTNLLLVGFGVTCLIPNLPLQILSFILHTIVRGFIHSAVGGLYAAVYPSTQFGSLTGLQSLISALFALLQQPLFLAMMGPLQGDPLWVNVGLLLLSLLGFCLPLYLICYRRQLERQLQQRQEDDKLFLKINGSSNQEAFV

SEQ ID NO: 316645 - DNA, 1722 bp, Artificial Sequence
  derived and/or modified sequence
atggcccccaccctggccaccgcccacagaagaagatggtggatggcctgcaccgccgtgctggagaacctgctgttcagcgccgtgctgctgggctggggcagcctgctgatcatgctgaagagcgagggcttctacagctacctgtgcaccgagcccgagaacgtgaccaacggcaccgtgggcggcaccgccgagcccggccacgaggaggtgagctggatgaacggctggctgagctgccaggcccaggacgagatgctgaacctggccttcaccgtgggcagcttcctgctgagcgccatcaccctgcccctgggcatcgtgatggacaagtacggccccagaaagctgagactgctgggcagcgcctgcttcgccgtgagctgcctgctgatcgcctacggcgccagcaagcccaacgccctgagcgtgctgatcttcatcgccctggccctgaacggcttcggcggcatgtgcatgaccttcaccagcctgaccctgcccaacatgttcggcgacctgagaagcaccttcatcgccctgatgatcggcagctacgccagcagcgccgtgaccttccccggcatcaagctgatctacgacgccggcgtgagcttcatcgtggtgctggtggtgtgggccggctgcagcggcctggtgttcctgaactgcttcttcaactggcccctggagcccttccccggccccgaggacatggactacagcgtgaagatcaagttcagctggctgggcttcgaccacaagatcaccggcaagcagttctacaagcaggtgaccaccgtgggcagaagactgagcgtgggcagcagcatgagaagcgccaaggagcaggtggccctgcaggagggccacaagctgtgcctgagcaccgtggacctggaggtgaagtgccagcccgacgccgccgtggcccccagcttcatgcacagcgtgttcagccccatcctgctgctgagcctggtgaccatgtgcgtgacccagctgagactgatcttctacatgggcgccatgaacaacatcctgaagttcctggtgagcggcgaccagaagaccgccagcagcaccgtgggcctgtacaccagcatcttcggcgtgctgcagctgctgtgcctgctgaccgcccccgtgatcggctacatcatggactggagactgaaggagtgcgaggacgccagcgaggagcccgaggagaaggacgccaaccagggcgagaagaagaagaagaagagagacagacagatccagaagatcaccaacgccatgagagccttcgccttcaccaacctgctgctggtgggcttcggcgtgacctgcctgatccccaacctgcccctgcagatcctgagcttcatcctgcacaccatcgtgagaggcttcatccacagcgccgtgggcggcctgtacgccgccgtgtaccccagcacccagttcggcagcctgaccggcctgcagagcctgatcagcgccctgttcgccctgctgcagcagcccctgttcctggccatgatgggccccctgcagggcgaccccctgtgggtgaacgtgggcctgctgctgctgagcctgctgggcttctgcctgcccctgtacctgatctgctacagaagacagctggagagacagctgcagcagagacaggaggacgacaagctgttcctgaagatcaacggcagcagcaaccaggaggccttcgtgtag

SEQ ID NO: 316646 - DNA, 1722 bp, Artificial Sequence
  derived and/or modified sequence
atggcacccaccctggccactgcgcaccgaagacgatggtggatggcctgtacagctgtactggagaacctgttattctccgctgtcctcctgggatggggtagcctcttaatcatgttgaagtccgagggattctacagctatttgtgcacagagcctgagaatgtgaccaacggaaccgttggcgggactgccgaacctggacatgaagaggtgtcttggatgaatggatggttgtcatgccaggcacaagacgagatgctgaacctggccttcaccgttggcagtttcctactcagtgcaatcacactgcctctagggatcgtgatggataagtacggtcctcggaaactgcgtctcttaggctctgcttgcttcgccgtgtcctgcctgctgatcgcatacggcgctagcaaacctaacgccctctccgtgctgatttttattgctttggccctgaacggctttggcggcatgtgcatgacattcaccagcttgactctgcccaatatgttcggtgatttacgcagtacttttatcgcgctcatgatagggagctacgcctccagtgctgtgacttttcctggcattaagttgatctacgacgccggagtgtccttcatagtagtcttagttgtctgggctgggtgcagcggccttgttttcttgaattgtttttttaattggcctcttgaaccctttcccgggccagaggatatggattactctgtgaaaatcaaatttagttggctggggtttgatcacaaaattaccgggaagcagttctacaagcaggttaccacagtggggagaaggttaagcgtgggtagctctatgagaagtgccaaagagcaggtcgctctccaggaagggcacaagctatgcctgagtacagtcgacctggaagtcaagtgccagccggacgctgctgtagctcccagttttatgcactcagtgtttagccccattcttctcctgtcactcgttactatgtgcgtcacacagttgcgactgattttctatatgggcgcgatgaataatattctgaagttcctggtgtcaggtgaccagaaaacagcatcctctactgtggggctgtatacaagtattttcggcgtactgcagttgctttgcttgttgaccgcccccgtaattggttacatcatggattggcgcctgaaagaatgtgaggacgcgtctgaggagccagaagaaaaggatgctaaccagggggaaaagaaaaagaagaaacgcgaccgccagatccagaagatcaccaacgcgatgcgagcttttgcatttacaaatctgcttctcgtggggtttggggtgacctgccttatccctaaccttccactgcagattctctcatttatattgcacactattgtccgcggattcatccacagcgcagtgggcggtctgtatgccgccgtttacccctcaactcagttcggtagccttaccgggctgcagagtcttatttcagcccttttcgccctgctccaacaacccttgtttctggccatgatggggcctcttcagggggatcctctttgggttaatgttggcctcctgttattgtcccttttgggtttctgcctgccactataccttatatgctataggcggcagctcgaaaggcaactgcagcaaaggcaggaggatgacaaactgtttctgaaaataaacggctcaagcaatcaggaagcatttgtctag

SEQ ID NO: 316647 - DNA, 1722 bp, Artificial Sequence
  derived and/or modified sequence
atggcccccaccctggccacagcccacagaagacgctggtggatggcctgcacagctgtgctggagaacctgctcttctctgctgtgctgctgggctggggcagcctgctgatcatgctgaagtctgagggcttctacagctacctgtgcacagagccagaaaatgtgaccaacggcaccgtgggcggcacagctgagcccggccacgaggaggtgtcctggatgaatggctggctgagctgccaggcccaggatgagatgctgaacctggccttcaccgtgggcagcttcctgctgagcgccatcaccctgcccctgggcatcgtgatggacaagtatggccccaggaagctgcggctgctgggcagcgcctgctttgctgtgtcctgcctgctgattgcctatggagccagcaagcccaatgccctgtctgtgctgatcttcatcgccctggccctgaatggatttggaggcatgtgcatgaccttcaccagcctgaccctgcccaacatgtttggagacctgcggagcaccttcatcgccctgatgattggcagctatgccagcagcgctgtgaccttccctggcatcaagctgatctatgatgctggggtgtccttcatcgtggtgctggtggtgtgggccggctgcagcggcctggtgttcctgaactgcttcttcaactggcccctggagcccttccctggccctgaggacatggactacagcgtgaagatcaagttctcctggctgggctttgaccacaagatcaccgggaagcagttctacaagcaggtgaccaccgtgggccgccgcctgtctgtgggcagctccatgaggtctgccaaggagcaggtggccctgcaggagggccacaagctgtgcctgagcacagtggacctggaggtgaagtgccagccagatgctgctgtggcccccagcttcatgcacagcgtcttcagccccatcctgctgctgagcctggtgaccatgtgtgtgacccagctgcggctcatcttctacatgggcgccatgaacaacatcctgaagttcctggtgtctggggaccagaagacagccagcagcacagtgggcctgtacaccagcatctttggagtgctgcagctgctgtgcctgctgacagcccctgtgattggctacatcatggactggaggctgaaggaatgtgaagatgccagcgaggagcctgaggagaaggatgccaaccagggcgagaagaagaagaagaagagggaccggcagatccagaagatcaccaatgccatgagggcctttgccttcaccaacctgctgctggtgggcttcggcgtgacctgcctgatccccaacctgcccctgcagatcctgtccttcatcctgcacaccatcgtgcggggcttcatccacagcgctgtgggcggcctgtatgctgctgtgtaccccagcacccagtttggcagcctgaccggcctgcagagcctcatcagcgccctgtttgccctgctgcagcagcccctcttcctggccatgatgggccccctgcagggcgaccccctgtgggtgaatgtgggcctgctgctgctgagcctgctgggcttctgcctgcccctgtacctgatctgctaccgccggcagctggagcggcagctgcagcagaggcaggaggatgacaagctgttcctgaagatcaatggcagcagcaaccaggaggcctttgtgtag

SEQ ID NO: 316648 - DNA, 1722 bp, Artificial Sequence
  derived and/or modified sequence
atggcccccaccctggccaccgcccaccggcggcggtggtggatggcctgtaccgcggtcctcgaaaaccttctgttcagtgccgtgcttctgggttggggatcactgcttatcatgctgaagtctgaaggattttacagctatctgtgcaccgagccagaaaacgtcacaaatggcaccgtcggtggaactgccgagccaggtcacgaagaagtgtcatggatgaacggctggttgtcctgtcaggcccaggacgagatgttgaatcttgccttcactgtgggctcgtttctcctgagcgccataacactcccgctcggaatagtgatggacaagtacggtccacggaagttgaggttgctgggttccgcatgcttcgcggtttcctgcctcctgatagcttacggagctagcaagcccaatgccctcagcgtgctcatcttcatcgccctggctctgaatggtttcggtggcatgtgtatgaccttcactagtctgacgttgccaaatatgtttggcgatctaaggtccacctttatcgccctgatgataggttcgtacgcgagcagcgctgttactttccccgggatcaaattgatatacgatgccggggtgagttttatcgtggtgttggtcgtttgggccggatgttctggactcgtgttccttaactgcttctttaactggccactcgagccctttcccggtcctgaagatatggattactccgtgaagattaagttcagctggttggggttcgatcacaaaatcaccggcaaacagttttataagcaggtgaccacggtgggccgtcgtctgagcgttggcagcagtatgaggtccgctaaagagcaggtggcacttcaggagggccataaactgtgcttgtctaccgtagacctcgaggttaagtgccagcctgacgcagccgtcgcgccaagttttatgcattccgttttctcccccatcctgctcctgagcttggtgacgatgtgcgtcacacaactgagactgatcttctatatgggggccatgaataacatcctcaagtttcttgtatccggcgaccagaaaactgcctcaagcactgtaggtctgtacacatctatcttcggggttctgcagctgctatgcctgctgacagcaccggtgatcggatacatcatggattggagactgaaagaatgtgaggacgcatctgaagagcctgaggaaaaggatgccaatcagggagagaaaaagaaaaaaaagcgtgatcgccagatccagaaaataactaatgcgatgagagcattcgcatttactaatttgctgttggtgggatttggcgtgacatgcctcattccaaacttgcccctgcagatcctgagttttattcttcatactattgtgagaggctttatccactcagccgtgggcgggctgtacgctgcagtgtatccatccacccagtttggttcactgaccggtctccagtcactgataagcgctctttttgccctgctccagcagcccctgttcctcgcaatgatgggacccctgcagggagacccactttgggttaacgtgggccttctgcttttgtccctgctgggcttttgtttgccactttacctgatctgctacaggcgccagctcgagagacaattgcaacaaaggcaggaggatgacaaactgtttcttaagataaacgggagtagcaatcaggaggccttcgtgtag

SEQ ID NO: 316649 - DNA, 1722 bp, Artificial Sequence
  derived and/or modified sequence
atggccccaactctggccactgctcatcgaaggaggtggtggatggcttgtaccgctgtgctggaaaaccttcttttttctgctgtgttgctcggatgggggagcctgctgataatgctgaagtcagaaggattctatagctatctctgcaccgagcccgaaaatgttacaaacgggaccgtgggtggaacagcggaacccggacatgaggaagtcagttggatgaatgggtggctgtcctgtcaggcccaggatgaaatgttaaatctcgcattcaccgtgggaagctttttgctatctgcgattacactgccgctgggtatcgtgatggataaatatggccctaggaagttgcgcctgctggggagtgcctgcttcgccgtttcgtgcctcttaatcgcctatggtgcaagcaaacctaacgctctttcggtcctcatttttattgctttggcccttaatgggtttggcggaatgtgcatgactttcacctccttgaccctgcctaatatgtttggggaccttaggagtacgtttatcgcgctgatgatcggctcatatgcatcgtcagctgtcactttccccggtatcaaactgatttacgacgcaggggtctcatttatcgtggtgctggtcgtttgggccggttgcagtgggctggtgtttttaaactgtttcttcaactggcctcttgagccctttcccggtccagaggacatggactattcagtgaaaataaagtttagttggctaggttttgatcataagatcacagggaaacagttctacaagcaagtaacaactgtgggccgacgtctcagcgttggctccagcatgaggtctgccaaagaacaggtggccttgcaggaaggtcacaaactctgcctgagcaccgtggaccttgaggtaaagtgtcagcctgatgctgccgtggccccttccttcatgcatagcgttttctccccaatcctgctgttgagcctcgtgactatgtgcgtgacacagcttcggctcatcttctacatgggtgcgatgaataacattcttaagttcctagtgtcaggggaccagaaaacagcctcatccactgtgggactttatacctctatttttggagtactgcagctgctgtgcttgctgaccgctcccgtgatcggctatattatggattggagactgaaggaatgcgaggacgcctcggaggaacctgaagagaaggatgccaaccaaggggagaagaaaaaaaaaaagcgggacagacagatccaaaagataacgaatgcaatgcgagcctttgcgtttacaaatctgctgttagtgggtttcggggtcacatgcctgattcccaacctgcccctgcaaatactaagttttatcctgcacactatcgttcggggattcatacattccgcggtgggtggcctgtatgccgctgtgtatccctccacccagtttgggagccttaccgggctgcaatcactcatatctgccctcttcgcactactacagcagcccctcttcctggcgatgatggggcctctacagggagatccgctttgggtgaatgtcgggctgctcctgctgagcttgctgggcttctgcctcccactctacctgatatgctataggcggcaactggaaaggcagcttcagcagagacaggaggacgataagctattcctgaagatcaacgggtcttccaatcaggaggctttcgtttag

SEQ ID NO: 316650 - DNA, 3011 bp, Artificial Sequence
  derived and/or modified sequence
agaaaaggcgccgggcgggcccgacacacgccggaggagccgggtggtgcagagccggagccggagccggagccgcgccgcgccgcaccatggcgcccaccctggccactgcccatcggcgccgctggtggatggcctgcacggccgtgctggagaacctcctcttctcggcagtcctcctgggctggggctcgctgctcatcatgctcaagtcagagggcttttactcctacctgtgtaccgagccagagaatgtcaccaatggcacagtgggcggcacagcagagccggggcacgaggaggtgagctggatgaacggctggctcagctgccaggcccaggacgagatgctaaatttggccttcactgtgggctcctttctgctcagtgccatcaccctgcccctgggtatcgtcatggacaagtatggcccgaggaagctcaggctgctgggcagcgcctgcttcgcggtttcctgcttgctgattgcgtacggagcaagtaaaccaaacgctctctccgtgctcatcttcatcgccctggctctgaatggctttggtgggatgtgtatgaccttcacctcattaacactgcccaacatgttcggcgaccttcggtccacgtttattgccttgatgattgggtcctacgcctcctcggcagtcacctttccaggaatcaagctcatctatgatgctggtgtctccttcatcgtcgtcctcgtggtctgggccggctgctccgggctggttttcctcaactgcttctttaactggccccttgagcccttcccggggccggaggacatggactactcggtgaagatcaagttcagctggctgggctttgaccacaagatcacagggaagcagttctacaagcaggtgaccacggtgggccggcgcctgagtgtgggcagctccatgaggagtgccaaggagcaggtggcgctgcaggagggccacaagctgtgcctgtccaccgtcgacctggaggtgaagtgccagccggatgccgcagtggccccctccttcatgcacagcgtgttcagccccatcctgctgctcagcctggtcaccatgtgcgtcacgcagctgcggctcatcttctacatgggggctatgaacaacatcctcaagttcctggtcagcggcgaccagaagacagcttcctccacagttggcctctacacctccatcttcggcgtgctccagctgctgtgcctgctgacggcccccgtcattggctacatcatggactggaggctgaaggagtgtgaagacgcctccgaggagcccgaggagaaagacgccaaccaaggcgagaagaaaaagaagaagcgggaccggcagatccagaagatcactaatgccatgcgggccttcgccttcaccaacctgctgctcgtgggctttggggtgacctgcctcattcccaacctgcctctccagatcctctccttcatcctgcacacaatcgtgcgaggattcatccactccgctgtcgggggcctgtacgctgccgtgtacccctccacccagttcggcagcctcacgggactgcagtctctgatcagcgcgctcttcgcccttctgcagcagccgctgtttctggccatgatgggtcctctccagggagaccctctgtgggtgaacgtggggctgctccttctcagcctgctgggcttctgcctcccgctctacctgatctgctaccggcgccagctggagcggcagctgcagcagaggcaggaggatgacaaactcttcctcaaaatcaacggctcgtccaaccaggaggccttcgtgtagtggctgccgcctcggaactgcggtctcctgcctgtgcttcagtgactgacccctgtcctgcccctccagagtaccccacgcacccccaggaccttcgccgtctccgtgccagcgttcacgctccctcccggggccctgcctcggagctctgtggtggaaggacgggagagggccccggacacgcgcgttttctcctgccgaacgcaggggctgccctgactttgctctgccgccccccggggacccggggcctggggtctctgtggtgcctgcagcaggagccaggaacgcccggcaggcaggcgctctcccgccagtgtctggattctgcctcttgccaaagcagagggggctgccatcccctgcctgccacctgcccctcggctgcatgcccacagccgtacctgcctgaggacaaaggcttgcactgtctcgcccgcgcctggcccccaccccctccccggccagcctgaggctgcctgaggaaggaaggacccgcttcctgttgtcggtgctaattcctttgtaattccagccccctgtcgcctgtccagggcctgcccacccgttggaggccggtggagaagccccacctggcttatgccctggagagggtttagcgggctgggtggacccctcgcctcctccccgagggccaatgccgcggacacgttttcactgtcaccctcgttctgtctgccacctgaagggaatttgaggaccgccgccagggcaccccgtacatacacacagctgcttttgtggaggtggacgaaaggctgtggccggcagacgtggaggtccaggccggggtggggacgtgggtgggtccgaggtgtgtgtggggtcggggtgggctctaggagttagcccttatccccactgaccaggcgggagccgccaggcctgcagctgggccagtgcccaggagccatcctggcgtggggccaggagcttgtccaaggccacaggcccacagcaccccctgccggcgggctccgtggggccctggagctgatgacgggggaggcccgtccgcctggcccaccaacccgcccaccttgactgcccccagaagtgtgtcttgagacctcctgggcgtgcttagaggggtgagttgtgtttggatttttagttattttctcttcagttttattagacttcttttttataaagcaataaatccattttcctccgggt

SEQ ID NO: 316651 - DNA, 132 bp, Artificial Sequence
  derived and/or modified sequence
acagacttcctgcggacccagcccaccaggaccagggtgaacaagcagcccctgctgctgaccctgagcctcttcaagctgagcctgcagctggatgcccgcatcacctttggagctgagagccctggatag

SEQ ID NO: 316652 - protein, 890 aa, Artificial Sequence
  derived and/or modified sequence
MDGEPPASSGLGLPDYTSGVSFHDQADLPETEDFQAGLYVTESPQPQEAEAVSLGRLSDKSSTSETSLGEERAPDEGGAPVDKSSLRSGDSSQDLKQSEGSEEEEEEEDSCVVLEEEEGEQEEVTGASELTLSDTVLSMETVVAGGSGGDGEEEEEALPEQSEGKEQKILLDTACKMVRWLSAKLGPTVASRHVARNLLRLLTSCYVGPTRQQFTVSSGESPPLSAGNIYQKRPVLGDIVSGPVLSCLLHIARLYGEPVLTYQYLPYISYLVAPGSASGPSRLNSRKEAGLLAAVTLTQKIIVYLSDTTLMDILPRISHEVLLPVLSFLTSLVTGFPSGAQARTILCVKTISLIALICLRIGQEMVQQHLSEPVATFFQVFSQLHELRQQDLKLDPAGRGEGQLPQVVFSDGQQRPVDPALLDELQKVFTLEMAYTIYVPFSCLLGDIIRKIIPNHELVGELAALYLESISPSSRNPASVEPTMPGTGPEWDPHGGGCPQDDGHSGTFGSVLVGNRIQIPNDSRPENPGPLGPISGVGGGGLGSGSDDNALKQELPRSVHGLSGNWLAYWQYEIGVSQQDAHFHFHQIRLQSFPGHSGAVKCVAPLSSEDFFLSGSKDRTVRLWPLYNYGDGTSETAPRLVYTQHRKSVFFVGQLEAPQHVVSCDGAVHVWDPFTGKTLRTVEPLDSRVPLTAVAVMPAPHTSITMASSDSTLRFVDCRKPGLQHEFRLGGGLNPGLVRALAISPSGRSVVAGFSSGFMVLLDTRTGLVLRGWPAHEGDILQIKAVEGSVLVSSSSDHSLTVWKELEQKPTHHYKSASDPIHTFDLYGSEVVTGTVSNKIGVCSLLEPPSQATTKLSSENFRGTLTSLALLPTKRHLLLGSDNGVIRLLA

SEQ ID NO: 316653 - protein, 572 aa, Artificial Sequence
  derived and/or modified sequence
MGSLSSPTSTCPTSATWFPSGAQARTILCVKTISLIALICLRIGQEMVQQHLSEPVATFFQVFSQLHELRQQDLKLDPAGRGEGQLPQVVFSDGQQRPVDPALLDELQKVFTLEMAYTIYVPFSCLLGDIIRKIIPNHELVGELAALYLESISPSSRNPASVEPTMPGTGPEWDPHGGGCPQDDGHSGTFGSVLVGNRIQIPNDSRPENPGPLGPISGVGGGGLGSGSDDNALKQELPRSVHGLSGNWLAYWQYEIGVSQQDAHFHFHQIRLQSFPGHSGAVKCVAPLSSEDFFLSGSKDRTVRLWPLYNYGDGTSETAPRLVYTQHRKSVFFVGQLEAPQHVVSCDGAVHVWDPFTGKTLRTVEPLDSRVPLTAVAVMPAPHTSITMASSDSTLRFVDCRKPGLQHEFRLGGGLNPGLVRALAISPSGRSVVAGFSSGFMVLLDTRTGLVLRGWPAHEGDILQIKAVEGSVLVSSSSDHSLTVWKELEQKPTHHYKSASDPIHTFDLYGSEVVTGTVSNKIGVCSLLEPPSQATTKLSSENFRGTLTSLALLPTKRHLLLGSDNGVIRLLA

SEQ ID NO: 316654 - protein, 714 aa, Artificial Sequence
  derived and/or modified sequence
MVRWLSAKLGPTVASRHVARNLLRLLTSCYVGPTRQQFTVSSGESPPLSAGNIYQKRPVLGDIVSGPVLSCLLHIARLYGEPVLTYQYLPYISYLVAPGSASGPSRLNSRKEAGLLAAVTLTQKIIVYLSDTTLMDILPRISHEVLLPVLSFLTSLVTGFPSGAQARTILCVKTISLIALICLRIGQEMVQQHLSEPVATFFQVFSQLHELRQQDLKLDPAGRGEGQLPQVVFSDGQQRPVDPALLDELQKVFTLEMAYTIYVPFSCLLGDIIRKIIPNHELVGELAALYLESISPSSRNPASVEPTMPGTGPEWDPHGGGCPQDDGHSGTFGSVLVGNRIQIPNDSRPENPGPLGPISGVGGGGLGSGSDDNALKQELPRSVHGLSGNWLAYWQYEIGVSQQDAHFHFHQIRLQSFPGHSGAVKCVAPLSSEDFFLSGSKDRTVRLWPLYNYGDGTSETAPRLVYTQHRKSVFFVGQLEAPQHVVSCDGAVHVWDPFTGKTLRTVEPLDSRVPLTAVAVMPAPHTSITMASSDSTLRFVDCRKPGLQHEFRLGGGLNPGLVRALAISPSGRSVVAGFSSGFMVLLDTRTGLVLRGWPAHEGDILQIKAVEGSVLVSSSSDHSLTVWKELEQKPTHHYKSASDPIHTFDLYGSEVVTGTVSNKIGVCSLLEPPSQATTKLSSENFRGTLTSLALLPTKRHLLLGSDNGVIRLLA

SEQ ID NO: 316655 - DNA, 2673 bp, Artificial Sequence
  derived and/or modified sequence
atggacggcgagccccccgccagcagcggcctgggcctgcccgactacaccagcggcgtgagcttccacgaccaggccgacctgcccgagaccgaggacttccaggccggcctgtacgtgaccgagagcccccagccccaggaggccgaggccgtgagcctgggcagactgagcgacaagagcagcaccagcgagaccagcctgggcgaggagagagcccccgacgagggcggcgcccccgtggacaagagcagcctgagaagcggcgacagcagccaggacctgaagcagagcgagggcagcgaggaggaggaggaggaggaggacagctgcgtggtgctggaggaggaggagggcgagcaggaggaggtgaccggcgccagcgagctgaccctgagcgacaccgtgctgagcatggagaccgtggtggccggcggcagcggcggcgacggcgaggaggaggaggaggccctgcccgagcagagcgagggcaaggagcagaagatcctgctggacaccgcctgcaagatggtgagatggctgagcgccaagctgggccccaccgtggccagcagacacgtggccagaaacctgctgagactgctgaccagctgctacgtgggccccaccagacagcagttcaccgtgagcagcggcgagagcccccccctgagcgccggcaacatctaccagaagagacccgtgctgggcgacatcgtgagcggccccgtgctgagctgcctgctgcacatcgccagactgtacggcgagcccgtgctgacctaccagtacctgccctacatcagctacctggtggcccccggcagcgccagcggccccagcagactgaacagcagaaaggaggccggcctgctggccgccgtgaccctgacccagaagatcatcgtgtacctgagcgacaccaccctgatggacatcctgcccagaatcagccacgaggtgctgctgcccgtgctgagcttcctgaccagcctggtgaccggcttccccagcggcgcccaggccagaaccatcctgtgcgtgaagaccatcagcctgatcgccctgatctgcctgagaatcggccaggagatggtgcagcagcacctgagcgagcccgtggccaccttcttccaggtgttcagccagctgcacgagctgagacagcaggacctgaagctggaccccgccggcagaggcgagggccagctgccccaggtggtgttcagcgacggccagcagagacccgtggaccccgccctgctggacgagctgcagaaggtgttcaccctggagatggcctacaccatctacgtgcccttcagctgcctgctgggcgacatcatcagaaagatcatccccaaccacgagctggtgggcgagctggccgccctgtacctggagagcatcagccccagcagcagaaaccccgccagcgtggagcccaccatgcccggcaccggccccgagtgggacccccacggcggcggctgcccccaggacgacggccacagcggcaccttcggcagcgtgctggtgggcaacagaatccagatccccaacgacagcagacccgagaaccccggccccctgggccccatcagcggcgtgggcggcggcggcctgggcagcggcagcgacgacaacgccctgaagcaggagctgcccagaagcgtgcacggcctgagcggcaactggctggcctactggcagtacgagatcggcgtgagccagcaggacgcccacttccacttccaccagatcagactgcagagcttccccggccacagcggcgccgtgaagtgcgtggcccccctgagcagcgaggacttcttcctgagcggcagcaaggacagaaccgtgagactgtggcccctgtacaactacggcgacggcaccagcgagaccgcccccagactggtgtacacccagcacagaaagagcgtgttcttcgtgggccagctggaggccccccagcacgtggtgagctgcgacggcgccgtgcacgtgtgggaccccttcaccggcaagaccctgagaaccgtggagcccctggacagcagagtgcccctgaccgccgtggccgtgatgcccgccccccacaccagcatcaccatggccagcagcgacagcaccctgagattcgtggactgcagaaagcccggcctgcagcacgagttcagactgggcggcggcctgaaccccggcctggtgagagccctggccatcagccccagcggcagaagcgtggtggccggcttcagcagcggcttcatggtgctgctggacaccagaaccggcctggtgctgagaggctggcccgcccacgagggcgacatcctgcagatcaaggccgtggagggcagcgtgctggtgagcagcagcagcgaccacagcctgaccgtgtggaaggagctggagcagaagcccacccaccactacaagagcgccagcgaccccatccacaccttcgacctgtacggcagcgaggtggtgaccggcaccgtgagcaacaagatcggcgtgtgcagcctgctggagccccccagccaggccaccaccaagctgagcagcgagaacttcagaggcaccctgaccagcctggccctgctgcccaccaagagacacctgctgctgggcagcgacaacggcgtgatcagactgctggcctag

SEQ ID NO: 316656 - DNA, 2079 bp, Artificial Sequence
  derived and/or modified sequence
atggacggcgagccccccgccagcagcggcctgggcctgcccgactacaccagcggcgtgagcttccacgaccaggccgacctgcccgagaccgaggacttccaggccggcctgtacgtgaccgagagcccccagccccaggaggccgaggccgtgagcctgggcagactgagcgacaagagcagcacctaccagtacctgccctacatcagctacctggtggcccccggcagcgccagcggccccagcagactgaacagcagaaaggaggccggcctgctggccgccgtgaccctgacccagaagatcatcgtgtacctgagcgacaccaccctgatggacatcctgcccagaatcagccacgaggtgctgctgcccgtgctgagcttcctgaccagcctggtgaccggcttccccagcggcgcccaggccagaaccatcctgtgcgtgaagaccatcagcctgatcgccctgatctgcctgagaatcggccaggagatggtgcagcagcacctgagcgagcccgtggccaccttcttccaggtgttcagccagctgcacgagctgagacagcaggacctgaagctggaccccgccggcagaggcgagggccagctgccccaggtggtgttcagcgacggccagcagagacccgtggaccccgccctgctggacgagctgcagaaggtgttcaccctggagatggcctacaccatctacgtgcccttcagctgcctgctgggcgacatcatcagaaagatcatccccaaccacgagctggtgggcgagctggccgccctgtacctggagagcatcagccccagcagcagaaaccccgccagcgtggagcccaccatgcccggcaccggccccgagtgggacccccacggcggcggctgcccccaggacgacggccacagcggcaccttcggcagcgtgctggtgggcaacagaatccagatccccaacgacagcagacccgagaaccccggccccctgggccccatcagcggcgtgggcggcggcggcctgggcagcggcagcgacgacaacgccctgaagcaggagctgcccagaagcgtgcacggcctgagcggcaactggctggcctactggcagtacgagatcggcgtgagccagcaggacgcccacttccacttccaccagatcagactgcagagcttccccggccacagcggcgccgtgaagtgcgtggcccccctgagcagcgaggacttcttcctgagcggcagcaaggacagaaccgtgagactgtggcccctgtacaactacggcgacggcaccagcgagaccgcccccagactggtgtacacccagcacagaaagagcgtgttcttcgtgggccagctggaggccccccagcacgtggtgagctgcgacggcgccgtgcacgtgtgggaccccttcaccggcaagaccctgagaaccgtggagcccctggacagcagagtgcccctgaccgccgtggccgtgatgcccgccccccacaccagcatcaccatggccagcagcgacagcaccctgagattcgtggactgcagaaagcccggcctgcagcacgagttcagactgggcggcggcctgaaccccggcctggtgagagccctggccatcagccccagcggcagaagcgtggtggccggcttcagcagcggcttcatggtgctgctggacaccagaaccggcctggtgctgagaggctggcccgcccacgagggcgacatcctgcagatcaaggccgtggagggcagcgtgctggtgagcagcagcagcgaccacagcctgaccgtgtggaaggagctggagcagaagcccacccaccactacaagagcgccagcgaccccatccacaccttcgacctgtacggcagcgaggtggtgaccggcaccgtgagcaacaagatcggcgtgtgcagcctgctggagccccccagccaggccaccaccaagctgagcagcgagaacttcagaggcaccctgaccagcctggccctgctgcccaccaagagacacctgctgctgggcagcgacaacggcgtgatcagactgctggcctag

SEQ ID NO: 316657 - DNA, 1719 bp, Artificial Sequence
  derived and/or modified sequence
atgggcagcctgagcagccccaccagcacctgccccaccagcgccacctggttccccagcggcgcccaggccagaaccatcctgtgcgtgaagaccatcagcctgatcgccctgatctgcctgagaatcggccaggagatggtgcagcagcacctgagcgagcccgtggccaccttcttccaggtgttcagccagctgcacgagctgagacagcaggacctgaagctggaccccgccggcagaggcgagggccagctgccccaggtggtgttcagcgacggccagcagagacccgtggaccccgccctgctggacgagctgcagaaggtgttcaccctggagatggcctacaccatctacgtgcccttcagctgcctgctgggcgacatcatcagaaagatcatccccaaccacgagctggtgggcgagctggccgccctgtacctggagagcatcagccccagcagcagaaaccccgccagcgtggagcccaccatgcccggcaccggccccgagtgggacccccacggcggcggctgcccccaggacgacggccacagcggcaccttcggcagcgtgctggtgggcaacagaatccagatccccaacgacagcagacccgagaaccccggccccctgggccccatcagcggcgtgggcggcggcggcctgggcagcggcagcgacgacaacgccctgaagcaggagctgcccagaagcgtgcacggcctgagcggcaactggctggcctactggcagtacgagatcggcgtgagccagcaggacgcccacttccacttccaccagatcagactgcagagcttccccggccacagcggcgccgtgaagtgcgtggcccccctgagcagcgaggacttcttcctgagcggcagcaaggacagaaccgtgagactgtggcccctgtacaactacggcgacggcaccagcgagaccgcccccagactggtgtacacccagcacagaaagagcgtgttcttcgtgggccagctggaggccccccagcacgtggtgagctgcgacggcgccgtgcacgtgtgggaccccttcaccggcaagaccctgagaaccgtggagcccctggacagcagagtgcccctgaccgccgtggccgtgatgcccgccccccacaccagcatcaccatggccagcagcgacagcaccctgagattcgtggactgcagaaagcccggcctgcagcacgagttcagactgggcggcggcctgaaccccggcctggtgagagccctggccatcagccccagcggcagaagcgtggtggccggcttcagcagcggcttcatggtgctgctggacaccagaaccggcctggtgctgagaggctggcccgcccacgagggcgacatcctgcagatcaaggccgtggagggcagcgtgctggtgagcagcagcagcgaccacagcctgaccgtgtggaaggagctggagcagaagcccacccaccactacaagagcgccagcgaccccatccacaccttcgacctgtacggcagcgaggtggtgaccggcaccgtgagcaacaagatcggcgtgtgcagcctgctggagccccccagccaggccaccaccaagctgagcagcgagaacttcagaggcaccctgaccagcctggccctgctgcccaccaagagacacctgctgctgggcagcgacaacggcgtgatcagactgctggcctag

SEQ ID NO: 316658 - DNA, 2145 bp, Artificial Sequence
  derived and/or modified sequence
atggtgagatggctgagcgccaagctgggccccaccgtggccagcagacacgtggccagaaacctgctgagactgctgaccagctgctacgtgggccccaccagacagcagttcaccgtgagcagcggcgagagcccccccctgagcgccggcaacatctaccagaagagacccgtgctgggcgacatcgtgagcggccccgtgctgagctgcctgctgcacatcgccagactgtacggcgagcccgtgctgacctaccagtacctgccctacatcagctacctggtggcccccggcagcgccagcggccccagcagactgaacagcagaaaggaggccggcctgctggccgccgtgaccctgacccagaagatcatcgtgtacctgagcgacaccaccctgatggacatcctgcccagaatcagccacgaggtgctgctgcccgtgctgagcttcctgaccagcctggtgaccggcttccccagcggcgcccaggccagaaccatcctgtgcgtgaagaccatcagcctgatcgccctgatctgcctgagaatcggccaggagatggtgcagcagcacctgagcgagcccgtggccaccttcttccaggtgttcagccagctgcacgagctgagacagcaggacctgaagctggaccccgccggcagaggcgagggccagctgccccaggtggtgttcagcgacggccagcagagacccgtggaccccgccctgctggacgagctgcagaaggtgttcaccctggagatggcctacaccatctacgtgcccttcagctgcctgctgggcgacatcatcagaaagatcatccccaaccacgagctggtgggcgagctggccgccctgtacctggagagcatcagccccagcagcagaaaccccgccagcgtggagcccaccatgcccggcaccggccccgagtgggacccccacggcggcggctgcccccaggacgacggccacagcggcaccttcggcagcgtgctggtgggcaacagaatccagatccccaacgacagcagacccgagaaccccggccccctgggccccatcagcggcgtgggcggcggcggcctgggcagcggcagcgacgacaacgccctgaagcaggagctgcccagaagcgtgcacggcctgagcggcaactggctggcctactggcagtacgagatcggcgtgagccagcaggacgcccacttccacttccaccagatcagactgcagagcttccccggccacagcggcgccgtgaagtgcgtggcccccctgagcagcgaggacttcttcctgagcggcagcaaggacagaaccgtgagactgtggcccctgtacaactacggcgacggcaccagcgagaccgcccccagactggtgtacacccagcacagaaagagcgtgttcttcgtgggccagctggaggccccccagcacgtggtgagctgcgacggcgccgtgcacgtgtgggaccccttcaccggcaagaccctgagaaccgtggagcccctggacagcagagtgcccctgaccgccgtggccgtgatgcccgccccccacaccagcatcaccatggccagcagcgacagcaccctgagattcgtggactgcagaaagcccggcctgcagcacgagttcagactgggcggcggcctgaaccccggcctggtgagagccctggccatcagccccagcggcagaagcgtggtggccggcttcagcagcggcttcatggtgctgctggacaccagaaccggcctggtgctgagaggctggcccgcccacgagggcgacatcctgcagatcaaggccgtggagggcagcgtgctggtgagcagcagcagcgaccacagcctgaccgtgtggaaggagctggagcagaagcccacccaccactacaagagcgccagcgaccccatccacaccttcgacctgtacggcagcgaggtggtgaccggcaccgtgagcaacaagatcggcgtgtgcagcctgctggagccccccagccaggccaccaccaagctgagcagcgagaacttcagaggcaccctgaccagcctggccctgctgcccaccaagagacacctgctgctgggcagcgacaacggcgtgatcagactgctggcctag

SEQ ID NO: 316659 - DNA, 2673 bp, Artificial Sequence
  derived and/or modified sequence
atggatggcgaacctccagcctcttccggcctggggttgcctgattatacttccggcgtgtccttccacgatcaggcagacctgccagaaacggaggatttccaggcaggactctatgtgacagaatcaccccagccccaggaggcagaggcagtctctctgggcagactgagtgataaatcttcaaccagcgaaacatccttgggggaagagcgggcccctgatgaggggggcgcgcctgtggataaatcttctctccgatctggggatagctcacaggacctgaagcaatccgaaggcagcgaagaagaggaagaggaagaagactcctgcgtcgtcctggaagaagaagaaggcgagcaagaagaggtgacgggagcgtccgaactgactctgagcgatacagtcctgtcaatggaaactgtggtcgctggtggatccggaggtgatggtgaggaagaagaagaagccctccccgagcagagcgagggcaaggagcagaagattttgcttgataccgcctgtaagatggtgaggtggctgagcgctaaacttggtcccactgtggcgagtcgacatgtcgctcgcaatctgttgaggctactgactagttgttacgtaggccccacccgccagcagtttacagtctcatctggagagtcacctcccctgagcgcaggtaatatctaccaaaaacgcccagtcttgggcgacatcgtttccggacccgtcctgtcttgcctcttgcacatagcccggttgtacggcgagcccgtgttgacataccaatacttgccttatatatcctatctggtcgctccgggatcagcctcaggaccaagccggctgaactctaggaaagaagctggcctgctggcagcggtgaccctgacgcaaaaaattatcgtctacctgagcgataccacattaatggacattttgccacgcattagtcatgaagtgcttttgccagtgctttcttttctgacaagcttagtgacagggtttccaagtggtgcacaggcccgaaccattctttgcgtgaaaactattagcctgatcgctctgatctgtctccgaattggccaggaaatggtccagcagcatctgagcgagccggtggcaaccttctttcaggttttttcacagctccatgaattacggcagcaggaccttaagcttgatccggcaggacgcggggagggtcagttgccacaggtagttttcagcgacggccagcaaaggcccgtggaccctgccctgctggacgagctgcagaaagtatttacactagagatggcttataccatctatgtgccatttagctgtctgctcggtgacatcataaggaagatcatacctaaccacgaacttgtgggcgagctggccgcgctttatctcgagtcaatcagtcctagttctcggaatcctgcatccgttgagcctaccatgccaggcactgggcccgaatgggaccctcacggtggggggtgcccgcaggatgacggccactccggcaccttcggatcagtactggtgggtaaccgaatacaaattcccaacgactccaggcctgaaaatcccgggcccctaggacccatcagcggagtggggggcggggggctcggcagcggcagcgacgacaatgccctgaaacaggaactgcccaggagtgttcacggactgtctggaaattggctcgcttattggcagtacgagatcggcgtgagccaacaagatgcacattttcactttcatcagatccgattacagtcctttccgggccattccggcgcggtcaagtgcgtggcccccctgagctcagaggacttctttctgtccggcagtaaagatagaactgtcaggctatggcccctgtataattatggcgacggcacaagcgagactgctccgaggctggtgtacacccaacaccggaagtccgtattctttgtcgggcagcttgaagcgcctcagcacgtggtgtcctgtgatggggctgttcacgtatgggaccccttcaccgggaaaacactgcggacagtggaacctctggactcccgcgtccctctgacagcggtggctgtcatgccagccccacatacaagtataaccatggcatcctctgattccacgctccgcttcgtcgattgccgcaaaccagggctacaacacgaattccgactgggcggcggccttaatccaggactcgtccgcgccctcgcaatctctccttccggacggagcgtggtggctggattctccagcggattcatggtcctgttggacacaagaaccggccttgtgttgcgcggctggccggctcacgagggtgacatactccagatcaaggctgtcgagggctccgtcctggtctcctcttcatcagatcactcgcttactgtgtggaaggagctagagcagaaacctactcatcattacaagtctgccagtgatccaatccacaccttcgacctctacggttcagaggtcgtcaccggaactgtttctaataaaatcggtgtttgctcactcttggagcccccaagtcaggcaacaacaaagttatctagtgagaactttcggggaactctcaccagtctcgctctcctgcccaccaagagacatctgctgctaggttcagacaatggtgtgatccggctcctggcctag

SEQ ID NO: 316660 - DNA, 2079 bp, Artificial Sequence
  derived and/or modified sequence
atggacggggagcctcccgcatcaagtggcctgggattacctgactacacgtctggggtctctttccatgaccaggccgaccttccggagacagaggatttccaggcaggcctgtatgtcaccgaatctcctcagccccaagaagctgaggccgtcagcctgggccggctaagcgataagtcatcaacctaccagtatcttccttatattagctatttggtagctccgggctccgcttctgggccatccagacttaattcacgtaaagaagctgggctcctcgccgccgtcacgttgacgcaaaagatcatcgtctatctgtccgacaccactctgatggatatcttgcccaggatctctcatgaagtgctcctgccagtgctgtcctttcttacttccctggtcaccggctttccctcgggcgcccaggcccggacaattctgtgcgtcaaaacaatttctctgatagctctcatctgcctgcgcatcggccaggaaatggtccagcaacatctgtcggagccagtggccacgttctttcaagtgttctctcaattgcatgagctgcgccagcaggatctgaaactcgatcctgcaggtcggggtgagggccagctgccccaagtggtctttagtgatggtcagcagagacccgtggatcccgctctgttagacgagttacagaaggtgtttaccctagagatggcctacaccatatatgtcccgttttcctgcctattaggcgatatcatcagaaaaatcattcctaaccacgaactggtaggggagttggccgccctctatctggagagcattagtccaagtagccgtaacccagcctccgtggaacccaccatgccaggcacagggcctgaatgggacccccacggggggggctgtccacaagacgacgggcactccgggacattcggatccgtgttagtggggaaccggatccagatcccaaatgattcccgccccgagaatccgggacctctcggtcctatcagtggagttggcggaggggggctgggctctggctctgatgacaatgcccttaaacaggaactgcctcgatccgttcatgggctctctggaaattggttggcatactggcaatacgaaatcggggtgagtcagcaggacgctcatttccatttccaccagatccgcctccagtctttccctggccactcgggtgcagttaaatgtgtggcccccctgagtagtgaggactttttcttgtccggaagcaaagacagaactgtaaggctgtggccgctctacaactacggagacggaaccagcgagacggccccaagactcgtttatacccagcatcgcaagtcagtgttctttgttggtcaacttgaagctccacagcacgtggtttcttgcgatggagcggtgcacgtgtgggaccccttcacaggcaagactctacgtaccgtggaaccccttgattccagagtccctctcacggccgtcgccgtgatgcccgcccctcatacgtccatcacgatggcctcctccgacagtacgctgagatttgtggattgccgtaagccaggactgcagcacgaatttcgactggggggcggactaaatccgggtctggtgcgggcactcgctatcagcccaagcggcaggagcgtggtcgccggattctccagtggcttcatggtgttactagatactaggactggtctcgtcctgcgaggctggccagcccacgagggggatatattgcagataaaggccgtcgagggtagtgtgctggtatcatcatctagcgatcattctctgaccgtgtggaaagaactggagcaaaaacctacccaccactacaaaagcgccagcgatccaattcatacttttgatctatatgggagcgaggtggtcactggtaccgtatcaaacaagatcggcgtgtgctctcttcttgaacctccgagtcaggctactaccaaactttcttcagaaaactttcgcggaactcttacttctctggctctactacccactaagcggcacctgctacttggaagtgacaacggggttattagattgctggcctag

SEQ ID NO: 316661 - DNA, 1719 bp, Artificial Sequence
  derived and/or modified sequence
atgggcagcctcagttcccccacgtcaacatgccccactagcgccacttggttcccctccggggcgcaggctagaactattctgtgcgtgaaaactatatccttgatcgcactaatttgcctgcgaatcggtcaggagatggtccagcagcatctgtccgaacctgtggccacgttcttccaggtgttctcgcagctgcacgagcttcgccagcaggacctcaaactagaccctgctggccggggcgaaggccagttaccccaggttgtattcagcgatggccagcaacgccccgtggacccggcactcttagatgaactgcagaaggtgttcacattagaaatggcctatacgatttacgtgcctttctcatgcctcctcggggacataattcgtaagatcatcccaaatcatgagctcgtgggggaattggccgccctctacttagagagcatcagcccatcctctaggaatcccgcttcagtggagcctacaatgccgggcacgggacctgaatgggatcctcatggcggagggtgcccccaagacgatggtcatagcggtacattcgggtcagtccttgttggaaacaggatccagattcctaacgatagccggccagagaaccctggacccttgggaccgatatcaggcgtgggggggggaggactggggtcgggctcagacgataatgcccttaaacaagaattgcccagaagcgtgcacggcctgtcaggcaattggctagcgtattggcaatatgaaatcggcgtgagccagcaggatgcacatttccattttcatcagattcggctgcagtcctttccggggcacagtggcgcggtgaagtgcgtggcccccttatctagcgaggacttcttcctgtcaggatccaaggatagaaccgtgagactttggcccctctataattacggagatggtaccagtgagactgcgccccggctggtgtacacgcaacaccggaaatccgtgttcttcgtggggcagctggaagctccgcagcatgttgtgtcttgtgatggtgctgttcacgtatgggatccgtttaccggaaagacactcaggactgtggaaccattggactctagagtccctctgaccgccgtggcggtgatgcccgctccacacacgagtataacaatggcttccagcgacagcacccttcgcttcgtggactgtcgtaaacccggcttacagcacgaattccggctcggtggcggcctgaatcccggccttgtgcgagccctggcaatctcaccttcaggcaggtctgttgtggctgggttttctagcggattcatggtcttgctggacactcgcaccggcctggtcctacgcggctggcccgcgcatgagggggacattctgcagattaaggccgtggagggcagtgtgttagtatcgtctagctctgaccacagccttaccgtatggaaggagctggagcagaagcctacacaccactacaagtccgcttccgaccctatacacaccttcgacctgtatggatccgaagtagttaccggaactgtctccaataagattggtgtatgtagcttactcgagcccccaagtcaagccacaactaaactgtcttccgagaacttccggggtaccttaacctccttagcactgctgccaaccaagcgacacttgctgctagggtcggacaacggcgttattcgcttgcttgcgtag

SEQ ID NO: 316662 - DNA, 2145 bp, Artificial Sequence
  derived and/or modified sequence
atggtccggtggttgtcagccaagctgggtccgacggtagcaagtagacacgtcgctcggaatctactgcgcttactgacatcctgctacgtaggacccaccaggcaacaattcacagtctcatccggcgagtctcctcccctctctgcaggtaatatctaccagaaaaggcctgtgctcggcgatatagtgtcagggcctgtcctgtcttgcctcttgcatatcgcaagactttatggcgaaccagtgctgacctaccagtatctgccctacatctcctacctcgttgctcctggatccgcaagcggcccaagccgcttaaacagcagaaaggaggctggactcctggcagccgtgacccttacccagaagattatagtatacctctccgatacaacgctgatggacatcctccccagaatttctcatgaagttctgctgccggtgctctcttttcttacgagcctggttaccggattccctagtggggcccaggcgcggactatactctgtgtgaaaacgatctcactcatagcactgatatgcctccgcataggacaggagatggtgcaacaacatttgagcgagcccgttgccacctttttccaggtatttagtcagctgcatgaactcaggcagcaggaccttaagctagaccccgccgggaggggggaggggcagttgccacaggtcgtcttttcggacggccagcaacggcccgttgatccggcactgcttgatgagttgcagaaggtgttcacactcgagatggcgtatacaatttatgtcccgtttagctgtctcctgggcgacatcatcaggaagatcatccctaaccacgagcttgtcggcgagctggctgcactgtacctggagagcatttcaccctcttctcggaaccctgctagcgtggaaccaactatgcccggcacaggtccagagtgggatccgcacggcggcgggtgcccacaggatgacggtcacagcggcacgttcgggagcgtactggtcgggaaccgcattcagatccctaacgactctagacctgaaaaccccggacctctgggtccaatatcaggggttggcggagggggcctgggctcaggaagtgatgacaacgctctgaaacaggaactcccgagatctgtccatggcctctccggaaactggctagcctattggcagtacgagataggggtgagccagcaggatgcccactttcactttcatcaaattcgtttgcaaagcttccccggtcactccggcgctgttaagtgcgtcgcccctctgtcttctgaggacttctttttgtccggcagcaaggatcgcacagtccgtctgtggccactgtataactacggggacggtacatcggagacggccccccgcctcgtgtacacccaacacagaaagagtgtgttttttgtcggacagctggaggcaccccagcatgttgtcagctgtgatggcgcagtgcatgtctgggatccttttacagggaagacacttagaacggtggaacctcttgattcaagggttcctctgactgccgtcgctgtgatgcccgcccctcacacgtcaatcaccatggcctccagcgactcgaccttaaggtttgtagactgtcgcaagccgggcctccaacacgaattccgtctgggtggaggactgaatcctggattggtacgcgcccttgctattagcccaagcggccgaagcgtggttgcaggcttttcctctggctttatggtcttgctggatactcgtacaggcttggttctccgcggatggccagcccacgaaggcgacattctccagatcaaggctgtggagggtagtgttctggttagctcttcttcggatcatagcttaaccgtgtggaaagagttggaacagaaacctacccaccactacaaaagcgcttccgaccctatccatacgtttgacctctatggctccgaggtggtgaccggtaccgtaagcaacaagatcggggtatgcagcctccttgagccccccagtcaagcaactactaagctcagtagcgagaactttagaggcaccctcacatccctagccttgctgccaacgaaacgccacctgcttttaggcagtgataacggggtgatcaggttgctggcttag

SEQ ID NO: 316663 - DNA, 2673 bp, Artificial Sequence
  derived and/or modified sequence
atggatggagagcccccagccagcagcggcctgggcctgcctgactacaccagcggcgtgtccttccatgaccaggccgacctgcctgagacagaggacttccaggccggcctgtatgtgacagagagcccccagccccaggaggccgaggccgtgtccctgggccgcctgagtgacaagagcagcaccagcgagaccagcctgggggaggagcgggccccagatgaaggaggagcccctgtggacaagagcagcctgcggagcggggacagcagccaggacctgaagcagagcgagggcagcgaggaggaggaggaggaggaggacagctgtgtggtgctggaggaggaggagggggagcaggaggaggtgactggagccagcgagctgaccctgagtgacacagtgctgtccatggagaccgtggtggccggcggcagcggaggagatggagaggaggaggaggaggccctgcctgagcagagcgagggcaaggagcagaagatcctgctggacacagcctgcaagatggtgcgctggctgagcgccaagctgggccccaccgtggccagcagacatgtggccaggaacctgctgcggctgctgaccagctgctacgtgggccccacccggcagcagttcaccgtgagcagcggggagagcccccccctgtctgctggcaacatctaccagaagaggcctgtgctgggggacatcgtgtctggccctgtgctgagctgcctgctgcacatcgcccggctgtatggagagcctgtgctgacctaccagtacctgccctacatctcctacctggtggcccctggcagcgccagcggccccagccggctgaacagcaggaaggaggccggcctgctggccgctgtgaccctgacccagaagatcatcgtgtacctgagtgacaccaccctgatggacatcctgccccgcatcagccatgaggtgctgctgcctgtgctgtccttcctgaccagcctggtgacaggcttccccagcggggcccaggcccggaccatcctgtgtgtgaagaccatcagcctcatcgccctgatctgcctgagaattggccaggagatggtgcagcagcacctgtctgagcctgtggccaccttcttccaggtgttcagccagctgcacgagctgcggcagcaggacctgaagctggaccctgctggccgcggggagggccagctgccccaggtggtgttcagtgatggccagcagaggcctgtggaccctgccctgctggatgagctgcagaaggtgttcaccctggagatggcctacaccatctacgtgcccttcagctgcctgctgggggacatcatcaggaagatcatccccaaccacgagctggtgggggagctggccgccctgtacctggagagcatcagccccagcagcagaaatcctgcctctgtggagcccaccatgcctggcactggacctgagtgggacccccacggcggcggctgcccccaggatgatggccacagcggcaccttcggctctgtgctggtgggcaaccgcatccagatccccaatgacagcaggcctgagaaccctggccccctgggccccatctctggagtgggcggcggcggcctgggcagcggcagtgatgacaatgccctgaagcaggagctgcccaggtctgtgcacggcctgagcggcaactggctggcctactggcagtatgaaattggagtgtcccagcaggatgcccacttccacttccaccagatccggctgcagagcttccctggccacagcggggctgtgaagtgtgtggcccccctgagcagcgaggacttcttcctgagcggcagcaaggacagaacagtgcggctgtggcccctgtacaactatggagatggcaccagcgagacagccccccggctggtgtacacccagcacaggaagagcgtcttctttgtgggccagctggaggccccccagcacgtggtgtcctgtgatggagctgtgcacgtgtgggaccccttcaccgggaagaccctgaggacagtggagcccctggacagccgggtgcccctgacagctgtggccgtgatgcctgccccccacaccagcatcaccatggccagcagtgacagcaccctgcgctttgtggactgcaggaagccaggcctgcagcacgagttccggctgggcggcggcctgaaccctggcctggtgcgggccctggccatcagccccagcggccgctctgtggtggccggcttcagcagcggcttcatggtgctgctggacaccaggacaggcctggtgctgcggggctggccagcccacgagggggacatcctgcagatcaaggctgtggagggctctgtgctggtgagcagcagcagtgaccacagcctgactgtgtggaaggagctggagcagaagcccacccaccactacaagagcgccagtgaccccatccacacctttgacctgtatggcagcgaggtggtgactggaacagtgagcaacaagattggagtgtgcagcctgctggagccccccagccaggccaccaccaagctgagcagcgagaacttccggggcaccctgaccagcctggccctgctgcccaccaagaggcacctgctgctgggcagtgacaatggagtcatccggctgctggcctag

SEQ ID NO: 316664 - DNA, 2079 bp, Artificial Sequence
  derived and/or modified sequence
atggatggagagcccccagccagcagcggcctgggcctgcctgactacaccagcggcgtgtccttccatgaccaggccgacctgcctgagacagaggacttccaggccggcctgtatgtgacagagagcccccagccccaggaggccgaggccgtgtccctgggccgcctgagtgacaagagcagcacctaccagtacctgccctacatctcctacctggtggcccctggcagcgccagcggccccagccggctgaacagcaggaaggaggccggcctgctggccgctgtgaccctgacccagaagatcatcgtgtacctgagtgacaccaccctgatggacatcctgccccgcatcagccatgaggtgctgctgcctgtgctgtccttcctgaccagcctggtgacaggcttccccagcggggcccaggcccggaccatcctgtgtgtgaagaccatcagcctcatcgccctgatctgcctgagaattggccaggagatggtgcagcagcacctgtctgagcctgtggccaccttcttccaggtgttcagccagctgcacgagctgcggcagcaggacctgaagctggaccctgctggccgcggggagggccagctgccccaggtggtgttcagtgatggccagcagaggcctgtggaccctgccctgctggatgagctgcagaaggtgttcaccctggagatggcctacaccatctacgtgcccttcagctgcctgctgggggacatcatcaggaagatcatccccaaccacgagctggtgggggagctggccgccctgtacctggagagcatcagccccagcagcagaaatcctgcctctgtggagcccaccatgcctggcactggacctgagtgggacccccacggcggcggctgcccccaggatgatggccacagcggcaccttcggctctgtgctggtgggcaaccgcatccagatccccaatgacagcaggcctgagaaccctggccccctgggccccatctctggagtgggcggcggcggcctgggcagcggcagtgatgacaatgccctgaagcaggagctgcccaggtctgtgcacggcctgagcggcaactggctggcctactggcagtatgaaattggagtgtcccagcaggatgcccacttccacttccaccagatccggctgcagagcttccctggccacagcggggctgtgaagtgtgtggcccccctgagcagcgaggacttcttcctgagcggcagcaaggacagaacagtgcggctgtggcccctgtacaactatggagatggcaccagcgagacagccccccggctggtgtacacccagcacaggaagagcgtcttctttgtgggccagctggaggccccccagcacgtggtgtcctgtgatggagctgtgcacgtgtgggaccccttcaccgggaagaccctgaggacagtggagcccctggacagccgggtgcccctgacagctgtggccgtgatgcctgccccccacaccagcatcaccatggccagcagtgacagcaccctgcgctttgtggactgcaggaagccaggcctgcagcacgagttccggctgggcggcggcctgaaccctggcctggtgcgggccctggccatcagccccagcggccgctctgtggtggccggcttcagcagcggcttcatggtgctgctggacaccaggacaggcctggtgctgcggggctggccagcccacgagggggacatcctgcagatcaaggctgtggagggctctgtgctggtgagcagcagcagtgaccacagcctgactgtgtggaaggagctggagcagaagcccacccaccactacaagagcgccagtgaccccatccacacctttgacctgtatggcagcgaggtggtgactggaacagtgagcaacaagattggagtgtgcagcctgctggagccccccagccaggccaccaccaagctgagcagcgagaacttccggggcaccctgaccagcctggccctgctgcccaccaagaggcacctgctgctgggcagtgacaatggagtcatccggctgctggcctag

SEQ ID NO: 316665 - DNA, 1719 bp, Artificial Sequence
  derived and/or modified sequence
atgggcagcctgagcagccccaccagcacctgccccaccagcgccacctggttccccagcggggcccaggcccggaccatcctgtgtgtgaagaccatcagcctcatcgccctgatctgcctgagaattggccaggagatggtgcagcagcacctgtctgagcctgtggccaccttcttccaggtgttcagccagctgcacgagctgcggcagcaggacctgaagctggaccctgctggccgcggggagggccagctgccccaggtggtgttcagtgatggccagcagaggcctgtggaccctgccctgctggatgagctgcagaaggtgttcaccctggagatggcctacaccatctacgtgcccttcagctgcctgctgggggacatcatcaggaagatcatccccaaccacgagctggtgggggagctggccgccctgtacctggagagcatcagccccagcagcagaaatcctgcctctgtggagcccaccatgcctggcactggacctgagtgggacccccacggcggcggctgcccccaggatgatggccacagcggcaccttcggctctgtgctggtgggcaaccgcatccagatccccaatgacagcaggcctgagaaccctggccccctgggccccatctctggagtgggcggcggcggcctgggcagcggcagtgatgacaatgccctgaagcaggagctgcccaggtctgtgcacggcctgagcggcaactggctggcctactggcagtatgaaattggagtgtcccagcaggatgcccacttccacttccaccagatccggctgcagagcttccctggccacagcggggctgtgaagtgtgtggcccccctgagcagcgaggacttcttcctgagcggcagcaaggacagaacagtgcggctgtggcccctgtacaactatggagatggcaccagcgagacagccccccggctggtgtacacccagcacaggaagagcgtcttctttgtgggccagctggaggccccccagcacgtggtgtcctgtgatggagctgtgcacgtgtgggaccccttcaccgggaagaccctgaggacagtggagcccctggacagccgggtgcccctgacagctgtggccgtgatgcctgccccccacaccagcatcaccatggccagcagtgacagcaccctgcgctttgtggactgcaggaagccaggcctgcagcacgagttccggctgggcggcggcctgaaccctggcctggtgcgggccctggccatcagccccagcggccgctctgtggtggccggcttcagcagcggcttcatggtgctgctggacaccaggacaggcctggtgctgcggggctggccagcccacgagggggacatcctgcagatcaaggctgtggagggctctgtgctggtgagcagcagcagtgaccacagcctgactgtgtggaaggagctggagcagaagcccacccaccactacaagagcgccagtgaccccatccacacctttgacctgtatggcagcgaggtggtgactggaacagtgagcaacaagattggagtgtgcagcctgctggagccccccagccaggccaccaccaagctgagcagcgagaacttccggggcaccctgaccagcctggccctgctgcccaccaagaggcacctgctgctgggcagtgacaatggagtcatccggctgctggcctag

SEQ ID NO: 316666 - DNA, 2145 bp, Artificial Sequence
  derived and/or modified sequence
atggtgcgctggctgagcgccaagctgggccccaccgtggccagcagacatgtggccaggaacctgctgcggctgctgaccagctgctacgtgggccccacccggcagcagttcaccgtgagcagcggggagagcccccccctgtctgctggcaacatctaccagaagaggcctgtgctgggggacatcgtgtctggccctgtgctgagctgcctgctgcacatcgcccggctgtatggagagcctgtgctgacctaccagtacctgccctacatctcctacctggtggcccctggcagcgccagcggccccagccggctgaacagcaggaaggaggccggcctgctggccgctgtgaccctgacccagaagatcatcgtgtacctgagtgacaccaccctgatggacatcctgccccgcatcagccatgaggtgctgctgcctgtgctgtccttcctgaccagcctggtgacaggcttccccagcggggcccaggcccggaccatcctgtgtgtgaagaccatcagcctcatcgccctgatctgcctgagaattggccaggagatggtgcagcagcacctgtctgagcctgtggccaccttcttccaggtgttcagccagctgcacgagctgcggcagcaggacctgaagctggaccctgctggccgcggggagggccagctgccccaggtggtgttcagtgatggccagcagaggcctgtggaccctgccctgctggatgagctgcagaaggtgttcaccctggagatggcctacaccatctacgtgcccttcagctgcctgctgggggacatcatcaggaagatcatccccaaccacgagctggtgggggagctggccgccctgtacctggagagcatcagccccagcagcagaaatcctgcctctgtggagcccaccatgcctggcactggacctgagtgggacccccacggcggcggctgcccccaggatgatggccacagcggcaccttcggctctgtgctggtgggcaaccgcatccagatccccaatgacagcaggcctgagaaccctggccccctgggccccatctctggagtgggcggcggcggcctgggcagcggcagtgatgacaatgccctgaagcaggagctgcccaggtctgtgcacggcctgagcggcaactggctggcctactggcagtatgaaattggagtgtcccagcaggatgcccacttccacttccaccagatccggctgcagagcttccctggccacagcggggctgtgaagtgtgtggcccccctgagcagcgaggacttcttcctgagcggcagcaaggacagaacagtgcggctgtggcccctgtacaactatggagatggcaccagcgagacagccccccggctggtgtacacccagcacaggaagagcgtcttctttgtgggccagctggaggccccccagcacgtggtgtcctgtgatggagctgtgcacgtgtgggaccccttcaccgggaagaccctgaggacagtggagcccctggacagccgggtgcccctgacagctgtggccgtgatgcctgccccccacaccagcatcaccatggccagcagtgacagcaccctgcgctttgtggactgcaggaagccaggcctgcagcacgagttccggctgggcggcggcctgaaccctggcctggtgcgggccctggccatcagccccagcggccgctctgtggtggccggcttcagcagcggcttcatggtgctgctggacaccaggacaggcctggtgctgcggggctggccagcccacgagggggacatcctgcagatcaaggctgtggagggctctgtgctggtgagcagcagcagtgaccacagcctgactgtgtggaaggagctggagcagaagcccacccaccactacaagagcgccagtgaccccatccacacctttgacctgtatggcagcgaggtggtgactggaacagtgagcaacaagattggagtgtgcagcctgctggagccccccagccaggccaccaccaagctgagcagcgagaacttccggggcaccctgaccagcctggccctgctgcccaccaagaggcacctgctgctgggcagtgacaatggagtcatccggctgctggcctag

SEQ ID NO: 316667 - DNA, 2673 bp, Artificial Sequence
  derived and/or modified sequence
atggacggcgagccccccgccagcagcggcctgggcctgcccgactatacaagcggggtcagcttccatgaccaggcagacttacctgagacggaggactttcaggctggcctgtatgtgaccgaatcacctcagccccaagaggctgaagctgtttccttgggaaggctttcagataaatcgtccacatccgagacgtctttaggggaggaacgagctcccgatgagggcggagcgccagtggacaagtctagtctccggtctggggactcgtctcaagatctgaagcagtccgagggcagcgaggaggaggaggaggaagaggatagctgtgtggtgctcgaggaagaggagggtgaacaggaagaagtcacaggcgcctcggaacttaccctttctgatacggtgcttagcatggaaacagtggtggctggaggatctggaggagatggtgaggaagaggaggaagccctccctgaacagagcgaaggaaaggagcagaaaatcctccttgacacagcctgcaagatggtgcgatggctgtcagccaaacttggacctacggtagcctctcggcatgtcgctcggaacctgctacgcctcttgaccagctgctatgtgggtccgacgaggcagcagttcaccgtatcttccggtgagtctcctccactgagtgccgggaacatttaccagaagcgccctgtgttgggcgacatcgtgtctgggcctgtgctgtcatgtctgctacacatcgcccgcttatatggcgaaccagtcctgacctatcagtatttgccttacatcagctacctggtcgctccaggcagtgcatccggaccatctcgtcttaattcaagaaaagaggcgggacttctcgccgccgtgactttaacacagaaaataatcgtatacctgtctgacacaacattgatggacatcctgcccagaatcagtcatgaggttctgctgccagtactatctttcttgacgagtctggtgactgggttcccatccggcgcccaagcaaggaccatcctgtgcgtcaagacaattagccttattgccctgatctgccttcgtatcggtcaggagatggtccagcagcatttgtctgaacccgttgccacctttttccaggtctttagccagctccatgaattgcgacagcaggatctaaagctcgatcctgctggccggggcgagggacagctaccgcaggtggtcttttcagacgggcagcaaaggccagtggaccccgctctcctggatgagctgcagaaagtcttcaccctagagatggcttatacaatctatgtcccattctcctgccttctgggcgacataatccgaaaaatcatccccaaccacgagctcgtcggcgaactcgcagccctgtacctggaatccatttccccttcttcacggaacccagcctcggttgaaccaaccatgcccggtacggggccggagtgggatccacatgggggcggatgtcctcaggatgatggccattctggaacattcgggagcgtgttggtcgggaacagaatacaaatccccaatgactcccggcctgagaatcctggaccattaggtccaataagtggggtcggaggcggcgggctgggaagtggttcggatgataacgccctcaagcaggagttgcctcgaagtgttcatgggttatccggaaattggttagcctactggcagtacgagatcggtgtgagtcaacaggatgcccattttcacttccatcagatacgcttgcagagcttccctgggcacagtggggccgtcaagtgcgtggctccactgtcatccgaagactttttccttagcgggtcgaaagaccggacagtgcgtctgtggcctctctataactacggggacggaacttccgagaccgcccccaggctggtatacacccaacatagaaaaagtgtttttttcgtgggccagctggaagcaccgcaacatgtagttagctgcgacggagcagtgcatgtgtgggatccattcactggaaaaacccttaggaccgtggaacccttagacagtcgcgtgcctctgactgccgtggcagtgatgccggccccccatactagcatcacgatggcctcttccgattccactcttcggttcgtggattgccgcaagcccggcctccagcatgaattccggttgggtggaggccttaaccccggcctggttagagcactcgccatcagtccatccggaaggtcagtcgttgcaggattttcctccggattcatggtcctgctggacacacggaccggcctggtcttgcggggttggcctgctcatgaaggcgacattctgcaaattaaggcagtggaggggtcggtgttggtcagcagtagtagcgaccatagcctcaccgtgtggaaagagttggagcagaagccaacgcaccattacaaaagcgcatccgaccccatccatacttttgacctgtacgggtcagaggtagtgaccggcaccgtgtccaacaaaattggggtctgtagtctcctggagcctccgtcccaagccactactaaactgtcttctgagaatttcaggggcacactcacatcccttgcgttactgccgaccaagaggcatctgctcttgggatccgataacggagtgattcggctgctggcatag

SEQ ID NO: 316668 - DNA, 2079 bp, Artificial Sequence
  derived and/or modified sequence
atggacggcgagccccccgccagcagcggcctgggcctgcccgactacacgagtggagtgtcgtttcatgaccaagccgacctcccggaaactgaagactttcaagccgggctgtatgtaaccgagtcaccacagccccaggaagcggaagcggtgagcctgggacgcctgagtgacaaatcctcaacctaccagtacctgccatacatctcttacctggtggctccaggcagcgcatctggcccatcaagactgaattcccggaaagaggccgggctgctcgcagccgtcacacttacccagaagatcattgtttacttatctgacactaccctgatggatattctgccgcgtatctctcacgaggtgctgctgcctgttctatcgttccttacgtcacttgttaccggatttcccagcggcgctcaggccaggacgatcctgtgcgtgaagactatctctctgattgctttaatatgcttgcggattggacaggagatggttcaacaacacctgagtgaaccagttgccacattcttccaggtattcagccagttgcatgaactccgccagcaggacttaaagctggaccccgccggcaggggcgaaggtcagcttccccaggtcgtgttttcagacggccagcaacggcccgtagatccagctctcctcgacgagctgcagaaagtcttcactctcgagatggcctacaccatttacgtgcctttcagttgtctcctgggcgatattatacgcaagattattccaaatcacgagctggtgggcgagctagccgcactgtacctagagagcatttcaccttcgtctaggaacccggcttcagtcgagccaacaatgcccggcaccggcccggagtgggatcctcacgggggtggctgtccacaagacgacggtcacagcggcacattcggaagtgtcctggtcggtaataggatacagattcccaatgacagccgcccagagaaccctggcccattggggcccatcagcggagtcgggggtggcggcctgggcagtggctccgacgacaatgccctgaagcaagagctgcctcggtcggttcacggactgagtggcaactggttggcctactggcagtacgagattggggtttcccagcaagatgcccattttcatttccatcagattcggttgcagagtttccccggtcacagtggggccgtgaaatgcgtggctcctttaagctccgaggactttttcctttctggctccaaggaccggacagtccgtctgtggcccctctacaactacggggacgggacgagcgagactgctcctcgtctggtgtacacacaacacagaaaatctgtgttctttgtagggcagctggaggctccccagcatgtggtgtcttgtgatggagctgttcatgtctgggacccatttactgggaaaacgctgagaactgtggagcctttggatagtcgggttcctctgaccgccgtggccgtgatgccagcgcctcatacatctatcacaatggccagttcagatagcactctgcgctttgtggactgtcgcaagcctggtttgcagcacgagtttagactcggaggtggcctcaacccaggcttggttagggcactggccatttctccatccggccggtctgtggtcgccggcttctcctcaggattcatggttctgctcgataccagaaccgggctagtcctgcgagggtggcctgcccacgaaggtgacatcttgcagatcaaggcagtggaggggtctgtgctggtttcctcatccagcgatcactcactgacagtgtggaaggagctggaacaaaaacccacccatcactataaaagtgcctcagatcccatacacacctttgacttgtacggcagtgaagtcgttactggcacagtctccaacaagattggcgtgtgtagtttgctcgagccaccgtcccaggcgactaccaagctaagctctgagaatttccgcggtacacttacatcactggccttactccctacaaagagacacctgttgctgggtagcgacaacggagttatcaggcttttggcttag

SEQ ID NO: 316669 - DNA, 1719 bp, Artificial Sequence
  derived and/or modified sequence
atgggcagcctgagcagccccaccagcacctgccccaccagcgccacctggtttcccagcggcgcgcaagctcgtactattttgtgtgtcaagacaatttccctgatcgccctcatttgccttcggatagggcaagaaatggttcagcagcacctgtcagagccagttgccactttttttcaagtcttttcccagctccatgaactccggcagcaggacctcaaactcgatcccgccggtagaggggaaggccagctcccacaggtagtcttttcggatggccagcaacggcctgttgacccggcacttttggacgaacttcaaaaggtctttactttagagatggcctacaccatttatgttcctttcagctgcctcctgggtgacatcatccggaagattattcccaatcatgaattggtgggcgaactggctgccttgtatctagagtctatatcacccagcagccgaaaccctgccagtgtagagccaacaatgcctggaacaggacctgaatgggatccacacgggggaggctgcccccaggacgacgggcactccggcactttcgggtcggtactggtggggaatcggattcagattcctaacgactcacggccagagaatccggggcctctgggacccatcagcggggtgggaggggggggactcggctcgggcagtgatgacaacgcattgaagcaggagctgccgaggtcagtgcacggcctgtccggaaactggttggcatactggcagtacgaaattggagtcagccagcaggacgcccacttccactttcatcagatacgccttcagtcctttccagggcactccggcgccgtaaaatgtgtggctcctctctctagtgaggactttttcctgagcggaagcaaggatcggacagtgaggctgtggcccctgtacaattacggcgacggtacctctgaaactgcccctcggctagtctatacccagcaccgcaaatccgtattcttcgtgggacagcttgaagcaccacaacacgttgtctcatgcgatggcgctgtgcatgtttgggaccctttcacggggaagacattacggaccgttgaacccctggactcccgagtgccactcactgctgtggcagttatgccagccccccacacgagtatcacaatggctagctcagatagtaccctccgattcgttgattgcaggaagcccggcttgcagcatgaattcagactgggcggcggcctaaatccgggcctcgttcgcgccctggccatctctccttctggtcgctcagttgttgctgggttcagcagcggcttcatggtgttgttggatacacggaccggtttggtgctgagaggttggccggcccacgaaggcgacatcttgcagatcaaggcagtcgaaggctcagtcctcgtgagctcttccagtgatcatagtctgactgtgtggaaagagctggaacagaagccgacacaccactataaatccgctagcgacccaatacacactttcgatctttacggctccgaagtggtcactggaactgtgtctaacaagatcggggtgtgctcccttctcgagccaccaagccaagccaccacgaaactatcatccgaaaacttccgcggaacgttaactagcctagcgttgttgcccacgaaacgtcatttgcttctaggctctgacaacggagtgataaggctcctggcatag

SEQ ID NO: 316670 - DNA, 2145 bp, Artificial Sequence
  derived and/or modified sequence
atggtgcggtggctgagcgccaagctgggccccaccgtggccagcagacatgtggcccggaatcttctgcggttgctcacatcttgttatgtagggcccacacgccagcagtttaccgtctccagcggagaatcacctccattgagtgctggcaacatttatcagaagagacctgtgctgggcgacattgttagcggccctgttctctcatgtcttttgcacattgcaaggctttatggagagccggtactgacctaccagtatcttccctatatatcttatcttgtggcaccaggttcggccagcggcccttctcggctgaactctagaaaagaggccggcctgttggccgccgtaacgctgacccagaagataatagtgtacctaagcgacacaactctgatggacatcctccctcgcattagccatgaagtgcttctcccagtgcttagctttctgactagtctagtcacggggtttccttctggcgcgcaggcccggacgattttgtgtgttaaaaccatctcccttatcgccctgatctgtctccggattggtcaggagatggtccaacagcatctttctgagcccgtcgccactttcttccaagtctttagccaactacatgaactgaggcagcaggacttgaaactggaccctgccggacgcggggaggggcagcttcctcaggtggtgttttcagatggccagcagcgcccagtggatcctgcactactggacgagctccagaaagtttttaccctggagatggcgtataccatctatgtgccattctcgtgtctccttggtgacatcatccgtaagataatcccaaaccatgagctggtgggagagctcgcagcgctctatctggagagtatctccccctctagccgcaatcccgcctcagtggagcctaccatgccaggaaccggccccgagtgggacccacacgggggcggctgcccgcaggacgatggccactctggcacgtttggtagcgtactcgtggggaaccgcatccagatccccaatgacagtcggcccgagaacccagggccactggggccaatctccggagtaggagggggaggactcggctctgggtcagatgacaacgccctgaaacaagaacttccgagaagcgttcacggcctttccgggaactggctggcctactggcagtatgagattggggtgagccaacaggatgcccacttccattttcaccagattcgcttgcaatctttccccggtcacagtggggctgtgaaatgcgtggctccactttcctccgaagattttttcctgtctggaagcaaggacagaacagtgaggctgtggccactgtataactatggggacggcacctccgagaccgcaccaagattggtgtatacccagcatcgcaagtccgtgttttttgtaggccaactcgaggctccacagcacgtggtctcgtgtgatggtgccgtccacgtttgggatcctttcacaggtaagacactaagaacagtggagcccctggattctagagtacctctgactgcggtggcagtaatgcccgcaccacatactagcatcacaatggcatccagtgacagcaccctcagattcgtggattgtaggaaacctggcctgcagcacgagtttcgccttgggggagggcttaatcccggactggtgagggccctcgcaatctcaccgagcggcaggagcgtcgtggccgggttttcttccggctttatggtgctgctggatacacggaccgggctcgttctcaggggctggcccgctcacgagggcgatatccttcagataaaagctgtggagggaagtgtgcttgtcagctcctccagcgaccacagcctgaccgtgtggaaggagctcgaacagaaacccacgcatcattataagtctgcctcagaccctatccatacctttgacctttacggtagtgaggtagtgacgggcaccgtcagtaacaagattggtgtttgctccctcttagagccgccttcccaggcaactacaaagctgtcgagcgaaaatttcaggggaacactgactagtctggcattactgcccactaaacggcatctgctgttgggctccgacaatggagtgatccgcttgctagcctag

SEQ ID NO: 316671 - DNA, 2673 bp, Artificial Sequence
  derived and/or modified sequence
atggatggggagccgccagcatcgagcgggcttggcttgccagattatacatccggtgtttctttccacgatcaggccgatctgccggagaccgaggatttccaggccggactctacgtaacggaatcaccacagcctcaagaagcagaggccgtgtccctggggcgtctctccgataagtcaagcacatccgaaacctctctgggggaggagagggcacccgacgaaggtggagcccctgtggataaaagttcactgcgatctggcgactcatctcaggacctgaaacagagtgaagggtctgaagaagaggaggaagaggaggactcctgtgtagttttggaggaggaggaaggcgagcaggaggaggtcacaggcgcaagtgagctaacattgagcgatactgtgctaagcatggagacagtcgtagcaggagggagcggtggggacggagaggaggaagaagaggctctccccgaacagtccgagggaaaagaacagaagattcttctggatacagcttgcaagatggttcggtggttaagcgcgaaattaggaccaaccgtcgcatccagacacgtggccaggaatctgctgcgccttctcacttcgtgttatgtgggacccacacggcagcagttcaccgtctccagcggggaatccccacctctctcagcgggtaacatataccagaagaggccagtcctcggcgatatcgtcagcggccctgttctgtcctgccttctccacatcgctcgtctgtacggggaaccggtgctgacgtaccagtacctgccttatatctcctacttggtcgcccctggctctgcgagcggaccctctagattgaattcgaggaaagaggccggtcttctggctgctgtgacattaacacagaagattatcgtatatttgtctgataccacactcatggacattctgccacggatcagccatgaagttctgctgccagtactaagtttcctgacgtcactggttactggctttccgtcaggagctcaggccaggacaattttgtgcgttaaaacaataagtctcatagctcttatctgcctgagaatcggacaggagatggtgcagcagcacctgtccgagcccgtggcaaccttctttcaggtgttctcccagttgcacgaactccgacagcaagacttgaaactggaccctgctggaagaggggaggggcagctcccacaggtagtgttctctgatgggcaacagcgacctgtggatccggcactccttgatgagctgcagaaggtgttcacactggaaatggcctacacgatttacgtgcccttttcatgtttgctcggggatatcatcaggaagatcattccgaaccacgaactggtcggcgagctcgcagcactgtacctggagtcgatctctcccagttcccgcaatccagcgagcgttgaacctaccatgccagggaccggtccggaatgggacccccatgggggaggatgtcctcaggatgacggccactccggcacttttgggagtgtgctcgtcggaaacagaatacagatacctaacgattccaggccagaaaaccctggtcccctggggcctatatctggggtcggcggaggaggcctagggagcggttcagatgataacgccctgaagcaggagctgcctagaagcgttcacggcctgagcgggaattggcttgcttattggcagtacgagatcggtgtgtcccagcaggacgcacacttccatttccaccagattagactgcagtcatttccagggcacagcggggctgtgaaatgcgtcgcacctctgagcagtgaggatttctttctcagcggttcgaaagatcgcaccgtcagattgtggccgctgtacaactacggagacgggaccagcgagacagcacccaggctcgtctacactcagcacagaaagtcagtcttcttcgtcgggcagctcgaggctcctcaacacgttgttagctgtgacggggctgtgcacgtctgggatcccttcactggcaaaacgttacgcactgttgagccattagattctcgggtgccactgacggcggtggcagtaatgcccgctcctcacacctcaatcacaatggcaagctcagactctacccttcgctttgttgattgccgcaagcccggactgcagcatgagtttcggttgggtggcggtcttaatccaggacttgtgcgggctctcgctataagtccatccggacggagtgtggtcgccggattttcctctggcttcatggtactgctcgacacaagaactggcctggtgttgcggggatggccagcccacgaaggggatatactgcagatcaaggctgtcgaaggcagtgtgttagtgtcgtccagctccgaccacagcctcaccgtttggaaagagctggagcagaagccgacccatcactataaaagcgccagcgaccctatccatacttttgatttgtatgggagtgaggttgtcacaggcaccgtcagcaacaaaataggggtgtgctcactgttggaacccccaagccaggctactacaaagctgtcaagtgagaacttccgcggaacgctcaccagtctggcattattgcctactaagagacaccttctccttggttccgataacggagtgatccgcctgctggcatag

SEQ ID NO: 316672 - DNA, 2079 bp, Artificial Sequence
  derived and/or modified sequence
atggatggtgagccgcctgcttccagcggcctcgggttaccagactatacctcaggcgtgtcttttcacgaccaggctgacctcccagaaaccgaagactttcaagcaggactgtatgttaccgaatccccgcaaccccaggaggcagaagcagtcagtctgggtcggctgtccgacaaatcctccacgtaccagtatcttccttacatcagctatctggtagctcccggatctgcatctggacctagccgactgaatagccgcaaggaggccggactgctagccgcagtaacattgactcagaagataatcgtgtatctctctgacactactctgatggatatactacctcggattagccatgaggtcttgctgccagtattaagcttcctgacctccctggtgactggttttccctccggggcacaagcacgtaccattctatgtgtcaagactatctcactgatagccctcatttgcttgcgaataggccaagagatggtgcagcagcacctttcagaacccgtcgctacattctttcaggtgttcagccaactccacgagcttcggcagcaggatcttaagctggatcccgcaggcaggggggagggacagctgcctcaagtagttttcagcgatggccaacaacgtcctgtggatcccgcacttttggatgagctgcagaaggtctttaccctggaaatggcttatactatttatgtccccttttcgtgcttactaggggacatcattcgaaaaatcataccgaaccacgagctcgtgggtgaactggctgcgctctatctcgaaagcatatctccgtcatctcgaaatcctgcgagtgttgaacctaccatgcctggaaccgggccagagtgggaccctcacgggggaggctgtccacaggatgatggtcatagcggcacgtttgggtccgtcctcgtggggaatcggatacaaatccccaacgactctcgcccagagaaccctggaccgctcggtcccatatcaggcgtgggcggaggagggctggggtccggctcagatgacaacgcgctcaagcaggaactcccccgttccgtgcatggattgagtgggaattggctggcatattggcagtatgagataggcgtttctcagcaggatgctcattttcattttcaccagatcagattacagtcctttcccggtcacagtggcgctgtaaaatgcgtggctcctctctcttctgaggacttcttcctgtctggcagtaaagatcggactgtgcgattatggcctttgtacaattacggtgacgggacttccgagaccgccccacggctggtgtatacccagcacagaaagtctgttttctttgtcggacagctagaggcgccacagcacgtggtctcttgcgatggcgctgtacacgtttgggaccccttcaccggaaaaacactgcgcacagtggagcccctggattcaagagtgcccctcacagctgtggcagtgatgcccgctcctcatacatccatcacaatggcttcaagcgactccactctgaggttcgtagattgccgaaaaccgggactgcagcatgagtttcgcctcgggggagggctaaatcccggtctggtgcgagcactggccatcagcccgtcagggagaagcgtggtggccggttttagcagtggcttcatggtgctgctcgacacccggactgggcttgttttgaggggatggccagcgcacgaaggagacattttgcagattaaggccgtggagggctcggttttggtcagcagctcctctgatcattccctgacggtttggaaggagctggagcagaagcccacccatcattataaatccgcttcagaccccatccacaccttcgacctctacggtagtgaggtcgtgaccggtactgtctcaaataagattggcgtgtgtagcctgttagaacctccgagtcaggccacaacaaaattgtccagcgaaaattttagaggaacactgacctcgctcgcccttcttcccaccaagcggcatttactactgggttccgacaatggcgttatccgcttgttagcctag

SEQ ID NO: 316673 - DNA, 1719 bp, Artificial Sequence
  derived and/or modified sequence
atgggtagcctaagcagtcccacatccacctgtcccacctccgccacgtggtttccttccggcgctcaggcccgtacaatactctgtgtcaagactatctcactgattgccctgatatgtctccgcatcggccaagaaatggtgcagcagcatctgagcgagcctgtggccacattttttcaggtgttcagccagctgcatgaattgcggcagcaggatcttaagttagatcccgctggacgcggtgagggtcagttaccacaagtggttttcagcgatggacagcagcgaccggtggatcccgcactcctggacgaattacagaaggtgttcactctcgagatggcctatacaatctatgtccctttctcctgccttctgggcgacatcatacgaaaaataatccccaaccatgaattagtcggagaactggctgccttatatctggagagtatcagcccctcttcccggaaccctgcctctgttgagcctactatgcccggtacaggacctgagtgggatccacacggtggtggctgtccacaggacgacggccatagcggcacttttggctctgtccttgtggggaaccgcattcagatccccaatgacagccggcctgaaaatccgggtcccctgggcccaatcagcggagtagggggagggggactaggttctggttccgatgacaatgccctcaagcaggagctgcccaggtccgtgcatggtctctccggtaattggctagcatattggcaatatgaaattggagtgtctcagcaggacgctcactttcattttcaccagattagactgcagtcatttccgggacatagtggcgcagttaagtgtgtggccccactgagctcagaggatttttttctttcgggaagtaaagaccggacagtgcgactttggccactgtataattatggcgacggtacaagcgagactgcaccccgattagtatatactcagcatcgcaaatcggtatttttcgtgggacaactggaagcaccacaacacgtagtctcatgtgatggggctgtgcatgtgtgggatccatttaccggaaaaacactgagaaccgtagaacctctggacagcagagtgcctttaaccgccgtcgccgtgatgcctgcaccacatacatccatcactatggcctctagcgacagtacactgagattcgttgactgccggaaaccagggctccaacacgagtttcgcctaggcggaggactgaacccaggactcgttagggccctcgctataagtccctctggcaggtctgtggttgcaggattttcttctggctttatggtgctcttggacacccggacagggctggtgctgagaggttggccagcacacgagggagatattctgcaaatcaaagccgttgagggcagcgtgctggtaagttcttcttcggaccactccctcacagtgtggaaagagttagaacagaagcccacccaccattacaagagtgctagtgaccctatacatacattcgacctgtatggtagtgaagtagtcaccgggacagtttctaataaaataggcgtttgctctttattagagcctcctagccaggcaacaaccaagttgtcttctgagaacttccgaggaacgctgacaagcctggccctgcttcctaccaagcgacacctgctgctcgggagtgacaacggggttatccgtcttctggcctag

SEQ ID NO: 316674 - DNA, 2145 bp, Artificial Sequence
  derived and/or modified sequence
atggtgcgctggctttctgctaagctgggccctaccgtggccagcagacatgtggcgaggaacctgctgcgcctactcacatcttgctatgtaggcccaacaaggcagcagtttactgtttctagcggggagtcccccccactgagtgccggtaatatttaccagaagaggccagtacttggggacattgtgtccggacccgttctttcctgcctcctgcacatagcccgattgtatggcgagcctgtccttacctaccagtatctgccctatattagctacttagtggccccagggagtgcaagcggcccttcgcggctgaattcgagaaaagaggctggattgttggctgctgtgaccctgacgcagaagatcattgtctatctctccgacacgacactgatggacattctgcccagaatatctcacgaagtgttactccccgtgttgtcattcctgacctctctcgtcaccggcttcccttctggcgcacaggcacgtactatcctttgcgtgaaaacaatatcactcatcgcactcatttgccttcgtattggacaggaaatggttcagcagcatctaagtgaacctgtagccacattcttccaggtcttctcccagctacatgagctgcgtcagcaagacctcaaacttgacccagctggccgaggggaaggacagctgccacaggttgttttttcagatggccagcagagaccggtcgaccctgccctgctcgacgaactgcagaaggtattcactcttgagatggcctacacaatttatgtacctttctcctgcctcctgggggatatcatcagaaaaatcattccaaatcatgaacttgtgggagaattagccgcactctacttggagtcaatttcaccctccagccggaaccccgcatcagtggaacccacaatgccgggtaccgggccagagtgggatccacatggcggaggctgccctcaagatgatgggcacagcgggacgttcggctctgtgctcgtggggaatagaatccagatccctaacgacagccgtcccgagaaccccggacccctggggcctatttccggcgtcggtggcggaggtctcgggagtgggagcgacgacaatgccttgaagcaggaactgcccaggagcgtccacggcctctccggtaattggttggcttattggcagtatgagattggcgtctcgcagcaggatgcacacttccacttccatcagatcagattacaaagttttcctggccactccggggctgtaaaatgcgtcgcccctctctcctcagaggacttctttctttctggttccaaagaccgcaccgtgcggctgtggcccctgtacaattatggcgatggtacaagcgaaactgctccaagactggtgtacacacagcatcgcaagtccgtcttctttgtcggacagttggaggccccacaacacgtggtgtcttgtgacggtgcagtgcatgtgtgggatccctttacaggcaaaacactgagaacagttgaacctctggactctagagtaccgctgaccgctgttgcagtcatgccagcgccacatacatctatcactatggccagcagcgattcaaccctgagatttgtggattgtcgcaagcccggactccaacatgaatttcgacttggaggtggtctcaatcctggactcgtgagggccctggcaatttcaccaagtgggcgatctgtcgttgcgggttttagttcaggtttcatggttctgttggacaccagaacagggctagtgctgcggggatggcctgctcacgagggtgatatcctccagatcaaggcagtggagggtagcgtgttagtaagttcatccagcgatcactctttgactgtgtggaaagaactggagcagaaacctacacatcattacaaatctgcaagtgatccaatccatacctttgatctgtatggcagcgaggtggttacaggaacagtgtcaaataagatcggggtgtgtagcctgttggagcccccatcccaggccaccacaaaactttcaagtgagaacttccgaggcaccctcaccagtctcgcattactccccactaagaggcacctgctgctgggcagcgacaacggcgtgatccgactgctagcctag

SEQ ID NO: 316675 - DNA, 2993 bp, Artificial Sequence
  derived and/or modified sequence
atggatggggagcctcctgcctcctcgggcctggggctcccagactacacgtctggcgtcagcttccacgaccaggctgacctccctgagacagaggacttccaagccgggctctatgtgactgagtctccccagccccaggaggctgaggctgtgagcctgggccggctgagtgacaagagcagcacctaccagtacctgccctacatcagctacctggtggccccagggagtgcctcaggccccagccgactgaacagccgtaaggaggcggggctgctggccgcggtgacgctgactcagaagatcatcgtgtacctctcagacaccacactcatggacatcctgccccggatcagccatgaggtcctgctgcccgtgctcagcttcctcacctccctcgtcacggggttcccaagtggggcccaggctcggaccatcctgtgtgtgaaaaccatcagcctcatcgccctcatctgcctgcgcattggacaggagatggtccagcagcacctgagcgagcccgtggccacctttttccaggtcttctctcagctgcatgagcttcggcaacaggatctgaagctggaccctgcgggccgtggtgagggccagctgccacaggtggtcttctctgatgggcagcagcggcccgtggaccccgccctgctggacgagctgcagaaggtgttcaccctggagatggcatacacaatctacgtgcccttctcctgcctgttgggtgacatcatccggaaaatcatccccaaccacgagctggttggggagctggcggcgctgtacttggagagcatcagccccagcagtcgcaaccctgccagcgtggagcccaccatgcccggcaccgggcccgagtgggacccccatggtgggggctgccctcaggatgacggccactcagggacctttgggagcgtcctggtggggaaccgcattcagatccccaatgactctcggcctgagaaccccggaccactgggccccatctcgggggtgggtggcgggggcctgggcagcgggagcgacgacaacgccctgaagcaggagctgccgcggagcgtgcacgggctgagcggaaactggctggcgtactggcagtacgagatcggcgtgagccagcaggatgcccactttcacttccaccagatccgcctgcagagcttcccgggccactcgggggccgtcaagtgcgtggcacccctaagcagcgaggacttcttcctgagcggcagcaaggatcgtaccgtgcgcctctggccgctgtacaactacggcgacgggaccagcgagacggccccacgcctcgtctacacccagcaccgcaagagcgtcttcttcgtgggccagcttgaggccccgcagcacgtggtgagctgtgacggggctgtgcacgtctgggaccccttcacagggaagacccttcgcacagtggagccgctggacagccgggtgcccctgactgcggtggctgtcatgcccgccccccacaccagcatcaccatggccagctctgactctaccctgcgctttgtggactgcaggaagcctggtctgcagcacgagttccgactgggcggtgggctgaaccctgggcttgtccgtgccctggccatcagccccagtggccgtagtgtcgtggccggcttctcctcaggcttcatggtgctcctggacacccgcacaggcctggttctgcgaggctggccagcccacgagggggacattctgcagatcaaggcggtggagggcagcgtcctggtcagctcctcctctgaccattccttgaccgtctggaaggagctggagcagaagcccacccatcactacaagtcagcatccgaccccatccacacctttgacctgtacggcagcgaggtggtcactggcaccgtgtccaacaagattggcgtctgctccctgcttgagccaccctcgcaggccaccacgaagctcagctctgagaacttccgcggcacgctcaccagcctggccttgctgcccactaaacgccacctcctgctgggctcagacaacggggttatccgcctcctggcatagactgaggcaggagctggccgggcaagggtgggaagacatctgcgggcgcgtgtccactcaccctgttccctgagcagcagctccctccagggaggccctgggtcccacgccctgggtgcccacatggcctgccaactagggcctgcaaatggagtgggggagtcctggcccctgaatcaccagagccaccaagcctgccagaggggtctcattcatggcttggggacacagggctcctagcaagcaggaagttaagagcaggaggaagcgttgctaccttcacttctccccagctctgccctctgggtccacatgaggacagggaagctcgggaaggggaagggagactggccctgcccagccggtctctagcccctcagcccccgctgggcactctctgtcccatccctctaggacagggaagctggcctggtccagggcactgatggtgcttggattccagcctaaggaaggctggccgtggtccaggagttaagggcttgggtctggggtttaagtggccacccatccaggccctggccagtgtgggaccgggacgggaaggaagaaggaggctaggagcagggggaaaaggtgcacttggccagtggcgcctgccaggagtgagtccatgcgttgtctgcccacccctaccacagtgtttgtgccttcagctgagggggcagcctctgggccctgaacccctgctggggctccacgaccctgagagaaggggtgagaagaatcatctctgcacctcgggtctctgccagaggaagacttaagcatccctgcgacctcacattctagacagagatgaggtccaggggttggcccctgctgccttctcacaatttgcaatagatgtaaataggaccaataaatcctttggaagagccatggggtgaactgag

SEQ ID NO: 316676 - DNA, 2356 bp, Artificial Sequence
  derived and/or modified sequence
tccgcctgctgacgtcttgttatgttggacccactcggcagcagttcacagtgagcagtggcgagagcccaccgctgagcgccggcaacatctaccagaagaggccggtcctgggcgacatcgtgtcagggcctgtgctcagctgcctcctccacatcgcccgcctgtatggggagcctgtcctcacctaccagtacctgccctacatcagctacctggttcccaagtggggcccaggctcggaccatcctgtgtgtgaaaaccatcagcctcatcgccctcatctgcctgcgcattggacaggagatggtccagcagcacctgagcgagcccgtggccacctttttccaggtcttctctcagctgcatgagcttcggcaacaggatctgaagctggaccctgcgggccgtggtgagggccagctgccacaggtggtcttctctgatgggcagcagcggcccgtggaccccgccctgctggacgagctgcagaaggtgttcaccctggagatggcatacacaatctacgtgcccttctcctgcctgttgggtgacatcatccggaaaatcatccccaaccacgagctggttggggagctggcggcgctgtacttggagagcatcagccccagcagtcgcaaccctgccagcgtggagcccaccatgcccggcaccgggcccgagtgggacccccatggtgggggctgccctcaggatgacggccactcagggacctttgggagcgtcctggtggggaaccgcattcagatccccaatgactctcggcctgagaaccccggaccactgggccccatctcgggggtgggtggcgggggcctgggcagcgggagcgacgacaacgccctgaagcaggagctgccgcggagcgtgcacgggctgagcggaaactggctggcgtactggcagtacgagatcggcgtgagccagcaggatgcccactttcacttccaccagatccgcctgcagagcttcccgggccactcgggggccgtcaagtgcgtggcacccctaagcagcgaggacttcttcctgagcggcagcaaggatcgtaccgtgcgcctctggccgctgtacaactacggcgacgggaccagcgagacggccccacgcctcgtctacacccagcaccgcaagagcgtcttcttcgtgggccagcttgaggccccgcagcacgtggtgagctgtgacggggctgtgcacgtctgggaccccttcacagggaagacccttcgcacagtggagccgctggacagccgggtgcccctgactgcggtggctgtcatgcccgccccccacaccagcatcaccatggccagctctgactctaccctgcgctttgtggactgcaggaagcctggtctgcagcacgagttccgactgggcggtgggctgaaccctgggcttgtccgtgccctggccatcagccccagtggccgtagtgtcgtggccggcttctcctcaggcttcatggtgctcctggacacccgcacaggcctggttctgcgaggctggccagcccacgagggggacattctgcagatcaaggcggtggagggcagcgtcctggtcagctcctcctctgaccattccttgaccgtctggaaggagctggagcagaagcccacccatcactacaagtcagcatccgaccccatccacacctttgacctgtacggcagcgaggtggtcactggcaccgtgtccaacaagattggcgtctgctccctgcttgagccaccctcgcaggccaccacgaagctcagctctgagaacttccgcggcacgctcaccagcctggccttgctgcccactaaacgccacctcctgctgggctcagacaacggggttatccgcctcctggcatagactgaggcaggagctggccgggcaagggtgggaagacatctgcgggcgcgtgtccactcaccctgttccctgagcagcagctccctccagggaggccctgggtcccacgccctgggtgcccacatggcctgccaactagggcctgcaaatggagtgggggagtcctggcccctgaatcaccagagccaccaagcctgccagaggggtctcattcatggcttggggacacagggctcctagcaagcaggaagttaagagcaggaggaagcgttgctaccttcacttctccccagctctgccctctgggtccacatgaggacagggaagctcgggaaggggaagggagactggccctgcccagccggtctctagcccctcagcccccgctgggcactctctgtcccatccctctaggacagggaagctggcctggtccagggcactgatggtgcttggattccagcctaag

SEQ ID NO: 316677 - DNA, 3315 bp, Artificial Sequence
  derived and/or modified sequence
tggagaccctttcagccccgggaggaagcggagcccagaccgagccagagcggagcagcgggagggagggcggggaggccgccgggcaggaagcggggtcccgcccgggcctctggagccacgtgcgcttgtttccgtgctggggcgatcacgtgacccgcgtcagctgacccgtcacggtggagcccggtgctcgcgcccggcagcctctgccccgccgcgcccggagcgcaggacccgcggagggatacagcctgcaagatggtccgctggctgtctgccaagctcggccccacagtggcctctcgccacgtggcccggaacctgctccgcctgctgacgtcttgttatgttggacccactcggcagcagttcacagtgagcagtggcgagagcccaccgctgagcgccggcaacatctaccagaagaggccggtcctgggcgacatcgtgtcagggcctgtgctcagctgcctcctccacatcgcccgcctgtatggggagcctgtcctcacctaccagtacctgccctacatcagctacctggtggccccagggagtgcctcaggccccagccgactgaacagccgtaaggaggcggggctgctggccgcggtgacgctgactcagaagatcatcgtgtacctctcagacaccacactcatggacatcctgccccggatcagccatgaggtcctgctgcccgtgctcagcttcctcacctccctcgtcacggggttcccaagtggggcccaggctcggaccatcctgtgtgtgaaaaccatcagcctcatcgccctcatctgcctgcgcattggacaggagatggtccagcagcacctgagcgagcccgtggccacctttttccaggtcttctctcagctgcatgagcttcggcaacaggatctgaagctggaccctgcgggccgtggtgagggccagctgccacaggtggtcttctctgatgggcagcagcggcccgtggaccccgccctgctggacgagctgcagaaggtgttcaccctggagatggcatacacaatctacgtgcccttctcctgcctgttgggtgacatcatccggaaaatcatccccaaccacgagctggttggggagctggcggcgctgtacttggagagcatcagccccagcagtcgcaaccctgccagcgtggagcccaccatgcccggcaccgggcccgagtgggacccccatggtgggggctgccctcaggatgacggccactcagggacctttgggagcgtcctggtggggaaccgcattcagatccccaatgactctcggcctgagaaccccggaccactgggccccatctcgggggtgggtggcgggggcctgggcagcgggagcgacgacaacgccctgaagcaggagctgccgcggagcgtgcacgggctgagcggaaactggctggcgtactggcagtacgagatcggcgtgagccagcaggatgcccactttcacttccaccagatccgcctgcagagcttcccgggccactcgggggccgtcaagtgcgtggcacccctaagcagcgaggacttcttcctgagcggcagcaaggatcgtaccgtgcgcctctggccgctgtacaactacggcgacgggaccagcgagacggccccacgcctcgtctacacccagcaccgcaagagcgtcttcttcgtgggccagcttgaggccccgcagcacgtggtgagctgtgacggggctgtgcacgtctgggaccccttcacagggaagacccttcgcacagtggagccgctggacagccgggtgcccctgactgcggtggctgtcatgcccgccccccacaccagcatcaccatggccagctctgactctaccctgcgctttgtggactgcaggaagcctggtctgcagcacgagttccgactgggcggtgggctgaaccctgggcttgtccgtgccctggccatcagccccagtggccgtagtgtcgtggccggcttctcctcaggcttcatggtgctcctggacacccgcacaggcctggttctgcgaggctggccagcccacgagggggacattctgcagatcaaggcggtggagggcagcgtcctggtcagctcctcctctgaccattccttgaccgtctggaaggagctggagcagaagcccacccatcactacaagtcagcatccgaccccatccacacctttgacctgtacggcagcgaggtggtcactggcaccgtgtccaacaagattggcgtctgctccctgcttgagccaccctcgcaggccaccacgaagctcagctctgagaacttccgcggcacgctcaccagcctggccttgctgcccactaaacgccacctcctgctgggctcagacaacggggttatccgcctcctggcatagactgaggcaggagctggccgggcaagggtgggaagacatctgcgggcgcgtgtccactcaccctgttccctgagcagcagctccctccagggaggccctgggtcccacgccctgggtgcccacatggcctgccaactagggcctgcaaatggagtgggggagtcctggcccctgaatcaccagagccaccaagcctgccagaggggtctcattcatggcttggggacacagggctcctagcaagcaggaagttaagagcaggaggaagcgttgctaccttcacttctccccagctctgccctctgggtccacatgaggacagggaagctcgggaaggggaagggagactggccctgcccagccggtctctagcccctcagcccccgctgggcactctctgtcccatccctctaggacagggaagctggcctggtccagggcactgatggtgcttggattccagcctaaggaaggctggccgtggtccaggagttaagggcttgggtctggggtttaagtggccacccatccaggccctggccagtgtgggaccgggacgggaaggaagaaggaggctaggagcagggggaaaaggtgcacttggccagtggcgcctgccaggagtgagtccatgcgttgtctgcccacccctaccacagtgtttgtgccttcagctgagggggcagcctctgggccctgaacccctgctggggctccacgaccctgagagaaggggtgagaagaatcatctctgcacctcgggtctctgccagaggaagacttaagcatccctgcgacctcacattctagacagagatgaggtccaggggttggcccctgctgccttctcacaatttgcaatagatgtaaataggaccaataaatcctttggaagagccatggggtgaa

SEQ ID NO: 316678 - protein, 251 aa, Artificial Sequence
  derived and/or modified sequence
MICQEFWLDYPKSNSQFFEVPFDSNMNRTKNRPLVRGQISPLLAVSFATCCAVPGVAILTLGVNPLTGALGLFNIFLYTCCYTPLKRISIANTWVGAVVGAIPPVMGWTAATGSLDAGAFLLGGILYSWQFPHFNALSWGLREDYSRGGYCMMSVTHPGLCRRVALRHCLALLVLSAAAPVLDITTWTFPIMALPINAYISYLGFRFYVDADRRSSRRLFFCSLWHLPLLLLLMLTCKRPSGGGDAGPPPS

SEQ ID NO: 316679 - DNA, 756 bp, Artificial Sequence
  derived and/or modified sequence
atgatatgtcaggagttttggcttgattaccccaagtcaaatagtcaattttttgaggtgcctttcgattcaaacatgaatcgaaccaagaatcgcccactggtcagaggacagatctcacctctcctcgcagtgagcttcgcaacctgctgcgccgtccccggcgtcgccattcttacattaggcgttaatccacttaccggggccctgggcctttttaacatcttcttatatacctgctgctataccccattaaaaagaattagtattgccaatacttgggtcggcgcagtggtgggcgctatcccccccgtgatgggatggactgccgccactggctctttggacgcaggcgccttcctgctgggtgggatcctatattcttggcagttccctcacttcaatgctttgtcttggggcctccgggaagactacagccgcggaggctattgcatgatgtccgtgacgcacccggggttgtgtcgccgggtggcgctgaggcattgcctcgctctgctggtcctgtccgccgccgcccctgtgctagatataacaacctggacatttcctattatggctctgcctattaacgcctacataagttacctagggtttaggttttatgtggacgccgatcgccggagcagcagaagactcttcttttgcagcctttggcacctgcccttgctgctactgctaatgttgacctgtaaacgcccatccggcggaggggacgccggtccccccccctcttag

SEQ ID NO: 316680 - DNA, 681 bp, Artificial Sequence
  derived and/or modified sequence
atgaataggaccaaaaatcgaccccttgtaagaggccagatatcaccattactggccgtgagcttcgcaacctgctgcgccgtacccggagtcgccatcttgaccttaggggtgaaccccttgacgggcgctctcgggctctttaacatttttctgtacacctgctgctacactcctctaaaacgcatctccattgccaatacatgggtaggagccgttgtgggagctatcccccctgtgatgggctggacggccgcaaccggcagcctggacgcaggcgcctttttgctgggcggtatcttgtattcttggcagttcccacatttcaatgcactctcttgggggttgagagaagactacagccgcgggggctactgtatgatgagcgttactcacccaggattatgcaggagggtggcattgcgtcactgcttagccttgttggtgctgtccgccgctgcaccggtcctcgacattaccacttggacctttccgatcatggctcttcctattaatgcgtacatctcttacttggggtttcgcttctatgtggacgccgaccgacgctccagcagaaggcttttcttttgttcactgtggcacctaccgttgctgctgctcttgatgctgacttgcaagcgcccaagtggcgggggcgacgctggcccgccgccaagctag

SEQ ID NO: 316681 - DNA, 756 bp, Artificial Sequence
  derived and/or modified sequence
atgatctgccaggagttctggctggactaccccaagagcaacagccagttctttgaggtgccctttgacagcaacatgaacagaaccaagaaccggcccctggtgcggggccagatcagccccctgctggccgtgtcctttgccacctgctgtgctgtgcctggggtggccatcctgaccctgggcgtgaaccccctgactggagccctgggcctcttcaacatcttcctgtacacctgctgctacacccccctgaagaggatcagcatcgccaacacctgggtgggcgctgtggtgggcgccatcccccctgtgatgggctggacagctgccaccggcagcctggatgctggggccttcctgctgggcggcatcctgtacagctggcagttcccccacttcaatgccctgtcctggggcctgcgggaggactacagccggggcggctactgcatgatgtctgtgacccaccctggcctgtgccggcgggtggccctgcggcactgcctggccctgctggtgctgtctgctgctgcccctgtgctggacatcaccacctggaccttccccatcatggccctgcccatcaatgcctacatctcctacctgggcttccgcttctacgtggatgctgacagaagaagcagcagaagactcttcttctgcagcctgtggcacctgcccctgctgctgctgctgatgctgacctgcaagaggccttctggaggaggagatgctggccccccacccagctag

SEQ ID NO: 316682 - DNA, 681 bp, Artificial Sequence
  derived and/or modified sequence
atgaacagaaccaagaaccggcccctggtgcggggccagatcagccccctgctggccgtgtcctttgccacctgctgtgctgtgcctggggtggccatcctgaccctgggcgtgaaccccctgaccggggccctgggcctcttcaacatcttcctgtacacctgctgctacacccccctgaagaggatcagcatcgccaacacctgggtgggcgctgtggtgggcgccatcccccctgtgatgggctggacagctgccaccggcagcctggatgctggggccttcctgctgggcggcatcctgtacagctggcagttcccccacttcaatgccctgtcctggggcctgcgggaggactacagcagaggaggctactgcatgatgtctgtgacccaccctggcctgtgcagaagagtggccctgcggcactgcctggccctgctggtgctgtctgctgctgcccctgtgctggacatcaccacctggaccttccccatcatggccctgcccatcaatgcctacatctcctacctgggcttccgcttctacgtggatgctgaccggcgcagcagccggcggctcttcttctgcagcctgtggcacctgcccctgctgctgctgctgatgctgacctgcaagaggcccagcggcggcggagatgctggccccccacccagctag

SEQ ID NO: 316683 - DNA, 756 bp, Artificial Sequence
  derived and/or modified sequence
atgatctgccaggagttctggctggactaccccaagagcaacagccagtttttcgaggtaccgttcgacagcaacatgaaccgcacaaagaataggccgctcgtacgggggcaaatttctcctctgctagctgtcagttttgcaacctgctgtgcagtgcccggcgtcgctatcctcacactcggggtgaaccctctcacgggcgccttaggcctgttcaacatttttttgtacacatgttgctacacgcctctgaagcgcatctccatcgctaatacttgggtcggcgcagtagttggcgcaattccccccgttatgggatggaccgcggcgaccgggtctttagacgccggggctttcctcctcgggggcattttgtactcctggcagttcccgcatttcaatgcacttagctggggcttacgagaagactactctcgcggaggctattgcatgatgagtgtaacacatcccggactgtgcaggcgggtcgctctccgccactgcctggccctccttgtgctgagcgccgcagcccccgtgctggatataacaacctggacattcccaatcatggccttaccaattaacgcctacatttcttacctcggtttccgcttctatgtggatgccgataggagaagtagtcggcggctgtttttctgcagtctgtggcacctgccactgttgctgttattgatgctgacatgtaaaaggccctccggcggtggagatgctgggccccctccatcctag

SEQ ID NO: 316684 - DNA, 681 bp, Artificial Sequence
  derived and/or modified sequence
atgaaccggaccaagaaccggcccctggtgcggggccagatcagccccctgcttgctgtgtcctttgccacctgttgcgctgtcccgggagtagccattctgacccttggagtaaaccccttaacaggagccttagggttattcaacatttttctctatacatgctgctacacccccctgaagcgaattagcattgccaatacctgggtcggtgcggtggttggagcgatcccgcctgtgatgggatggaccgcggctactggatctttggatgccggcgccttccttttgggggggattttgtactcctggcagtttccccacttcaatgcactgtcctggggccttagagaagattacagccgagggggctattgcatgatgagcgtcacacaccccggcctctgtcgtcgcgttgcactgagacattgcctggcccttttagttctgtccgccgccgcaccggttctagacataactacttggacatttcccattatggctctgccaatcaacgcctatattagctacttgggatttagattctacgttgatgccgatcgcagaagcagccgcagattgtttttctgttcattgtggcatctgcctctacttctccttctgatgctaacctgcaaacgacccagtggcggcggcgacgccggacctcctccttcatag

SEQ ID NO: 316685 - DNA, 756 bp, Artificial Sequence
  derived and/or modified sequence
atgatatgccaggagttttggctggattaccctaagtctaattcccagttcttcgaggtaccatttgactcaaacatgaatcgcaccaaaaacagaccgcttgtcaggggccagatatccccactgctcgcggtgagctttgctacttgttgtgccgtgcccggagttgccatcctcactctcggcgtgaatccattgacaggggctctcggcctgtttaacattttcttgtacacctgttgctacactcccctcaagagaatctccatagccaatacctgggtgggagccgtggtcggggctattcccccagtgatggggtggactgcagctacaggcagcctagatgcgggtgcttttctgctgggcggaatattatacagctggcagttcccacacttcaatgccctgagctggggcctgcgtgaggattactcgagaggcggttattgcatgatgagcgtaacccaccccggattgtgcaggcgggtggcacttcggcattgcctcgcattgcttgttctgtcagcagctgcccctgtcttggacataaccacctggactttccctatcatggccctacccataaatgcatacatatcatacctaggattccgtttctatgttgatgccgaccgccgttcctctagaagattgttcttttgctcgttgtggcatctgccattgctactgctgctgatgcttacctgcaagaggccatcaggcggaggcgacgccggacccccaccttcttag

SEQ ID NO: 316686 - DNA, 681 bp, Artificial Sequence
  derived and/or modified sequence
atgaaccggaccaagaataggccacttgtacggggacaaatctcccctctgttggccgtttccttcgctacatgctgtgccgtgcccggtgtggcaattctgaccctgggggtcaatcccctcaccggcgcattgggtctattcaacatttttctgtatacatgttgttataccccgctcaaaagaatctccattgctaacacgtgggtcggcgctgtcgttggggctatccctccagtgatgggctggaccgccgctacgggctcactggacgccggagccttcctgctagggggaattttgtatagctggcagtttccccacttcaacgcactgagttggggtctgagagaggattactccagagggggatactgcatgatgtctgtgacacaccccggtctctgccgacgggtcgccctccggcactgccttgcactgcttgtgctcagcgcggctgcaccagtccttgatatcacaacctggacctttccaattatggcccttcctatcaacgcctacatctcatacttggggttcagattctatgtcgacgctgatcggcgatcaagtcgccgtttgtttttctgtagcttgtggcacctcccactcctgcttctgcttatgctcacttgtaaacgtccttctgggggaggggatgccggaccacctccttcctag

SEQ ID NO: 316687 - DNA, 756 bp, Artificial Sequence
  derived and/or modified sequence
atgatctgccaggagttctggctggactaccccaagagcaacagccagttcttcgaggtgcccttcgacagcaacatgaacagaaccaagaacagacccctggtgagaggccagatcagccccctgctggccgtgagcttcgccacctgctgcgccgtgcccggcgtggccatcctgaccctgggcgtgaaccccctgaccggcgccctgggcctgttcaacatcttcctgtacacctgctgctacacccccctgaagagaatcagcatcgccaacacctgggtgggcgccgtggtgggcgccatcccccccgtgatgggctggaccgccgccaccggcagcctggacgccggcgccttcctgctgggcggcatcctgtacagctggcagttcccccacttcaacgccctgagctggggcctgagagaggactacagcagaggcggctactgcatgatgagcgtgacccaccccggcctgtgcagaagagtggccctgagacactgcctggccctgctggtgctgagcgccgccgcccccgtgctggacatcaccacctggaccttccccatcatggccctgcccatcaacgcctacatcagctacctgggcttcagattctacgtggacgccgacagaagaagcagcagaagactgttcttctgcagcctgtggcacctgcccctgctgctgctgctgatgctgacctgcaagagacccagcggcggcggcgacgccggccccccccccagctag

SEQ ID NO: 316688 - DNA, 681 bp, Artificial Sequence
  derived and/or modified sequence
atgaacagaaccaagaacagacccctggtgagaggccagatcagccccctgctggccgtgagcttcgccacctgctgcgccgtgcccggcgtggccatcctgaccctgggcgtgaaccccctgaccggcgccctgggcctgttcaacatcttcctgtacacctgctgctacacccccctgaagagaatcagcatcgccaacacctgggtgggcgccgtggtgggcgccatcccccccgtgatgggctggaccgccgccaccggcagcctggacgccggcgccttcctgctgggcggcatcctgtacagctggcagttcccccacttcaacgccctgagctggggcctgagagaggactacagcagaggcggctactgcatgatgagcgtgacccaccccggcctgtgcagaagagtggccctgagacactgcctggccctgctggtgctgagcgccgccgcccccgtgctggacatcaccacctggaccttccccatcatggccctgcccatcaacgcctacatcagctacctgggcttcagattctacgtggacgccgacagaagaagcagcagaagactgttcttctgcagcctgtggcacctgcccctgctgctgctgctgatgctgacctgcaagagacccagcggcggcggcgacgccggccccccccccagctag

SEQ ID NO: 316689 - protein, 664 aa, Artificial Sequence
  derived and/or modified sequence
MEYEEITLERGNSGLGFSIAGGTDNPHIGDDPSIFITKIIPGGAAAQDGRLRVNDSILFVNEVDVREVTHSAAVEALKEAGSIVRLYVMRRKPPAEKVMEIKLIKGPKGLGFSIAGGVGNQHIPGDNSIYVTKIIEGGAAHKDGRLQIGDKILAVNSVGLEDVMHEDAVAALKNTYDVVYLKVAKPSNAYLSDSYAPPDITTSYSQHLDNEISHSSYLGTDYPTAMTPTSPRRYSPVAKDLLGEEDIPREPRRIVIHRGSTGLGFNIVGGEDGEGIFISFILAGGPADLSGELRKGDQILSVNGVDLRNASHEQAAIALKNAGQTVTIIAQYKPEEYSRFEAKIHDLREQLMNSSLGSGTASLRSNPKRGFYIRALFDYDKTKDCGFLSQALSFRFGDVLHVIDASDEEWWQARRVHSDSETDDIGFIPSKRRVERREWSRLKAKDWGSSSGSQGREDSVLSYETVTQMEVHYARPIIILGPTKDRANDDLLSEFPDKFGSCVPHTTRPKREYEIDGRDYHFVSSREKMEKDIQAHKFIEAGQYNSHLYGTSVQSVREVAEQGKHCILDVSANAVRRLQAAHLHPIAIFIRPRSLENVLEINKRITEEQARKAFDRATKLEQEFTECFSAIVEGDSFEEIYHKVKRVIEDLSGPYIWVPARERL

SEQ ID NO: 316690 - DNA, 1995 bp, Artificial Sequence
  derived and/or modified sequence
atggaatacgaggaaatcaccctggaaagaggaaactcaggcctgggcttcagtatcgccgggggcactgataatccacacatcggagatgatcctagcatttttattactaagattatccccggaggtgcggcagcacaggacggcagactccgggtcaatgactcaattctttttgtgaatgaggtcgatgtccgtgaagtgacccatagtgcagccgtggaagctttgaaggaggccggctctattgtgcgcctttatgtcatgcgccgaaagccacccgcagagaaggtgatggagatcaagctgattaaaggacccaagggcctcggtttcagtattgccgggggagtcggcaatcagcacattcctggggataatagtatttatgttactaaaattattgagggaggcgcagcccacaaagacgggcgccttcaaatcggggacaagattttagcagtgaactccgtcggcctcgaagacgtgatgcatgaggatgccgtggctgcgttgaaaaatacctacgatgtcgtgtatctcaaggtggccaaacctagcaatgcatacctcagcgactcttatgcccctcccgacatcaccacctcatatagtcagcatctggacaatgaaatcagtcatagtagttacttaggtacagactaccctactgctatgacaccaacttcccctaggagatatagcccagtggcaaaggatctgctgggggaggaggacatcccccgggagccacggcgcattgtgatccaccgcggctcaacagggctaggattcaacatagtgggaggggaggatggtgaaggcatctttatatcctttattcttgcaggagggcccgccgatctgagtggagagctgagaaagggggatcagatactgagcgtaaacggcgtggatctcagaaatgctagtcacgagcaagccgctattgcgctcaaaaatgccggtcagacagtcactattatcgctcaatacaagcctgaggagtactctagatttgaagccaagatacacgacttgcgggagcagctgatgaattcttcactcggtagtggtacagcctcacttcgctccaaccccaaaagggggttctatattcgcgccctgttcgactacgacaagactaaagactgcggtttcctgtctcaggccctctcgtttcggtttggagatgtactccacgtaatcgatgcttcagacgaggaatggtggcaggcaagacgcgtgcattcggattcagaaacagacgacatcgggttcattccttctaagaggcgcgttgaacgccgtgagtggtccaggttgaaggctaaggactgggggtcttcttcagggtcccaggggcgtgaagacagcgtcttgagctatgagactgtaacccagatggaggtacactatgctcggcccatcatcatcctgggccctactaaggaccgggccaacgacgacctgctatctgagtttcctgacaagtttggaagctgcgtccctcacacaactaggcccaaaagggaatatgaaatcgacggccgcgattatcatttcgtgagcagcagggaaaagatggagaaggatatccaggcccataaattcatcgaggccgggcagtacaactcccatctgtacggtacaagtgtacaaagtgttagggaggtcgctgagcaggggaaacattgcatcctcgatgtgtccgctaatgccgtgaggcgcctgcaggcagcccatctacaccctattgccatctttatccgcccacggtccctggagaatgtgttggagattaacaaacgcattaccgaagaacaggcgcggaaggcatttgatcgtgcaactaagctggaacaagaattcaccgaatgcttctcggcaatcgtcgagggagattcattcgaggagatttaccataaggttaaacgcgttatcgaggatctctcgggcccatacatttgggtgcccgcccgggaacgattgtag

SEQ ID NO: 316691 - DNA, 1995 bp, Artificial Sequence
  derived and/or modified sequence
atggagtatgaggagatcaccctggagcggggcaacagcggcctgggcttcagcattgctgggggcacagacaacccccacatcggagatgaccccagcatcttcatcaccaagatcatccctggaggagctgctgcccaggacggccgcctgcgggtgaatgacagcatcctgtttgtgaatgaggtggatgtgcgggaggtgacccacagcgctgctgtggaggccctgaaggaggccggcagcatcgtgcggctgtatgtgatgaggaggaagcccccagctgagaaggtgatggagatcaagctgatcaagggccccaagggcctgggcttcagcattgctggaggagtgggcaaccagcacatccctggggacaacagcatctacgtgaccaagatcattgaaggaggagctgcccacaaggatggccgcctgcagatcggggacaagatcctggccgtgaacagcgtgggcctggaggatgtgatgcatgaagatgctgtggccgccctgaagaacacctatgatgtggtgtacctgaaggtggccaagcccagcaatgcctacctgagtgacagctatgcccccccagacatcaccaccagctacagccagcacctggacaatgagatcagccacagcagctacctgggcacagactaccccacagccatgacccccaccagcccccggcgctacagccctgtggccaaggacctgctgggggaggaggacatcccccgggagccccggcgcatcgtcatccaccggggcagcacaggcctgggcttcaacatcgtgggcggagaagatggagagggcatcttcatctccttcatcctggccggcggccctgctgacctgagcggggagctgaggaaaggagaccagatcctgtctgtgaatggagtggacctgagaaatgccagccatgagcaggccgccatcgccctgaagaatgccggccagacagtgaccatcatcgcccagtacaagccagaggagtacagcagatttgaggccaagatccatgacctgcgggagcagctgatgaacagcagcctgggcagcggcacagccagcctgcggagcaaccccaagaggggcttctacatccgggccctgtttgattatgacaagaccaaggactgtggcttcctgagccaggccctgtccttccgctttggagatgtgctgcacgtgattgatgccagtgatgaggagtggtggcaggcccggcgggtgcacagcgacagcgagacagatgacatcggcttcatccccagcaagagaagagtggagcggcgggagtggagccggctgaaggccaaggactggggcagcagcagcggcagccagggcagagaagattctgtgctgtcctatgaaacagtgacccagatggaggtgcactacgcccggcccatcatcatcctgggccccaccaaggaccgggccaatgatgacctgctgtctgagttcccagacaagtttggcagctgtgtgccccacaccacccggcccaagcgggagtatgaaattgatggccgggactaccactttgtgagcagccgggagaagatggagaaggacatccaggcccacaagttcattgaagctggccagtacaacagccacctgtatggcacctctgtgcagagcgtgcgggaggtggccgagcagggcaagcactgcatcctggatgtgtctgccaatgctgtgcggcggctgcaggccgcccacctgcaccccatcgccatcttcatccggcccaggagcctggagaatgtgctggagatcaacaagaggatcacagaggagcaggccaggaaggcctttgaccgggccaccaagctggagcaggagttcacagagtgcttcagcgccatcgtggagggggacagctttgaggagatctaccacaaggtgaagagggtgattgaggacctgagcggcccctacatctgggtgcctgcccgggagcggctgtag

SEQ ID NO: 316692 - DNA, 1995 bp, Artificial Sequence
  derived and/or modified sequence
atggagtacgaggagatcaccctggagcggggcaacagcggcctgggtttctctattgccggcggtacggataaccctcacatcggcgacgatccatctatatttattaccaagattataccaggcggagcagccgcccaggatggtaggctgagagtaaacgactctatcctcttcgtaaatgaggtggatgtgcgagaggtaacacatagcgcagccgtggaggcactcaaagaggccgggtcaatagtgcgcctgtatgtgatgagacggaaaccccccgcagagaaggttatggagattaaattaatcaaggggcctaagggacttggcttctcaatcgctggcggagtcggcaaccagcacatacccggagataattccatatacgtcactaaaattatcgagggaggcgcggcacataaggatgggagattacaaatcggcgataagatcctggccgttaatagcgttggtctagaggacgtcatgcatgaagatgctgtagccgctcttaagaatacttacgacgtcgtatatttgaaggtggccaaaccaagcaatgcgtacttaagcgacagttatgctccacctgatattaccactagttactcacagcatctggacaacgagataagtcatagcagttatttgggcaccgattatcctacagcaatgactccaacctccccccgtagatacagccctgtggccaaagatttactgggtgaggaggacattcccagagaaccgcgccggatcgtaattcacagaggaagcaccggacttggctttaacatcgtcgggggggaagatggcgaaggaatctttatttctttcatcctcgccggaggacctgcggacctctccggggaactgcgtaaaggggatcagattctatctgttaacggagtggaccttcggaatgcctctcatgaacaggcggccatagcgctgaagaacgccgggcagacagtcaccatcattgcccagtataagccggaggaatatagtcggttcgaggctaaaatacacgacctgcgtgaacaactgatgaattcctccctggggtccggaactgcctcattacgaagcaatcccaaacgcggcttctacataagagccctctttgactatgataagaccaaagactgcggattcctgagccaagctcttagctttcgattcggagatgttctccatgtcatcgacgcctcagatgaggaatggtggcaagcccgaagggtacactccgattcggaaaccgacgacatcggtttcatcccaagcaagagaagggtggaaagacgcgagtggtctcggctcaaagccaaagactggggatctagctcagggtcgcagggcagggaggacagcgtattgtcctatgaaacagttactcagatggaggtgcattatgccaggccaattatcatacttggcccaacgaaggacagagcaaacgacgatctgctgtcggagttcccagacaagttcggatcatgtgtgccacatacgacacgtccaaagcgggagtatgagattgacggaagggattatcatttcgtgtcctctagggagaagatggaaaaggacatccaggcgcacaagttcattgaggccggtcagtacaattcacacctctacggaacttcagtgcagtccgtacgggaggttgctgaacaaggcaagcattgtattcttgatgtatctgccaatgccgtccggcgtctgcaggctgctcacctgcatccaatcgcaatctttataagaccccgaagcttagagaacgttctggagatcaacaagcgaatcacagaagagcaggcgcgcaaagccttcgatcgtgccaccaagctggagcaggaattcacagagtgttttagcgccatagttgaaggcgattcctttgaagaaatctatcacaaagtgaagcgggtgatcgaggatctgtctggaccgtatatatgggtcccagcaagagaacggctgtag

SEQ ID NO: 316693 - DNA, 1995 bp, Artificial Sequence
  derived and/or modified sequence
atggaatacgaagagattactctggaacgagggaacagtgggctgggcttttccatcgcaggaggcaccgacaacccgcacataggggacgatccttccatcttcataaccaaaatcatcccaggtggcgctgcggcacaggacggccgtcttagagtgaacgactctatactgttcgtaaatgaagttgatgtgagagaagttacacattcggctgccgtcgaggctcttaaggaggcgggaagcatcgtgcggctctatgttatgcgcagaaaaccccctgcagaaaaagtgatggagattaagctaattaaaggacctaaaggattaggtttttcaattgccggaggcgtaggaaatcaacatatccctggggacaacagcatatatgtcactaaaatcattgaagggggagcggcacacaaggatggacggctgcagatcggggacaagatcctggccgtcaattcagtcggcttagaagatgtgatgcatgaggacgcagtcgccgcattgaagaacacatatgacgttgtctacctgaaggttgctaagccttccaacgcctatttgtccgattcttacgccccacctgacatcacaaccagctattcacagcatttagataacgagattagccactcctcatacctggggactgattatccaaccgcgatgaccccaacaagcccacgccgttacagtccagtggcgaaggacctgctaggggaagaagatatcccccgagaacctaggcgaatcgtcatccatagagggagtactggacttggatttaatatcgtgggtggagaagacggtgagggcatctttatctcattcattttggctggaggcccagcagatttgtccggggagctcagaaaaggggatcaaatcttgtccgtgaatggggttgacttgaggaatgcatctcatgagcaggctgccattgcactgaaaaatgctggtcaaacagtcactattattgctcagtacaagccggaagagtacagtaggtttgaagccaagattcatgatctgcgggaacagctgatgaattcttcactgggctcaggcaccgcttcactgcgcagcaatcctaaacgaggcttttacatacgggctctgtttgattacgataagaccaaggattgcggtttcctcagccaagccttgtccttcagattcggagatgtccttcacgtgattgacgcaagtgacgaagaatggtggcaggctaggcgcgtgcactctgactccgagactgatgacatcggcttcatccccagcaagcggagagtcgaaaggagggagtggtcgaggttaaaagcgaaggactggggatcatccagcggctcacagggtcgggaagattccgtcctcagctacgaaaccgtgactcagatggaagtgcattacgcacgccctatcatcattctggggcctactaaggatcgggctaacgacgacctgttgagcgaattccctgacaagttcggctcctgtgttccccataccacacgccctaagcgggagtacgaaatcgatgggcgagattatcacttcgtgagttcaagggaaaaaatggagaaagatatacaggcccataagttcattgaagccggtcagtacaatagccatctttacggcacaagcgtgcaaagtgtgagggaggtggcggagcagggtaagcactgtatcttggatgtctctgccaacgcagtccggaggcttcaggctgcacacctgcaccctatagcaattttcatccgaccgagaagtctggaaaacgtcttggagattaataagcgtattaccgaggagcaggctaggaaagcgtttgatcgagcgaccaagctggaacaggagttcacagaatgctttagcgcgatagtagagggcgattccttcgaggaaatttaccataaagtaaaaagagtcatagaggacctgtctggaccctacatatgggtgccagcccgagagcggctctag

SEQ ID NO: 316694 - DNA, 1995 bp, Artificial Sequence
  derived and/or modified sequence
atggagtacgaggagatcaccctggagagaggcaacagcggcctgggcttcagcatcgccggcggcaccgacaacccccacatcggcgacgaccccagcatcttcatcaccaagatcatccccggcggcgccgccgcccaggacggcagactgagagtgaacgacagcatcctgttcgtgaacgaggtggacgtgagagaggtgacccacagcgccgccgtggaggccctgaaggaggccggcagcatcgtgagactgtacgtgatgagaagaaagccccccgccgagaaggtgatggagatcaagctgatcaagggccccaagggcctgggcttcagcatcgccggcggcgtgggcaaccagcacatccccggcgacaacagcatctacgtgaccaagatcatcgagggcggcgccgcccacaaggacggcagactgcagatcggcgacaagatcctggccgtgaacagcgtgggcctggaggacgtgatgcacgaggacgccgtggccgccctgaagaacacctacgacgtggtgtacctgaaggtggccaagcccagcaacgcctacctgagcgacagctacgccccccccgacatcaccaccagctacagccagcacctggacaacgagatcagccacagcagctacctgggcaccgactaccccaccgccatgacccccaccagccccagaagatacagccccgtggccaaggacctgctgggcgaggaggacatccccagagagcccagaagaatcgtgatccacagaggcagcaccggcctgggcttcaacatcgtgggcggcgaggacggcgagggcatcttcatcagcttcatcctggccggcggccccgccgacctgagcggcgagctgagaaagggcgaccagatcctgagcgtgaacggcgtggacctgagaaacgccagccacgagcaggccgccatcgccctgaagaacgccggccagaccgtgaccatcatcgcccagtacaagcccgaggagtacagcagattcgaggccaagatccacgacctgagagagcagctgatgaacagcagcctgggcagcggcaccgccagcctgagaagcaaccccaagagaggcttctacatcagagccctgttcgactacgacaagaccaaggactgcggcttcctgagccaggccctgagcttcagattcggcgacgtgctgcacgtgatcgacgccagcgacgaggagtggtggcaggccagaagagtgcacagcgacagcgagaccgacgacatcggcttcatccccagcaagagaagagtggagagaagagagtggagcagactgaaggccaaggactggggcagcagcagcggcagccagggcagagaggacagcgtgctgagctacgagaccgtgacccagatggaggtgcactacgccagacccatcatcatcctgggccccaccaaggacagagccaacgacgacctgctgagcgagttccccgacaagttcggcagctgcgtgccccacaccaccagacccaagagagagtacgagatcgacggcagagactaccacttcgtgagcagcagagagaagatggagaaggacatccaggcccacaagttcatcgaggccggccagtacaacagccacctgtacggcaccagcgtgcagagcgtgagagaggtggccgagcagggcaagcactgcatcctggacgtgagcgccaacgccgtgagaagactgcaggccgcccacctgcaccccatcgccatcttcatcagacccagaagcctggagaacgtgctggagatcaacaagagaatcaccgaggagcaggccagaaaggccttcgacagagccaccaagctggagcaggagttcaccgagtgcttcagcgccatcgtggagggcgacagcttcgaggagatctaccacaaggtgaagagagtgatcgaggacctgagcggcccctacatctgggtgcccgccagagagagactgtag

SEQ ID NO: 316695 - protein, 333 aa, Artificial Sequence
  derived and/or modified sequence
MKDFVLGRDKVQEAKVTEVKINEAREHYRPAAARASLLYFIMNDLSKIHPMYQFSLKAFSIVFQKAVERAAPDESLRERVANLIDSITFSVYQYTIRGLFECDKLTYLAQLTFQILLMNREVNAVELDFLLRSPVQTGTASPVEFLSHQAWGAVKVLSSMEEFSNLDRDIEGSAKSWKKFVESECPEKEKLPQEWKNKTALQRLCMLRAMRPDRMTYALRDFVEEKLGSKYVVGRALDFATSFEESGPATPMFFILSPGVDPLKDVESQGRKLGYTFNNQNFHNVSLGQGQEVVAEAALDLAAKKGHWVILQVKRCSFFTFYHPAHCLEHSRH

SEQ ID NO: 316696 - DNA, 1002 bp, Artificial Sequence
  derived and/or modified sequence
atgaaagacttcgtgctgggccgtgacaaggtccaggaggctaaggtgacagaggtgaaaatcaacgaagctcgtgagcactaccgccccgcggccgcaagagcgtcgctgctttactttattatgaatgatttatccaagatacaccctatgtaccaattctcactgaaagccttcagcattgttttccaaaaggcagttgagcgtgcagccccagatgaatctctccgggaacgggtagccaatctgattgacagcattactttttctgtgtatcagtatactatcagggggctgttcgagtgtgacaagcttacataccttgcacagcttacattccaaattttgctcatgaatagggaggtgaacgctgtggagttggacttcctgctgcggtcgcccgtgcaaacagggacagcttcccccgttgaattcttgtctcaccaggcctggggcgcagtgaaagtcttgtcctccatggaggaatttagtaatcttgatagggacatagaggggtctgctaaatcctggaagaagtttgtcgaatctgaatgccccgagaaggaaaaacttccacaagagtggaaaaacaaaacagccctgcagcgtctgtgtatgctgcgggccatgcgaccggaccgaatgacatatgcactgcgggacttcgtcgaagagaagttagggagcaaatatgttgtcggcagagcccttgacttcgccacaagttttgaggagtccggccccgccaccccaatgttcttcatcctcagccccggggtggaccccctcaaagatgttgaatcacagggccgtaaattgggctatacatttaataatcagaattttcacaatgtttcactggggcagggccaagaggtggttgccgaggccgcccttgatctggcagcaaagaagggccattgggtaatactgcaggtgaagagatgttctttcttcaccttctatcaccccgcgcactgtctcgagcattcgcgacattag

SEQ ID NO: 316697 - DNA, 1002 bp, Artificial Sequence
  derived and/or modified sequence
atgaaggactttgtgctgggccgggacaaggtgcaggaggccaaggtgacagaggtgaagatcaatgaggcccgggagcactacagacctgctgctgcccgggccagcctgctgtacttcatcatgaatgacctgagcaagatccaccccatgtaccagttcagcctgaaggccttcagcatcgtgttccagaaggctgtggagcgggccgccccagatgagagcctgcgggagcgggtggccaacctgattgacagcatcaccttctctgtgtaccagtacaccatccggggcctgtttgaatgtgacaagctgacctacctggcccagctgaccttccagatcctgctgatgaaccgggaggtgaatgctgtggagctggacttcctgctgcggagccctgtgcagacaggaacagccagccctgtggagttcctgagccaccaggcctggggcgctgtgaaggtgctgagctccatggaggagttcagcaacctggaccgggacatcgagggcagcgccaagtcctggaagaagtttgtggagagcgagtgcccagagaaggagaagctgccccaggagtggaagaacaagacagccctgcagaggctgtgcatgctgcgggccatgaggccagacaggatgacctacgccctgcgggactttgtggaggagaagctgggcagcaaatatgtggtgggccgggccctggactttgccaccagctttgaggagagcggccctgccacccccatgttcttcatcctgagccctggggtggaccccctgaaggatgtggagagccagggcaggaagctgggctacaccttcaacaaccagaacttccacaacgtgtccctgggccagggccaggaggtggtggccgaggccgccctggacctggccgccaagaagggccactgggtgatcctgcaggtgaagcgctgcagcttcttcaccttctaccacccagcccactgcctggagcacagccgccactag

SEQ ID NO: 316698 - DNA, 1002 bp, Artificial Sequence
  derived and/or modified sequence
atgaaggacttcgtgctgggccgggacaaggtgcaggaggccaaggtgaccgaggtgaagatcaacgaggcgcgggaacactaccgaccagctgcagctcgcgcgtccctcctgtattttattatgaatgacctgtccaaaatccaccccatgtaccagttctcgttaaaggcgttttctatcgtctttcagaaagcggttgaacgggcagcacccgatgagtcattgcgagaaagggttgccaatctgatagattctataaccttctccgtctatcagtacaccatacgcggcctattcgaatgtgataagctgacatatctggctcagctgacattccagatcctcctgatgaatcgcgaggtcaatgctgtggaactggattttctccttcgctcccctgtgcagactggtactgccagtccagtggaattcctatcccaccaagcctggggcgctgtcaaagtactgtctagtatggaggaattcagcaacctggaccgagacatagaaggaagcgctaagtcttggaaaaagttcgtggaaagtgagtgccccgagaaggagaaactgccccaggagtggaaaaataagaccgcactccagcggctgtgtatgctgagggccatgaggcctgatcgaatgacctatgcccttagagacttcgtggaagagaagctgggatcaaagtacgtggttggtagagccctggattttgcgacgtctttcgaggagtcaggacctgccaccccaatgttctttatcctgagtccgggagttgacccactgaaggatgtggagagccagggcagaaaactcggttacacttttaataatcaaaatttccataacgtttcgctcggtcaggggcaagaggtggttgctgaagcggccctggatctcgctgccaaaaagggtcactgggtcattcttcaagtgaagcgctgtagcttctttacattctatcaccccgcccattgcttggaacactctcgtcactag

SEQ ID NO: 316699 - DNA, 1002 bp, Artificial Sequence
  derived and/or modified sequence
atgaaggactttgtcctaggacgcgacaaggtccaggaagccaaggtgacagaagtcaagataaatgaagctcgcgagcattatcgcccagccgcagcaagggctagcctgctgtactttattatgaatgatctctcaaaaatccacccgatgtatcagttcagcctgaaagcattctccatcgtgttccagaaggccgtagaacgagccgcacccgacgagtctttacgcgaacgggtcgcaaatctgatagactcgattactttttcagtataccagtacacgatcaggggactctttgagtgcgataaacttacttatctggctcaactgacctttcagattctgcttatgaacagggaggtgaacgcggtggaactcgatttcttgctgcggtctccagtccaaactggaactgcctccccagtggaattcctgagtcatcaggcgtggggcgcagttaaggtgctttcgtctatggaagaattttccaacctagatagggatatcgagggcagcgcaaagtcctggaaaaagttcgtggaatctgaatgcccggaaaaagagaagcttcctcaggaatggaagaataaaaccgctctgcagcgactgtgcatgttgagagccatgcgcccagatagaatgacttacgccctccgggacttcgtcgaggagaagctggggtcaaaatacgtcgtcggacgggcactcgattttgccacgtctttcgaagaatcgggccctgcgacacccatgttctttatcttgtccccaggagttgaccctttgaaggacgtggaaagccaggggaggaagctcggctatacattcaacaaccagaactttcataatgttagcctggggcagggccaggaggtcgttgcggaagccgctctagacctggccgcaaaaaaaggccactgggtgattctgcaagttaagagatgctcattcttcacattttatcaccctgcccactgtcttgagcattcaagacactag

SEQ ID NO: 316700 - DNA, 1002 bp, Artificial Sequence
  derived and/or modified sequence
atgaaggacttcgtgctgggcagagacaaggtgcaggaggccaaggtgaccgaggtgaagatcaacgaggccagagagcactacagacccgccgccgccagagccagcctgctgtacttcatcatgaacgacctgagcaagatccaccccatgtaccagttcagcctgaaggccttcagcatcgtgttccagaaggccgtggagagagccgcccccgacgagagcctgagagagagagtggccaacctgatcgacagcatcaccttcagcgtgtaccagtacaccatcagaggcctgttcgagtgcgacaagctgacctacctggcccagctgaccttccagatcctgctgatgaacagagaggtgaacgccgtggagctggacttcctgctgagaagccccgtgcagaccggcaccgccagccccgtggagttcctgagccaccaggcctggggcgccgtgaaggtgctgagcagcatggaggagttcagcaacctggacagagacatcgagggcagcgccaagagctggaagaagttcgtggagagcgagtgccccgagaaggagaagctgccccaggagtggaagaacaagaccgccctgcagagactgtgcatgctgagagccatgagacccgacagaatgacctacgccctgagagacttcgtggaggagaagctgggcagcaagtacgtggtgggcagagccctggacttcgccaccagcttcgaggagagcggccccgccacccccatgttcttcatcctgagccccggcgtggaccccctgaaggacgtggagagccagggcagaaagctgggctacaccttcaacaaccagaacttccacaacgtgagcctgggccagggccaggaggtggtggccgaggccgccctggacctggccgccaagaagggccactgggtgatcctgcaggtgaagagatgcagcttcttcaccttctaccaccccgcccactgcctggagcacagcagacactag

SEQ ID NO: 316701 - DNA, 1460 bp, Artificial Sequence
  derived and/or modified sequence
agaagacggggtgtgatgggaaaggggcccaacccctgctctgttccagcataccaccaaacctccaacaaggccttttgcagtctcagtctcgcgcttgcatcagaagggcattggagatattggccctgagcaggacagagcatatctgtaacagtgtccaggaacaatatacctttgacggaagatgcttattgccagattattgggatttctccaaatatgaaagacttcgttctaggtagagacaaggtccaggaggccaaggtgactgaagtgaaaatcaacgaggcccgagagcactaccggccagcagctgccagggcctcactgctctacttcatcatgaacgacctcagcaagatccatccaatgtaccagttttctctcaaggccttcagtatcgtcttccagaaggctgtggagagggctgctcctgacgaaagcctcagggagcgggtggccaacctaatagacagcataaccttctctgtgtaccagtacaccatccgcgggctctttgagtgtgataagctgacctaccttgcccagctcacctttcagattctcctcatgaaccgagaagtcaatgcagtggagttggatttcctgcttcgatctccagtgcagacgggcaccgccagccccgtggagttcctctcccatcaggcgtggggagctgtcaaggtactttcatcaatggaagaattctctaatctggatcgggacatagagggatctgctaagagctggaaaaagtttgtggagtccgaatgtcctgagaaagagaagctcccacaggagtggaagaacaagacagccctgcagcgcctctgcatgctgagagccatgcggcccgaccggatgacctatgctttgcgagattttgttgaagagaagttaggaagcaaatacgtggtgggaagagccctagattttgcaacctcatttgaagaatcgggaccagccactcctatgtttttcatcctgtctccaggggtggacccactgaaggatgtagaaagtcaaggaagaaaacttggatacaccttcaacaatcagaactttcacaacgtgtctttggggcaaggacaggaagtggtggctgaggctgcgctggacctcgctgccaagaaaggtcactgggttattttgcaggtaaagagatgttccttctttaccttttatcacccagcccactgccttgaacatagcagacactgaaacaaaaggccggtgggtcaaggaatccatgaagaaattaaagaaagaataaatgcaaaagccagtcactcccattcttcccggctttcactaccatgaacctcccccatctcctgattactggtgacatcacatcttgctgctgggtctttgtccttaattattcagttatttatttggagcctagcaactgagagatctgcccctcccagggcctccttttccagaaacatcag

SEQ ID NO: 316702 - protein, 214 aa, Artificial Sequence
  derived and/or modified sequence
MTWTSRQEMQGPQPPSQCSAQHYVRMALWCSKAGHVRSSRCLLRRLASTATPRLEFHLRILPSPCLQYLWRSQQQAANSADFPLTLLLLSDCFCLALSLHTHSDNYTCSPVFSLFCGYPSVPASFSGSPSVSPALCQSLQFIGLYALAIQLLLPYSWFSLFLSSLEPLLSGCFHHVAQGFSNSTPSPGGTPASILSFQVTLLLRSPVLAFPLEL

SEQ ID NO: 316703 - DNA, 923 bp, Artificial Sequence
  derived and/or modified sequence
attgcgcaggcgcaaggactgcccggtaggacgagcggtctatcaaggggagggaagatgaggttgaagagattaaaaaaccggttggaatcgaagcctcttaaaatggcagatgacttggacttcgagacaggagatgcaggggcctcagccaccttcccaatgcagtgctcagcattacgtaagaatggctttgtggtgctcaaaggccggccatgtaagatcgtcgagatgtctacttcgaagactggcaagcacggccacgccaaggttagaatttcacctccgcatcttgccttccccatgcctccagtatctttggcgctcccagcagcaagctgccaacagtgctgactttcctttaactctgcttttactgtctgattgtttttgtttagcgctcagccttcatacccattcagacaactacacctgctccccagtcttcagcctcttctgtggttacccttctgtccccgcatcattctctggcagtccctccgtttctccagctttgtgccaatctcttcaattcataggcctttatgctctagctattcagttgctccttccttattcttggttttcactttttctttcttcccttgagccgttgttaagtggttgcttccatcacgttgcccagggtttctccaattctacgccttcccctggagggactcctgcgtcaattctgagctttcaggtcaccttgctgcttcgttccccagttctagctttccctttggaactctgacgcaggatcaaactgcccctacctgccccatcccactctccttgggttccttgagcctccatgctttcatgggttttaacattcttgctagcacttccctcatcacctcagacttttcctgtctctttagaatttcaacctgattcgttcttgttgaatttcttgt

SEQ ID NO: 316704 - DNA, 645 bp, Artificial Sequence
  derived and/or modified sequence
atgacttggacgtcccggcaggaaatgcagggacctcagcctccttcccagtgctctgctcagcattacgtcaggatggctttatggtgttcaaaagccggccatgtccggtcatcacggtgcctcttgagacgattagccagtaccgccacaccacgcctggaattccatctgcgtatattgccctccccatgcctccagtacttatggaggtctcaacagcaggccgctaatagtgctgacttccccctcactctgctacttctatcagactgcttctgcctagccctgtccctccacacccactctgacaattatacgtgctcaccagtgtttagcctgttttgtggttatccttcggtgccagcctcgttctcggggagtccaagcgtgtcaccagccctgtgccagtccctgcagttcattggactctatgcgttggccatccagctattactcccctattcctggttctctctgtttttgtcgagtcttgagccgcttttgtcagggtgctttcatcatgttgcgcagggattctccaacagcactccctcccccggaggaacgcccgcttctatcctgtcatttcaggtgacactgctcctaagatcgcccgtcctggccttcccgctcgaactctag

SEQ ID NO: 316705 - DNA, 645 bp, Artificial Sequence
  derived and/or modified sequence
atgacctggaccagccggcaggagatgcagggcccccagccccccagccagtgcagcgcccagcactacgtgaggatggccctgtggtgcagcaaggccggccacgtgcgcagcagccgctgcctgctgcggcggctggccagcacagccaccccccggctggagttccacctgcgcatcctgcccagcccctgcctgcagtacctgtggaggagccagcagcaggccgccaacagcgctgacttccccctgaccctgctgctgctgagtgactgcttctgcctggccctgagcctgcacacccacagcgacaactacacctgcagccctgtgttcagcctcttctgtggctaccccagcgtgcctgccagcttcagcggcagccccagcgtgtccccagccctgtgccagagcctgcagttcatcggcctgtatgccctggccatccagctgctgctgccctacagctggttcagcctcttcctgagcagcctggagcccctgctgagcggctgcttccaccacgtggcccagggcttcagcaacagcacccccagccctgggggcaccccagccagcatcctgtccttccaggtgaccctgctgctgcggagccctgtgctggccttccccctggagctgtag

SEQ ID NO: 316706 - DNA, 645 bp, Artificial Sequence
  derived and/or modified sequence
atgacctggaccagccggcaggagatgcagggcccccagcccccctcgcagtgttctgctcagcactatgtgcggatggcactctggtgctctaaggcaggccatgtccgaagtagtcggtgcctgcttcggcgccttgcaagcactgccaccccacggctcgagtttcatctccggattctaccctctccatgcctgcagtacctctggagatcccagcagcaggcagccaactctgcggacttcccactgacactactactgctgagcgattgcttttgcctggccctgtccctccatacacacagcgataactatacttgttccccagtattctccctcttttgtgggtatcccagtgtcccggcttcgttctccggtagcccctccgtgagccccgccctgtgccagagcctccagttcataggtctgtacgctctggccatacagctgcttcttccgtattcttggttctccctgttcctgtcatcactggagccgctgctgtctggatgttttcaccacgtggcccaggggtttagcaactccacaccaagcccaggaggaacccccgcttctatactgtcctttcaagtgacattgctcttacgcagtcccgtcctggccttccccctggaattgtag

SEQ ID NO: 316707 - DNA, 645 bp, Artificial Sequence
  derived and/or modified sequence
atgacttggacatcccgtcaggaaatgcagggccctcaacctccttctcaatgttctgcccaacattatgtgaggatggcactgtggtgctctaaggctggccacgtgaggtcatcacgctgtctgttgcgcaggcttgcttctaccgcgacacctcgactggagttccacttgcggatcttgcctagtccctgtctccaatatctttggaggtctcagcaacaagcagccaattcagccgattttccgctgacactgttactcctgagcgactgcttctgtcttgccctgtcgctccatacccatagtgacaactacacctgttccccggtgttcagcctgttttgtggttacccatccgtgccagccagcttctctggctctcccagtgtctcacctgccctctgccaatccttgcagttcatcggcctttatgcactggcgatccagctgctgttgccctattcatggttcagcttatttctgtcgagcctggaaccactgctgtccggctgctttcatcacgttgcacagggtttcagtaactctacaccttcccctggcggtactccagcatctattctgtccttccaggtcacactgctgctgaggagccccgtcctcgccttcccactggagttgtag

SEQ ID NO: 316708 - DNA, 645 bp, Artificial Sequence
  derived and/or modified sequence
atgacctggaccagcagacaggagatgcagggcccccagccccccagccagtgcagcgcccagcactacgtgagaatggccctgtggtgcagcaaggccggccacgtgagaagcagcagatgcctgctgagaagactggccagcaccgccacccccagactggagttccacctgagaatcctgcccagcccctgcctgcagtacctgtggagaagccagcagcaggccgccaacagcgccgacttccccctgaccctgctgctgctgagcgactgcttctgcctggccctgagcctgcacacccacagcgacaactacacctgcagccccgtgttcagcctgttctgcggctaccccagcgtgcccgccagcttcagcggcagccccagcgtgagccccgccctgtgccagagcctgcagttcatcggcctgtacgccctggccatccagctgctgctgccctacagctggttcagcctgttcctgagcagcctggagcccctgctgagcggctgcttccaccacgtggcccagggcttcagcaacagcacccccagccccggcggcacccccgccagcatcctgagcttccaggtgaccctgctgctgagaagccccgtgctggccttccccctggagctgtag

SEQ ID NO: 316709 - protein, 197 aa, Artificial Sequence
  derived and/or modified sequence
MNAIVALCHFCELHGPRTLFCTEVLHAPLPQGDGNEDSPGQGEQAEEEEGGIQMNSRMRAHSPAEGASVESSSPGPKKSDMCEGCRSLAAGHPGYISHDKETSIKYVSHQHPSHPQLFSIVRQACVRSLSCEVSLVATEPVSVGAHMLPGALGGLGASIAQGGRHWSSLRADPQISTAQGTGRLPCPELREESCWTC

SEQ ID NO: 316710 - DNA, 1203 bp, Artificial Sequence
  derived and/or modified sequence
atgatccagaagttacccgaatgggcagcagatgagcctgttgaaaagacacctcagacacaacaggacgaactgtacatccacagcgagccacttggcgtggtgctagtgatcggtacatggaactaccctttcaacttgacgattcagccgatggtaggcgcaatagctgccggcaacagtgttgtactgaagccaagcgaactgtccgagaatatggcgtctctactagcaacaatcatccctcagtaccttgataaagacctctaccccgtcattaatggcggtgtccccgagacaaccgaactcctaaaggagcggttcgatcacattttgtatactggaagtacaggggttggcaagatcattatgacagccgcagcaaagcacctaacacctgtgaccttggagctcggaggcaagagcccctgctatgtcgacaagaattgtgacttggacgtggcgtgtcgcagaatcgcctggggtaagttcatgaattctgggcagacgtgtgtcgcgccagactatattctgtgcgacccatctatccaaaaccaaattgtggagaagcttaagaaatctcttaaggagttctatggggaggacgccaaaaagtctcgggattatgggcgcataatcagcgctcgccattttcagcgggtgatgggtttaatcgaaggacagaaagtagcgtacggagggacaggcgatgctgctactagatacattgcaccaaccatcttaactgatgtggatccccagagccctgttatgcaggaagagatcttcgggccagtactaccaatcgtttgcgtgaggagcctcgaagaggctattcagtttattaatcagagagagaaaccactcgcactctatatgttcagcagtaacgacaaagtgatcaaaaaaatgatcgcagaaacatcaagtggaggtgtggccgcaaatgacgtaattgtgcacataacactccacagtttgccttttggcggtgtcggcaactctggcatgggcagttaccacggaaaaaagagttttgagactttcagtcacagacggtcctgcctggtgcggcctctgatgaacgatgaggggctaaaggtgcggtatcccccctcccccgccaaaatgacccagcattggctttcttggccctgggaaaaccggtcttgttccccttcccctgctcccctgctctgttag

SEQ ID NO: 316711 - DNA, 1203 bp, Artificial Sequence
  derived and/or modified sequence
atgatccagaagctgcctgagtgggccgcagatgagcctgtggagaagaccccccagacccagcaggatgagctgtacatccacagcgagcccctgggcgtggtgctggtgattggcacctggaactaccccttcaacctgaccatccagcccatggtgggcgccatcgccgccggcaacagcgtggtgctgaagcccagcgagctgtctgagaacatggccagcctgctggccaccatcatcccccagtacctggacaaggacctgtaccctgtgatcaatggaggagtgcctgagaccacagagctgctgaaggagagatttgaccacatcctgtacacaggcagcactggagtgggcaagatcatcatgacagctgctgccaagcacctgacccctgtgaccctggagctgggcggcaagagcccctgctacgtggacaagaactgtgacctggatgtggcctgcagaagaattgcctggggcaagttcatgaacagcggccagacctgtgtggccccagactacatcctgtgtgaccccagcatccagaaccagatcgtggagaagctgaagaagagcctgaaggagttctatggagaagatgccaagaagagccgggactatggccgcatcatcagcgcccggcacttccagagggtgatgggcctgattgagggccagaaggtggcctacggcggcactggagatgctgccacccgctacatcgcccccaccatcctgacagatgtggacccccagagccctgtgatgcaggaggagatctttggacctgtgctgcccatcgtgtgtgtgcgcagcctggaggaggccatccagttcatcaaccagcgggagaagcccctggccctgtacatgttcagcagcaatgacaaggtgatcaagaagatgattgctgagaccagcagcggcggcgtggccgccaatgatgtgattgtgcacatcaccctgcacagcctgccctttggaggagtgggcaacagcggcatgggcagctaccacggcaagaagagctttgagaccttcagccaccggcgcagctgcctggtgcggcccctgatgaatgatgagggcctgaaggtgcgctacccacccagccctgccaagatgacccagcactggctgtcctggccctgggagaacagaagctgcagccccagccctgcccccctgctgtgctag

SEQ ID NO: 316712 - DNA, 1203 bp, Artificial Sequence
  derived and/or modified sequence
atgatccagaagctgcccgagtgggccgccgacgagcccgtggagaagactcctcaaacacagcaggacgagctctacattcacagtgaacccctaggggtggtactagtcataggtacttggaattatccattcaaccttaccatacagccaatggtgggcgcgatcgctgccgggaacagcgtggttctgaagccgtccgaactcagtgaaaatatggcttcccttttggcaacaatcatccctcagtacctcgacaaagatctgtacccagtgatcaacggaggagtgccagagactactgagcttcttaaggagcgatttgatcatattctgtataccgggtccaccggcgtgggtaagataattatgactgctgccgctaagcatctaactcccgttactctggagcttggaggaaagagtccatgctacgtggataagaattgcgatttggacgtcgcatgtaggcggatcgcttggggcaagtttatgaatagtggccagacatgtgtggcgcccgattatatcctctgcgatccgtctattcagaaccagatcgtggagaagctcaaaaagtctctgaaggagttttacggggaggatgctaaaaaatcccgtgattatggaaggataatcagcgctaggcatttccagagagttatgggattgatcgagggacagaaggttgcgtatggggggactggcgatgctgccacacgatatattgcacctaccatcctcacagacgttgatcctcagtccccagtgatgcaggaggaaattttcggaccagttctgcctatcgtgtgtgtacgaagcctagaggaagccatccagttcatcaaccaacgcgagaagcctctcgccctgtatatgttcagtagcaacgataaggttattaagaagatgatcgcggagacaagttccggcggggtggcagccaacgacgtgatcgtccacatcactttgcatagccttccatttggaggagtcggtaatagcgggatggggagctaccatggcaagaaatcattcgaaaccttcagccaccgtcgtagctgtctggtgcgtcccctgatgaacgatgagggcctcaaggttaggtacccacctagtcctgcaaagatgacccaacactggctttcatggccgtgggaaaacagaagctgtagcccctcccccgccccactcctgtgctag

SEQ ID NO: 316713 - DNA, 1203 bp, Artificial Sequence
  derived and/or modified sequence
atgattcagaagttgcctgagtgggccgctgacgaaccagtcgagaagactccacagacccaacaggacgagctgtatatccattccgaaccgctcggggttgtcctggttataggcacgtggaattatccttttaatctgactatccagccgatggtgggggctatcgccgcaggtaatagcgtggttctgaagcctagcgaactgagcgagaacatggccagcctgctggctaccattattccacaatatctcgataaagatctttacccagtgattaacggaggcgtccccgaaacaaccgagctgttgaaagagagattcgaccacatactatacaccggcagcacgggagtgggaaagatcatcatgaccgctgccgcaaagcatttaacaccagtcacactggagctcggcggtaagtctccatgttacgtggataaaaactgtgacctcgacgtggcctgtcggcgtatcgcatggggtaaattcatgaattcagggcagacgtgtgtagcgcctgactacatcttatgtgacccttctatacagaaccagatcgttgaaaagttgaagaagagcttgaaggaattttacggtgaagatgccaaaaagagcagggactacggccgaattatctcagcaagacactttcagcgagtcatgggccttattgagggacaaaaagtggcctatgggggaactggggacgctgctactaggtatattgcacctaccattcttaccgacgttgacccccagtctcctgtgatgcaggaggaaatcttcggaccggtcctgccgatagtgtgcgtgcgctcgctggaggaagctatccaattcatcaaccagcgcgaaaaaccacttgcattgtatatgtttagttctaatgacaaggtgatcaaaaagatgatcgccgagacttcctccggtggcgtggcagctaacgatgtcatcgtgcacatcacgctgcacagcctaccgttcggaggtgtgggaaacagtggtatggggtcctatcacggcaagaagtctttcgaaacatttagccatcggaggagctgcctcgtgagaccgctgatgaatgacgaggggctgaaagtcaggtacccgccatctcctgccaaaatgacccagcactggctatcatggccctgggaaaatcggtcctgtagcccgtcccctgcccctctcttgtgttag

SEQ ID NO: 316714 - DNA, 1203 bp, Artificial Sequence
  derived and/or modified sequence
atgatccagaagctgcccgagtgggccgccgacgagcccgtggagaagaccccccagacccagcaggacgagctgtacatccacagcgagcccctgggcgtggtgctggtgatcggcacctggaactaccccttcaacctgaccatccagcccatggtgggcgccatcgccgccggcaacagcgtggtgctgaagcccagcgagctgagcgagaacatggccagcctgctggccaccatcatcccccagtacctggacaaggacctgtaccccgtgatcaacggcggcgtgcccgagaccaccgagctgctgaaggagagattcgaccacatcctgtacaccggcagcaccggcgtgggcaagatcatcatgaccgccgccgccaagcacctgacccccgtgaccctggagctgggcggcaagagcccctgctacgtggacaagaactgcgacctggacgtggcctgcagaagaatcgcctggggcaagttcatgaacagcggccagacctgcgtggcccccgactacatcctgtgcgaccccagcatccagaaccagatcgtggagaagctgaagaagagcctgaaggagttctacggcgaggacgccaagaagagcagagactacggcagaatcatcagcgccagacacttccagagagtgatgggcctgatcgagggccagaaggtggcctacggcggcaccggcgacgccgccaccagatacatcgcccccaccatcctgaccgacgtggacccccagagccccgtgatgcaggaggagatcttcggccccgtgctgcccatcgtgtgcgtgagaagcctggaggaggccatccagttcatcaaccagagagagaagcccctggccctgtacatgttcagcagcaacgacaaggtgatcaagaagatgatcgccgagaccagcagcggcggcgtggccgccaacgacgtgatcgtgcacatcaccctgcacagcctgcccttcggcggcgtgggcaacagcggcatgggcagctaccacggcaagaagagcttcgagaccttcagccacagaagaagctgcctggtgagacccctgatgaacgacgagggcctgaaggtgagatacccccccagccccgccaagatgacccagcactggctgagctggccctgggagaacagaagctgcagccccagccccgcccccctgctgtgctag

SEQ ID NO: 316715 - protein, 711 aa, Artificial Sequence
  derived and/or modified sequence
MLASLKVKKQELANSSDATLPDRPLSPPLTAPPTMKSSEFFEMLEKMQGIKLEEQKPGPQKNKDDYIPYPSIDEVVEKGGPYPQVILPQFGGYWIEDPENVGTPTSLGSSICEEEEEDNLSPNTFGYKLECKGEARAYRRHFLGKDHLNFYCTGSSLGNLILSVKCEEAEGIEYLRVILRSKLKTVHERIPLAGLSKLPSVPQIAKAFCDDAVGLRFNPVLYPKASQMIVSYDEHEVNNTFKFGVIYQKARQTLEEELFGNNEESPAFKEFLDLLGDTITLQDFKGFRGGLDVTHGQTGVESVYTTFRDREIMFHVSTKLPFTDGDAQQLQRKRHIGNDIVAIIFQEENTPFVPDMIASNFLHAYIVVQVETPGTETPSYKVSVTAREDVPTFGPPLPSPPVFQKGPEFREFLLTKLTNAENACCKSDKFAKLEDRTRAALLDNLHDELHAHTQAMLGLGPEEDKFENGGHGGFLESFKRAIRVRSHSMETMVGGQKKSHSGGIPGSLSGGISHNSMEVTKTTFSPPVVAATVKNQSRSPIKRRSGLFPRLHTGSEGQGDSRARCDSTSSTPKTPDGGHSSQEIKSETSSNPSSPEICPNKEKPFMKLKENGRAISRSSSSTSSVSSTAGEGEAMEEGDSGGSQPSTTSPFKQEVFVYSPSPSSESPSLGAAATPIIMSRSPTDAKSRNSPRSNLKFRFDKLSHASSGAGH

SEQ ID NO: 316716 - DNA, 574 bp, Artificial Sequence
  derived and/or modified sequence
ttcccggcaggagagcagcatttgtaaaggtatggggtgtacacgagcagggcctatttggggagagtggagaatcagagatgaggctgcacagtaaggtgagaccaggtggaaaaagctctgtgtgatgggtcgaaggtattgacatatactagccactgcccggcaccctccctccgtttccggagtagacctgtttgcttatctcgtgggcatttgccaggctgattagagtaatgagtaaagaaaagagggcactgggaaagctaagttcatttatattagaaattacatgatactcttccataaatcagaaagattgaagagtgggtgaaagaagggaaaagggaattaaaggggaaccaaggcaacctgaagtttttgagagagagagcaggaagatttgaggatgagcaggtgatgctgtagctggcgctatgtagcgacagatgggagaagttctttgtgatggttttgcctctttgagagtcttcagtaaagggagtgagccataactggtggctgctcttgcgccaatgagcctccccaattcctcctgcctcttagaagacaa

SEQ ID NO: 316717 - DNA, 159 bp, Artificial Sequence
  derived and/or modified sequence
atggccaatgagcacactttgatccatccagcctccattgaggacccgttggaagccagacctatgagcgatgaggaccctgaggacgaggacgctttaccagcgcgttggaaaaaggaaatgggccgtaaaaggaagcgaactatcgctactctatag

SEQ ID NO: 316718 - protein, 93 aa, Artificial Sequence [sequence omitted]

SEQ ID NO: 316719 - DNA, 101 bp, Artificial Sequence
  derived and/or modified sequence
actcaggaaaaataacgaatccaactcacaggagaaagaagtacaaaccagaaaccaatttcaaattacaaggaccagaatactcatgttggctggccagt

SEQ ID NO: 316720 - DNA, 282 bp, Artificial Sequence
  derived and/or modified sequence
atgtcggcggccaaggaaaacccatgtcgtaaatttcaagccaacatcttcaataagagcaagtgtcagaactgttttaaacctcgcgagtcacatctgctaaatgatgaggatctcacacaggccaagccaatctacggagggtggctcctgcttgctcccgatggaaccgacttcgataatcctgtgcacaggagcagaaaatggcagagacggttttttatcttgtacgagcacggccttctcaggtatgcattggatgagatgatgtcatcccagtag

SEQ ID NO: 316721 - DNA, 282 bp, Artificial Sequence
  derived and/or modified sequence
atgtctgctgccaaggagaacccctgcaggaagttccaggccaacatcttcaacaagagcaagtgccagaactgcttcaagccccgggagagccacctgctgaatgatgaggacctgacccaggccaagcccatctacggcggctggctgctgctggccccagatggaacagactttgacaaccctgtgcacaggagcaggaagtggcagaggcgcttcttcatcctgtatgaacatggcctgctgcgctatgccctggatgagatgatgagcagccagtag

SEQ ID NO: 316722 - DNA, 282 bp, Artificial Sequence
  derived and/or modified sequence
atgagcgccgccaaggagaacccctgccggaagttccaggccaacatcttcaacaaaagtaagtgccagaactgcttcaagcctagggagagccacctgctgaacgatgaggatttaacccaggcaaagcccatctatggcggttggctgctcctggcaccagacgggaccgatttcgacaaccccgtgcaccggtccagaaaatggcagcgacggttcttcattctgtacgaacatgggctactgcgctacgctctcgatgaaatgatgagctcgcagtag

SEQ ID NO: 316723 - DNA, 282 bp, Artificial Sequence
  derived and/or modified sequence
atgtcggctgctaaggagaatccttgtaggaagttccaggccaatattttcaataagtcaaaatgtcagaactgtttcaagcccagagaatctcatctgctcaacgacgaagacctcacacaagccaagccaatctacggaggatggctgctccttgcacctgatggcaccgactttgataacccagtgcaccgatcccggaaatggcagcgcaggttcttcatcctttacgaacacggccttttgcggtacgcgctcgatgagatgatgagcagtcaatag

SEQ ID NO: 316724 - DNA, 282 bp, Artificial Sequence
  derived and/or modified sequence
atgagcgccgccaaggagaacccctgcagaaagttccaggccaacatcttcaacaagagcaagtgccagaactgcttcaagcccagagagagccacctgctgaacgacgaggacctgacccaggccaagcccatctacggcggctggctgctgctggcccccgacggcaccgacttcgacaaccccgtgcacagaagcagaaagtggcagagaagattcttcatcctgtacgagcacggcctgctgagatacgccctggacgagatgatgagcagccagtag

SEQ ID NO: 316725 - protein, 1091 aa, Artificial Sequence
  derived and/or modified sequence
  misc_feature (1)..(1): Xaa can be any naturally occurring amino acid
XRFSTIQCQRYIHPEGSEKTWTSSTSSDTSQDRSPSEESMSSEPAPSVLPATGDSDTYLSIIHSLETKLYVTEEKLKDVTVRLESQQGQSREALLALHHQWAGTEAQLREQLRASLLQVGALASQLEQERQERARRVEGHVGELGDFQVKNSQALMCLENCREQLRSLPRASQEDEQDARAASLASVESALVSAIQALQHWPAPAHGGARAQLETGGTEENGKPASLQQCSQSELTEQEQVRLLSDQIALEASLISQIADSLKNTTSDVSRMLHEISWSGQPPMESAGAPVDTWARKVLVDGEFWSQVESLRKHLGTLGGEAVGASGDGQQSIPQGLAPILANATWVRAELSFATQSVRESFHRRLQSIQETLRGTQTALRQHKCLLREILGAYQTPDFERVMQQVLEALRLPAGHEDGVQLSWDLSPLGEVLGRDSDSSQEPFDVSDQSPGAFVAIQEELAQQLKEKASLLEEIAAALPSLPPVESLRDCQKLLQVSQSLSYNTCLGGLGQYSSLLVQDAIIQAQVCYASCRIRLEYEKELQLCKESWQTREPSCSEQAQAARALREEYEELLRKQKSEYLDVIAIVERENAELKAKAAQLDHQQQCLEDAESKHSMSMFTLRGRYEEEIRCVVEQLTRTESTLQAERSRVLSQLDASVRDRQDMERHHGEQIQTLEDRFQLKVRELQTIHEEELRTLQEHYSQSLRCLQDTLCLHQGPHPKALPAPAPNWQATQGEADSMTGLRERIQELEAQMDVMREELGHKDLEGDAATLREKYQRDLESLKATCERGFAAMEETHQKKIEDLQRQHQRELEKLREEKDRLLAEETAATISAIEAMKNAHREEMERELEKSQRSQISSVNSDVEALRRQYLEELQSVQRELEVLSEQYSQKCLENAHLAQALEAERQALRQCQRENQELNAHNQELNNRLAAEITRLRTLLTGDGGGEATGSPLAQGKDAYELEVLLRVKESEIQYLKQEISSLKDELQTALRDKKYASDKYKDIYTELSIAKAKADCDISRLKEQLKAATEALGEKSPDSATVSGYDIMKSKSNPDFLKKDRSCVTRQLRNIRSKSVIEQVSWDT

SEQ ID NO: 316726 - DNA, 3276 bp, Artificial Sequence
  derived and/or modified sequence
tagcgattctcgactatccagtgccaacggtatatccaccccgaggggtccgagaaaacatggacttctagtacaagttcggatacaagtcaagacaggagcccttctgaggaaagcatgagtagtgagcccgccccatccgttctgccagcaactggggactccgatacatatctaagcatcattcactccctcgagacgaaattgtatgtgacggaggagaaactgaaggacgtaaccgtacgcctggaaagccagcagggccagtccagggaggcactgctagcgctacaccatcagtgggccggcaccgaggcccagctgagagagcagctgagagcctctcttcttcaggtgggggccctggcctctcaactggaacaagaacggcaggaaagagcccgcagagtagagggtcatgtgggtgaacttggagattttcaggtgaagaattcgcaagcattaatgtgcctggagaactgtcgtgagcagctcagatcactgccacgcgcatctcaggaagatgagcaggacgcacgggcagcgagtctggccagcgtggagtcagcgttggtttcagctatccaggccctgcagcactggccagccccagcccatggtggagctcgtgcccagttagaaacgggcggtaccgaggagaacggcaagcccgccagcctgcagcagtgtagccagtccgagctgacagaacaggagcaggtgcgccttctgtccgaccagatcgcactagaagcatctctgatttcgcaaattgctgattccctgaaaaataccacttctgatgtgagccgaatgctgcatgaaatctcttggagtgggcaaccaccaatggaatctgccggagcaccagtggacacatgggccagaaaagtactcgtcgatggtgaattctggagccaagtggaaagcctgcggaagcaccttggtactctggggggcgaagcggtaggagcaagtggcgacggacagcagtcaatcccacagggattggctcctattcttgcgaacgctacctgggtacgcgctgagttgagcttcgctacccagagtgtgcgggagtcttttcatagacgcctgcagagcattcaggagaccctaagggggacacagactgctctgaggcaacacaaatgccttttgcgcgaaatcctgggcgcctaccagactccagattttgagagagttatgcagcaagttctggaagccctgaggctgccagcaggccacgaggatggcgtgcaactttcatgggatctgtccccactgggagaggtccttgggcgagacagcgatagcagccaggaaccctttgatgtgtccgaccagtcccctggtgccttcgtggccatccaggaggaactggcgcagcaactaaaagaaaaagcttccttgcttgaggagattgcagcagcactgccaagtcttccacccgtcgaatcattacgtgactgccaaaagttgctgcaggtgtctcagtctctatcatacaatacttgtctcggaggactgggccaatacagcagcctccttgttcaggacgctattattcaagcccaggtatgctacgccagctgcaggataaggctggagtatgaaaaagagctgcagctctgcaaggaaagctggcagacacgggaaccctcttgctccgaacaagcccaggcagcaagagcactgcgcgaggagtatgaggagctgctgaggaagcaaaagtcagagtatctcgacgtgattgccatcgttgaacgggaaaatgccgagctgaaagcaaaagctgcccagctggatcatcagcagcagtgccttgaagatgccgagtctaaacacagcatgagcatgttcaccctccgaggccgctatgaggaagagatccgctgcgtcgtcgagcagctgacaaggacggagtcaacgctacaggccgaacgttcgagggtcttgagtcagctggacgcttcagtgcgcgatcgacaggacatggaacgccaccatggagaacagattcaaacactagaggatcgcttccagcttaaagtacgagagctgcaaacgatccacgaagaggaactgcggacattgcaagaacactatagtcagtcccttcgctgtctgcaggacacgctttgccttcaccaaggccctcatccaaaggcactgcccgctccagcccctaactggcaggccacacagggggaagctgactcaatgacggggctgagagagaggatacaggaactggaggcacagatggacgtcatgagggaagagctcggacacaaagacttggagggcgacgccgctaccctgagggagaagtatcaaagggatctggaaagccttaaggcgacctgtgaacgggggttcgctgccatggaggagacacaccagaagaagatagaagacctgcagagacagcaccagcgggaactcgaaaagctgcgggaggagaaagacagattacttgccgaagaaacggctgctactattagcgccatagaagctatgaagaacgctcacagggaggagatggagcgcgagctagagaaaagtcagcgttctcagatttcctctgtgaactcagatgttgaggcacttcggaggcagtacttggaggagctgcagtccgtgcagcgcgagcttgaggtcctatctgagcaatactcccagaagtgtttggagaatgcccacctggctcaagcactcgaggctgagaggcaggccctcagacagtgccagcgcgagaaccaggaattgaacgcccacaaccaagagttgaataaccggctggccgccgagatcacgcggctgaggacgctgcttacaggcgatggaggtggtgaagctaccggctctcctctagctcaggggaaggacgcctatgaacttgaagtcttactaagggtgaaggaatccgagattcagtacctgaagcaggaaatcagctccttaaaagacgagctgcaaaccgccctgcgcgataaaaagtacgcttctgataaatacaaagacatctacacagagctgtccattgcaaaggccaaggccgattgcgacatctcgagattaaaggagcaactcaaggcagccactgaggccctcggcgagaagagccctgattcagcgacagtcagtggctacgatatcatgaaatcaaagtccaatcctgactttcttaaaaaggatagatcttgcgttacgcgccagctgcggaacatcaggagtaaatctgtaatcgaacaagtgtcgtgggacacctag

SEQ ID NO: 316727 - DNA, 3276 bp, Artificial Sequence
  derived and/or modified sequence
tgaagattcagcaccatccagtgccagcgctacatccaccctgagggcagcgagaagacctggaccagcagcaccagcagtgacaccagccaggacaggagccccagcgaggagagcatgagcagcgagcccgcccccagcgtgctgcctgccaccggggacagcgacacctacctgagcatcatccacagcctggagaccaagctgtatgtgacagaggagaagctgaaggatgtgacagtgcggctggagagccagcagggccagagccgggaggccctgctggccctgcaccaccagtgggccggcacagaggcccagctgcgggagcagctgcgggccagcctgctgcaggtgggcgccctggccagccagctggagcaggagcggcaggagcgggccaggagagtggagggccacgtgggggagctgggggacttccaggtgaagaacagccaggccctgatgtgcctggagaactgccgggagcagctgcggagcctgccccgggccagccaggaggatgagcaggatgcccgggccgccagcctggcctctgtggagagcgccctggtgtctgccatccaggccctgcagcactggccagccccagcccacggcggggcccgggcccagctggagactggaggaacagaggagaatggcaagccagccagcctgcagcagtgcagccagagcgagctgacagagcaggagcaggtgcggctgctgagtgaccagatcgccctggaggccagcctcatcagccagattgctgacagcctgaagaacaccaccagtgatgtgtccaggatgctgcacgagatctcctggagcggccagccccccatggagagcgctggggcccctgtggacacctgggccaggaaggtgctggtggatggagagttctggagccaggtggagagcctgaggaagcacctgggcaccctgggcggggaggccgtgggcgccagcggagatggccagcagagcatcccccagggcctggcccccatcctggccaatgccacctgggtgcgggcagagctgagctttgccacccagagcgtgcgggagagcttccaccggcggctgcagagcatccaggagaccctgcggggcacccagacagccctgcggcagcacaagtgcctgctgcgggagatcctgggcgcctaccagaccccagactttgagcgggtgatgcagcaggtgctggaggccctgcggctgcctgctggccatgaagatggagtgcagctgtcctgggacctgagccccctgggggaggtgctgggccgggacagcgacagcagccaggagccctttgatgtgtctgaccagagccctggggcctttgtggccatccaggaggagctggcccagcagctgaaggagaaggccagcctgctggaggagattgctgctgccctgcccagcctgccccctgtggagagcctgcgggactgccagaagctgctgcaggtgtcccagagcctgagctacaacacctgcctgggcggcctgggccagtacagcagcctgctggtgcaggatgccatcatccaggcccaggtgtgctacgccagctgccgcatccggctggagtatgagaaggagctgcagctgtgcaaggagagctggcagacccgggagcccagctgcagcgagcaggcccaggccgcccgggccctgcgggaggagtatgaggagctgctgaggaagcagaagtctgagtacctggatgtgattgccatcgtggagagagaaaatgctgagctgaaggccaaggccgcccagctggaccaccagcagcagtgcctggaggatgctgagagcaagcacagcatgtccatgttcaccctgcggggccgctatgaggaggagatccgctgtgtggtggagcagctgaccaggacagagagcaccctgcaggccgagaggagccgggtgctgagccagctggatgcctctgtgcgggaccggcaggacatggagcggcaccacggggagcagatccagaccctggaggaccgcttccagctgaaggtgcgggagctgcagaccatccacgaggaggagctgcggaccctgcaggagcactacagccagagcctgcgctgcctgcaggacaccctgtgcctgcaccagggcccccaccccaaggccctgcctgccccagcccccaactggcaggccacccagggcgaggccgacagcatgacaggcctgcgggagcgcatccaggagctggaggcccagatggatgtgatgagggaggagctgggccacaaggacctggagggagatgctgccaccctgcgggagaagtaccagagggacctggagagcctgaaggccacctgtgagcggggctttgctgccatggaggagacccaccagaagaagattgaggacctgcagaggcagcaccagcgggagctggagaagctgcgggaggagaaggaccggctgctggccgaggagacagctgccaccatcagcgccatcgaggccatgaagaatgcccaccgggaggagatggagcgggagctggagaagagccagaggagccagatcagctctgtgaacagtgatgtggaggccctgcggcggcagtacctggaggagctgcagagcgtgcagcgggagctggaggtgctgtctgagcagtacagccagaagtgcctggagaatgcccacctggcccaggccctggaggccgagcggcaggccctgcggcagtgccagcgggagaaccaggagctgaatgcccacaaccaggagctgaacaaccggctggccgctgagatcacccggctgcggaccctgctgactggagatggcggcggggaggccaccggcagccccctggcccagggcaaggatgcctatgagctggaggtgctgctgcgggtgaaggagagcgagatccagtacctgaagcaggagatcagcagcctgaaggatgagctgcagacagccctgcgggacaagaagtatgccagtgacaagtacaaggacatctacacagagctgagcatcgccaaggccaaggctgactgtgacatcagccggctgaaggagcagctgaaggccgccacagaggccctgggggagaagagcccagacagcgccaccgtgtctggctatgacatcatgaagagcaagagcaacccagacttcctgaagaaggacaggagctgtgtgacccggcagctgaggaacatccgcagcaagagcgtcatcgagcaggtgtcctgggacacctag

SEQ ID NO: 316728 - DNA, 3276 bp, Artificial Sequence
  derived and/or modified sequence
tgacggttcagcaccatccagtgccagcggtacatccaccccgagggctccgaaaagacctggacctcatccacgagcagtgacacgtcgcaagatagatcaccctccgaagagtctatgtcaagcgagcctgccccctccgtcctccctgccaccggggattctgacacgtacttgagcatcatacattctcttgaaacaaagctatatgtgacagaggagaagctaaaagacgtgacggtccggcttgaaagccagcaggggcagtcccgggaggcccttctggccctccaccaccagtgggccgggaccgaagcccagctgagggaacaactgagagccagcctactgcaggtgggagcactggcgagccagctggagcaggagcgtcaggaaagagcccgcagagtcgaaggccacgtgggagagttgggcgactttcaagttaaaaatagtcaggcactaatgtgtctggagaattgccgggaacagttgcggtcactgcctagggcctctcaggaagacgaacaagacgctcgagccgcgagcctggcgtcagttgaatcggccctagtgtccgctatacaggctctgcagcactggcctgctcccgcgcatgggggcgcccgagcacagctggagaccggtggcaccgaggaaaatggtaaaccagcaagcctccagcagtgctcacagagtgagcttacagagcaggaacaggttaggctcctctcagatcagatcgcccttgaggccagcctgatttctcaaattgctgactcactcaaaaataccacgtccgacgtgagtagaatgcttcacgagatctcctggtcgggccagccaccaatggagagtgcaggtgctccagtggatacgtgggctcggaaggtattggtagacggggagttctggagccaggtagagagtcttaggaagcaccttggcaccctgggaggggaggccgtcggggcgagtggagacggtcagcagtccatacctcaagggctggcccctatactcgcaaacgcaacatgggttagggctgagttgtccttcgctacccagagtgtcagggaatccttccaccggcggttgcagtctattcaggaaactctgcgagggactcaaacggcactgcggcagcataaatgtctgttgagggagattctcggagcatatcaaacaccagattttgagcgggtgatgcagcaggtactcgaggccctgagactgcccgcaggacatgaggacggcgtgcaactgagctgggacctgagccctcttggtgaggtgttaggacgggacagtgacagttcccaggaaccattcgatgtctctgaccagtctccaggcgcattcgtggctattcaggaggagctggctcagcaactgaaggaaaaagcatcacttcttgaagagattgccgcagccttgcctagcctgccacctgtggaatccctgcgcgattgccagaagcttctacaggtgtcgcagtctctgagctataacacttgcttgggcgggttgggccagtattcttccctgttggtacaggatgcgatcatacaggcccaggtgtgttacgcatcctgcagaattcgcctggaatacgagaaggaattacagctgtgtaaggagtcctggcagaccagggaacccagttgcagcgagcaggcccaggccgcacgtgccctccgtgaggagtacgaagagctgttgcgtaagcaaaagagtgaatacctggacgtgatcgctatcgtagagagggaaaatgcagagctgaaagccaaggccgctcaactggaccaccaacaacagtgcctcgaggatgccgagtctaaacactcaatgagcatgtttactctccggggacgatacgaagaagaaatccggtgcgttgtggagcagctgactcgcaccgaatcaacactgcaggctgagaggagccgggtgctgtctcagctggacgcctcagtgagggatcggcaggatatggaaaggcatcacggggagcagatccagacactggaggatcgctttcagcttaaagtgcgagagctgcaaaccatccatgaggaggaacttcgaaccctgcaggaacattatagccagtccttgcggtgcctacaggacacactttgtctccatcaaggtccccaccctaaggcacttcccgccccagcgccaaactggcaggccactcagggtgaagcagactctatgaccggcctcagagagcgaattcaggaacttgaggcccagatggatgtcatgagggaagagctggggcacaaggatctggagggagatgctgctactctgcgtgaaaagtatcagcgtgatctcgaaagcctgaaggctacctgcgagagggggtttgccgcgatggaggagacccaccagaaaaagatcgaagacttgcaaaggcagcaccaacgggagctggagaagctcagggaagaaaaggacagactgttagccgaagagactgccgctacaattagtgctatagaggctatgaagaacgcacacagagaagaaatggaacgggagctggagaaatctcagaggtcacagattagctccgttaattctgacgtagaagcccttcggaggcaatatcttgaggaattgcagtccgtgcagcgggagctagaggtgctctccgaacaatacagccagaagtgcctggaaaatgcacatctagcccaggctctggaagctgaacggcaggcccttcggcaatgtcagcgagaaaaccaggagctcaatgctcacaaccaggaactaaataatagattggccgcagaaattacaaggctgcgaacactgctcactggtgacggcggtggggaagcaactggatcacccctggctcagggcaaggacgcctacgaattggaggtgttgctgcgcgtgaaggagagcgagattcagtatctaaaacaggagatctctagcctcaaggatgagttgcagactgctctgagagacaaaaagtacgcgtccgacaagtataaagacatttataccgaattaagcatcgcaaaggctaaggctgattgcgatatctctaggctgaaagagcagctgaaggccgcaaccgaggcattgggcgagaagtcccctgactccgccacggtgagtggctacgacattatgaaatcaaagagtaacccagactttctgaaaaaggaccggtcatgcgtcacccgtcagctccggaacataagaagcaaaagtgttatcgaacaagttagttgggacacctag

SEQ ID NO: 316729 - DNA, 3276 bp, Artificial Sequence
  derived and/or modified sequence
tagagattttccaccatccagtgtcagcgctacattcaccccgaaggcagtgagaagacgtggacatcctccacaagttcagatacctcccaggataggtcaccgagcgaagagtcgatgagttcagaacccgcacccagtgtcctcccagcaactggagattccgacacatacctatcaattatccattctttagagacaaagctttatgtgaccgaagagaaactgaaagatgttactgtccgcctcgaatctcaacagggacagagtcgcgaggccctgctagcgctccatcatcagtgggcaggcactgaagcgcagctgagagaacagctccgagctagtttactccaggtaggagctctcgccagccagttggaacaggaaagacaagagagagcccgaagagtggagggccacgtaggggagctgggcgatttccaggtgaagaacagccaagctcttatgtgtctggagaattgccgagagcagctgaggtctctccctagagcttcccaagaagatgaacaggacgcgcgagccgcttcgctggcgagtgtggagagcgcgttagtgtctgccattcaagccctccagcattggccagccccagcccatgggggagccagagcacaactagaaacagggggtacggaggagaacggcaaacctgccagtctgcagcagtgtagccagtcggaacttaccgaacaggagcaagtcaggctgctgagcgatcagatcgcactggaggcttctctgatatcccagattgccgattccctaaagaacaccacgtccgacgtgtcaaggatgctccatgagatctcatggagtgggcaaccacccatggaatcggcgggtgccccagtcgatacctgggcgagaaaagttcttgttgacggagaattttggagtcaagttgagtctctgcggaagcatctggggacccttggcggagaggccgttggcgcttcaggcgatggtcagcagagcatccctcagggccttgcgcctatcctggcaaacgcgacgtgggtaagggctgaactgagcttcgctacacaatctgtgcgggaatcctttcaccgccgtctccagtccatacaggagacacttagaggaactcagacagctctacggcagcacaaatgcctccttcgggagatactgggggcttatcagacgccggatttcgaacgggtgatgcaacaggtgcttgaagccctgcgactgccagctggacatgaagacggcgtacagctgtcttgggatctgtcgccactgggagaagttcttggacgtgactcagatagttcacaagaacccttcgacgtaagcgatcagtcaccaggcgcatttgtggcaatacaagaggaattggcgcagcagttgaaagaaaaggctagtctcctcgaggagatagccgctgccctgccgtctttacctcccgtggaaagcctacgcgattgccagaaactgctgcaggtcagtcaaagcctgagctacaatacctgcctggggggactgggccagtactcaagccttctggtgcaggatgcgattatccaagcacaggtgtgctacgcatcatgcaggataaggctagagtacgagaaagaactgcagttgtgcaaagaatcctggcagactcgagagccaagctgttccgagcaggcccaggccgctcgtgcgctgcgagaggagtatgaagagctgctccgaaagcagaaaagcgagtatctcgatgtcatcgcgattgtggagcgcgagaatgcggaattaaaggctaaagccgctcagctcgaccatcagcagcagtgtttagaagatgctgagagcaaacactccatgtccatgtttacactcagaggacggtacgaagaggaaattcgctgtgtcgtggaacaattaacccgtaccgaatctacactgcaggcagagcgatcccgcgttctcagccaactggacgcatcggtgcgagataggcaggacatggagcgccaccacggcgagcagatccaaactttagaggacaggtttcagctcaaggttcgggagcttcagaccatacacgaggaagagctgcgtactctgcaagagcactactctcagtccctacggtgcctgcaagacacgctgtgtctacaccagggaccccaccccaaggcgttacccgctcctgcaccaaattggcaggccactcagggcgaagcggattccatgacagggttacgcgagcgaatccaagaactggaggcccaaatggacgtgatgcgggaggagctgggtcacaaagaccttgagggagatgctgctactctccgcgagaaataccagcgggacctggaaagcttaaaggctacttgtgagcggggtttcgcagcaatggaggagacccatcaaaaaaaaatcgaggatctgcagcgccagcatcagcgagaactagaaaagctgagagaggaaaaggatcggctgctggcagaggagaccgctgctactattagcgccatcgaggccatgaagaacgcgcaccgggaagagatggaaagagaactcgagaagtcccagagatcccagatatccagtgtaaattctgacgtggaggccctgcgcaggcagtacctcgaagagctccagtcagttcagcgggaattggaggtgttgtccgagcagtattctcaaaagtgcctagaaaatgctcatctcgctcaggccttggaggccgaacgacaggcactgaggcagtgccaacgcgagaaccaggagctgaacgcccacaaccaagagttgaacaatcggctagcggctgaaattacacgtctccgaacactgctgactggcgacgggggtggagaggccaccggtagcccactggcgcaaggcaaagacgcctacgagctggaggtgttattaagggtgaaggagtccgagattcagtatctgaagcaggagatttctagcctcaaagatgaactgcagacagctcttcgcgataagaagtatgccagcgacaaatataaggacatttacacagagttgagtatagctaaagccaaagccgattgtgacatttcaaggcttaaggagcagttgaaggccgctaccgaagcgttaggcgaaaagagtcctgattccgccacagtctccggatacgacatcatgaagagcaaatctaaccccgactttctgaaaaaggaccggagctgcgttactagacagctcaggaacatccggtctaagagcgtcatcgaacaggtgtcctgggatacttag

SEQ ID NO: 316730 - DNA, 3276 bp, Artificial Sequence
  derived and/or modified sequence
tgaagattcagcaccatccagtgccagagatacatccaccccgagggcagcgagaagacctggaccagcagcaccagcagcgacaccagccaggacagaagccccagcgaggagagcatgagcagcgagcccgcccccagcgtgctgcccgccaccggcgacagcgacacctacctgagcatcatccacagcctggagaccaagctgtacgtgaccgaggagaagctgaaggacgtgaccgtgagactggagagccagcagggccagagcagagaggccctgctggccctgcaccaccagtgggccggcaccgaggcccagctgagagagcagctgagagccagcctgctgcaggtgggcgccctggccagccagctggagcaggagagacaggagagagccagaagagtggagggccacgtgggcgagctgggcgacttccaggtgaagaacagccaggccctgatgtgcctggagaactgcagagagcagctgagaagcctgcccagagccagccaggaggacgagcaggacgccagagccgccagcctggccagcgtggagagcgccctggtgagcgccatccaggccctgcagcactggcccgcccccgcccacggcggcgccagagcccagctggagaccggcggcaccgaggagaacggcaagcccgccagcctgcagcagtgcagccagagcgagctgaccgagcaggagcaggtgagactgctgagcgaccagatcgccctggaggccagcctgatcagccagatcgccgacagcctgaagaacaccaccagcgacgtgagcagaatgctgcacgagatcagctggagcggccagccccccatggagagcgccggcgcccccgtggacacctgggccagaaaggtgctggtggacggcgagttctggagccaggtggagagcctgagaaagcacctgggcaccctgggcggcgaggccgtgggcgccagcggcgacggccagcagagcatcccccagggcctggcccccatcctggccaacgccacctgggtgagagccgagctgagcttcgccacccagagcgtgagagagagcttccacagaagactgcagagcatccaggagaccctgagaggcacccagaccgccctgagacagcacaagtgcctgctgagagagatcctgggcgcctaccagacccccgacttcgagagagtgatgcagcaggtgctggaggccctgagactgcccgccggccacgaggacggcgtgcagctgagctgggacctgagccccctgggcgaggtgctgggcagagacagcgacagcagccaggagcccttcgacgtgagcgaccagagccccggcgccttcgtggccatccaggaggagctggcccagcagctgaaggagaaggccagcctgctggaggagatcgccgccgccctgcccagcctgccccccgtggagagcctgagagactgccagaagctgctgcaggtgagccagagcctgagctacaacacctgcctgggcggcctgggccagtacagcagcctgctggtgcaggacgccatcatccaggcccaggtgtgctacgccagctgcagaatcagactggagtacgagaaggagctgcagctgtgcaaggagagctggcagaccagagagcccagctgcagcgagcaggcccaggccgccagagccctgagagaggagtacgaggagctgctgagaaagcagaagagcgagtacctggacgtgatcgccatcgtggagagagagaacgccgagctgaaggccaaggccgcccagctggaccaccagcagcagtgcctggaggacgccgagagcaagcacagcatgagcatgttcaccctgagaggcagatacgaggaggagatcagatgcgtggtggagcagctgaccagaaccgagagcaccctgcaggccgagagaagcagagtgctgagccagctggacgccagcgtgagagacagacaggacatggagagacaccacggcgagcagatccagaccctggaggacagattccagctgaaggtgagagagctgcagaccatccacgaggaggagctgagaaccctgcaggagcactacagccagagcctgagatgcctgcaggacaccctgtgcctgcaccagggcccccaccccaaggccctgcccgcccccgcccccaactggcaggccacccagggcgaggccgacagcatgaccggcctgagagagagaatccaggagctggaggcccagatggacgtgatgagagaggagctgggccacaaggacctggagggcgacgccgccaccctgagagagaagtaccagagagacctggagagcctgaaggccacctgcgagagaggcttcgccgccatggaggagacccaccagaagaagatcgaggacctgcagagacagcaccagagagagctggagaagctgagagaggagaaggacagactgctggccgaggagaccgccgccaccatcagcgccatcgaggccatgaagaacgcccacagagaggagatggagagagagctggagaagagccagagaagccagatcagcagcgtgaacagcgacgtggaggccctgagaagacagtacctggaggagctgcagagcgtgcagagagagctggaggtgctgagcgagcagtacagccagaagtgcctggagaacgcccacctggcccaggccctggaggccgagagacaggccctgagacagtgccagagagagaaccaggagctgaacgcccacaaccaggagctgaacaacagactggccgccgagatcaccagactgagaaccctgctgaccggcgacggcggcggcgaggccaccggcagccccctggcccagggcaaggacgcctacgagctggaggtgctgctgagagtgaaggagagcgagatccagtacctgaagcaggagatcagcagcctgaaggacgagctgcagaccgccctgagagacaagaagtacgccagcgacaagtacaaggacatctacaccgagctgagcatcgccaaggccaaggccgactgcgacatcagcagactgaaggagcagctgaaggccgccaccgaggccctgggcgagaagagccccgacagcgccaccgtgagcggctacgacatcatgaagagcaagagcaaccccgacttcctgaagaaggacagaagctgcgtgaccagacagctgagaaacatcagaagcaagagcgtgatcgagcaggtgagctgggacacctag

SEQ ID NO: 316731 - protein, 279 aa, Artificial Sequence
  derived and/or modified sequence
  misc_feature (1)..(1): Xaa can be any naturally occurring amino acid
XQEAELGEPDPEQKRSRARERRREGRSKTFDWAEFRPIQQALAQERVGGVGPADTHEPLRPEAEPGELERERARRREERRKRFGMLDATDGPGTEDAALRMEVDRSPGLPMSDLKTHNVHVEIEQRWHQVETTPLREEKQVPIAPVHLSSEDGGDRLSTHELTSLLEKELEQSQKEASDLLEQNRLLQDQLRVALGREQSAREGYVLQTEVAASPSGAWQRLHRVNQDLQSELEAQCQRQELITHQIQTLKRSYGEAKDTIRHHEAEIRSLQARLSNAA

SEQ ID NO: 316732 - protein, 194 aa, Artificial Sequence
  derived and/or modified sequence
LRQQTVEELQSVQRELEVLSEQYSQKCLENAHLAQALEAERQALRQCQRENQELNAHNQVLLRVKESEIQYLKQEISSLKDELQTALRDKKYASDKYKDIYTELSIAKAKADCDISRLKEQLKAATEALGEKSPDSATVSGYDIMKSKSNPDFLKKDRSCVTRQLRNIRSKSLKEGLTVQERLKLFESRDLKKD

SEQ ID NO: 316733 - DNA, 585 bp, Artificial Sequence
  derived and/or modified sequence
ctgagacaacagactgtggaagaattacaatcagtgcaacgggaactggaggttctgtccgagcagtactcacagaaatgcctcgagaatgctcacctcgcccaggcactcgaagccgaacgccaggcactcaggcagtgccagagagagaatcaagagttgaatgctcataatcaggtgttactacgggtaaaggaaagcgaaatccagtacttgaagcaggagatcagctctctaaaggacgagctgcaaaccgcattgcgtgataaaaaatatgcgtccgataagtacaaggacatttataccgaactgtcaatagcaaaggcaaaggccgattgtgacatctctcgattaaaagagcagctgaaggcagcgacagaagcgcttggcgaaaaaagcccagatagtgccacagtcagtggctacgatattatgaaatcaaagtcaaaccctgatttcctgaagaaggacagaagttgcgtcactcgtcaactgagaaatataaggagcaagtccctgaaggaaggtttaacagtacaggaacgcttgaagctgttcgaaagcagggacctgaaaaaggattag

SEQ ID NO: 316734 - DNA, 585 bp, Artificial Sequence
  derived and/or modified sequence
ctgcggcagcagacagtggaggagctgcagagcgtgcagcgggagctggaggtgctgtctgagcagtacagccagaagtgcctggagaatgcccacctggcccaggccctggaggccgagcggcaggccctgcggcagtgccagcgggagaaccaggagctgaatgcccacaaccaggtgctgctgcgggtgaaggagagcgagatccagtacctgaagcaggagatcagcagcctgaaggatgagctgcagacagccctgcgggacaagaagtatgccagtgacaagtacaaggacatctacacagagctgagcatcgccaaggccaaggctgactgtgacatcagccggctgaaggagcagctgaaggccgccacagaggccctgggggagaagagcccagacagcgccaccgtgtctggctatgacatcatgaagagcaagagcaacccagacttcctgaagaaggacaggagctgtgtgacccggcagctgaggaacatccgcagcaagagcctgaaggagggcctgactgtgcaggagcggctgaagctgtttgagagccgggacctgaagaaggactag

SEQ ID NO: 316735 - DNA, 746 bp, Artificial Sequence
  derived and/or modified sequence
ttaagacaacagactgtggaggagctgcagtcggtgcagcgggaactggaggtcctctcggagcagtactcgcagaagtgcctggagaatgcccatctggcccaggcgctggaggccgagcggcaggccctgcggcagtgccagcgtgagaaccaggagctcaatgcccacaaccaggtcttattgcgggtaaaggaatcggaaatacagtacctgaaacaggagattagctccctcaaggatgagctgcagacggcactgcgggacaagaagtacgcaagtgacaagtacaaagacatctacacagagctcagcatcgcgaaggctaaggctgactgtgacatcagcaggttgaaggagcagctcaaggctgcaacggaagcactgggggagaagtcccctgacagtgccacggtgtccggatatgatataatgaaatctaaaagcaaccctgacttcttgaagaaagacagatcctgtgtcacccggcaactcagaaacatcaggtccaagagtctgaaggaaggcctgacggtgcaagaacggttgaagctctttgaatccagggacttgaagaaagactaggtgtgtcccatccaagttgagcacgcgccttccccagcttgcagcagcacaccccaagcgctgcttttcacctgtacctttgttttattattattattattattgctgttgttgtcatcgttaactgtgggcatggaatgcgtgaggctggcttctgggtt

SEQ ID NO: 316736 - DNA, 585 bp, Artificial Sequence
  derived and/or modified sequence
ctgcggcagcagaccgtggaggagctgcagagcgtgcagcgggagctggaggtcctgtcggaacaatattctcagaagtgcctggagaacgcacatctggcccaagcactcgaagctgagcggcaggccctcaggcagtgccagcgtgaaaaccaggagctgaacgctcacaaccaagtattgcttcgtgtgaaggagagcgagatccagtacctcaaacaggaaatcagcagccttaaggatgaacttcagactgccttgcgggataagaaatacgcaagcgacaagtataaagacatctacaccgagctgagcatcgcgaaggcgaaagccgactgcgacatcagcagactgaaggaacaactgaaagcggcgacagaggcgttgggagaaaaatcccccgactccgcgacagtttccggctatgacattatgaagtccaagtcaaatcctgatttcctgaagaaagatcgctcctgtgtgaccaggcagttaagaaatataaggagtaagagcttaaaagagggtttaaccgtccaggagagactaaagctgtttgaatcccgtgacctgaaaaaggactag

SEQ ID NO: 316737 - DNA, 585 bp, Artificial Sequence
  derived and/or modified sequence
ctaagacaacaaaccgtagaagagttgcagagcgtccagagagagctggaagttttgagtgagcaatacagtcagaagtgtctggagaacgcccatctcgcacaagcactggaggccgaacgccaggcgctgagacagtgccagcgagaaaatcaggaattaaacgctcacaaccaggttctgctgagggtgaaggagagcgagattcagtacctaaagcaagagatctcttcgttgaaggacgagttgcagaccgcattaagggacaaaaaatacgctagcgacaagtataaagatatctacaccgagctttccatcgctaaggccaaggcagactgtgacataagccgccttaaagaacaattaaaggcggcaaccgaggccctaggcgagaaaagtcccgacagcgccactgtcagcggctacgacatcatgaagagcaagtccaatcccgactttttaaagaaggaccgctcgtgcgtcactagacaactgaggaacatcaggtctaaatccttgaaggagggactgaccgtccaggagagactgaagcttttcgaatctcgagacctgaaaaaagattag

SEQ ID NO: 316738 - DNA, 585 bp, Artificial Sequence
  derived and/or modified sequence
ctgagacagcagaccgtggaggagctgcagagcgtgcagagagagctggaggtgctgagcgagcagtacagccagaagtgcctggagaacgcccacctggcccaggccctggaggccgagagacaggccctgagacagtgccagagagagaaccaggagctgaacgcccacaaccaggtgctgctgagagtgaaggagagcgagatccagtacctgaagcaggagatcagcagcctgaaggacgagctgcagaccgccctgagagacaagaagtacgccagcgacaagtacaaggacatctacaccgagctgagcatcgccaaggccaaggccgactgcgacatcagcagactgaaggagcagctgaaggccgccaccgaggccctgggcgagaagagccccgacagcgccaccgtgagcggctacgacatcatgaagagcaagagcaaccccgacttcctgaagaaggacagaagctgcgtgaccagacagctgagaaacatcagaagcaagagcctgaaggagggcctgaccgtgcaggagagactgaagctgttcgagagcagagacctgaagaaggactag

SEQ ID NO: 316739 - protein, 187 aa, Artificial Sequence
  derived and/or modified sequence
MATASPSVFLLMVNGQVESAQFPEYDDLYCKYCFVYGQDWAPTAGLEEGISQITSKSQDVRQALVWNFPIDVTFKSTNPYGWPQIVLSVYGPDVFGNDVVRGYGAVHVPFSPGRHKRTIPMFVPESTSKLQKFTSWFMGRRPEYTDPKVVAQGEGREDENAEAEIPRSTWVSLCPSPAWLMLPFCPQ

SEQ ID NO: 316740 - DNA, 564 bp, Artificial Sequence
  derived and/or modified sequence
atggccacagcctcccctagcgtgtttctgctgatggttaatggtcaagtggaatctgcacaattcccagaatatgatgacctgtattgtaaatattgttttgtctacgggcaggactgggccccaaccgctggcctggaagaagggatctctcaaattacaagcaaatcacaagacgtccggcaggccctcgtctggaacttccctatcgacgtcacatttaaatctacgaacccatacggctggccccagatcgtcctgtctgtctatggccctgacgtcttcggcaatgatgtggtgagaggatacggagctgtgcacgtgcccttttctcctggcagacataaacggacgatccccatgtttgtgcctgagtcaacctcaaaattgcagaagttcaccagttggttcatggggagacgtccggaatacaccgacccaaaggtcgtcgctcagggggagggccgggaagacgaaaacgcagaagccgagattcctagaagcacctgggtgagcctgtgcccatcgccagcctggcttatgttaccattctgccctcaatag

SEQ ID NO: 316741 - DNA, 564 bp, Artificial Sequence
  derived and/or modified sequence
atggccacagccagccccagcgtcttcctgctgatggtgaatggccaggtggagagcgcccagtttcctgaatatgatgacctgtactgcaagtactgctttgtgtatggccaggactgggcccccacagctggcctggaggagggcatcagccagatcaccagcaagagccaggatgtgcggcaggccctggtgtggaacttccccattgatgtgaccttcaagagcaccaacccctacggctggccccagatcgtgctgtctgtgtatggcccagatgtgtttggaaatgatgtggtgcggggctatggagctgtgcacgtgcccttcagccctggccgccacaagaggaccatccccatgtttgtgcctgagagcaccagcaagctgcagaagttcacctcctggttcatgggccggcggcctgagtacacagaccccaaggtggtggcccagggcgagggcagagaagatgaaaatgctgaggccgagatccccaggagcacctgggtgtccctgtgccccagccctgcctggctgatgctgcccttctgcccccagtag

SEQ ID NO: 316742 - DNA, 564 bp, Artificial Sequence
  derived and/or modified sequence
atggccaccgccagccccagcgtgttcctgctgatggtgaacggccaggtcgaatccgcccagtttcctgaatacgacgatttgtattgcaaatattgctttgtgtacggccaagactgggcccccacggccggactcgaggaggggatttctcaaattacatctaagagtcaggatgtgcgtcaggcgctggtgtggaattttcccatagacgtcacctttaagtctactaatccatatggatggcctcagatcgtcctgagcgtctacggcccagatgtgtttggaaacgatgtcgtgagaggctatggagcagtgcatgttcctttcagtccaggtcggcataagcggactatccccatgtttgtgcccgagagcactagcaagttgcagaagtttacatcctggtttatgggcagacggcctgagtacacagaccctaaagtggtggcgcaaggtgaggggcgtgaggatgagaacgccgaagcggaaatccctcgctccacatgggtctcactctgtccatcccccgcgtggctgatgttgccgttctgcccccagtag

SEQ ID NO: 316743 - DNA, 564 bp, Artificial Sequence
  derived and/or modified sequence
atggccacagccagccctagtgtttttttactgatggtgaacggacaagtcgagtcggcacaattcccggaatacgatgacctctattgtaaatactgttttgtgtatgggcaggactgggcgcctacagccggactcgaggaaggcattagccagatcaccagcaaatcccaggatgtgcggcaagctctggtatggaacttcccgattgacgttacctttaaatcgaccaatccatacggctggccacagatcgtgctcagcgtgtacgggccagatgtgtttgggaacgacgtcgtgcggggttatggcgctgtgcatgtaccattcagtccagggcgtcacaagagaactattccaatgttcgtcccagaaagcaccagcaaactgcagaagtttactagctggttcatgggtagaagaccggagtacaccgaccctaaagtcgtggctcagggggagggcagggaagacgagaacgcagaggcggaaatccccagatcaacttgggtgtctctgtgtcctagccccgcatggctgatgttgcctttctgccctcaatag

SEQ ID NO: 316744 - DNA, 733 bp, Artificial Sequence
  derived and/or modified sequence
ctgcgcctgcgcatgccacacgcgcactcgcgtggccttcgcgaaggtgtcgctgccaagaaacgtgtcctgcgcgctacgccgtctgtttctagggcaacgccggcgtctcttagcaaccgcgcgcggcctaggtgggtccccccggcacccccagacctgccatggcgaccgcgagtcctagcgtctttctactcatggtcaacgggcaggtggagagcgcccagtttccagagtatgatgacctctactgcaagtactgctttgtgtacggccaggactgggcccccacagcgggtctggaggaggggatctcacagatcacatccaagagccaagatgtgcggcaagcactggtgtggaacttccccattgatgtcacctttaaaagcaccaacccctacggctggccacagatcgtgctcagcgtgtatggaccagatgtgttcgggaacgatgtggttcgaggctatggggccgtgcacgtgcccttctcacctggccggcacaaaaggaccatccccatgtttgtcccagaatctacgtctaaactgcagaagtttacaagctggttcatggggcggcggcccgagtacacagaccccaaggtggtggctcagggtgaaggccgggaagatgagaacgctgaggctgagattcccagatcaacctgggtctctctctgccccagcccagcctggctgatgctgcccttctgtccccagtgacccgt

SEQ ID NO: 316745 - DNA, 564 bp, Artificial Sequence
  derived and/or modified sequence
atggccaccgccagccccagcgtgttcctgctgatggtgaacggccaggtggagagcgcccagttccccgagtacgacgacctgtactgcaagtactgcttcgtgtacggccaggactgggcccccaccgccggcctggaggagggcatcagccagatcaccagcaagagccaggacgtgagacaggccctggtgtggaacttccccatcgacgtgaccttcaagagcaccaacccctacggctggccccagatcgtgctgagcgtgtacggccccgacgtgttcggcaacgacgtggtgagaggctacggcgccgtgcacgtgcccttcagccccggcagacacaagagaaccatccccatgttcgtgcccgagagcaccagcaagctgcagaagttcaccagctggttcatgggcagaagacccgagtacaccgaccccaaggtggtggcccagggcgagggcagagaggacgagaacgccgaggccgagatccccagaagcacctgggtgagcctgtgccccagccccgcctggctgatgctgcccttctgcccccagtag

SEQ ID NO: 316746 - DNA, 928 bp, Artificial Sequence
  derived and/or modified sequence
aacctcatccggccaatcacagctagtcccgtgagctcggggaactgcccggcctgagatgcccaggtctgggactgttaccttggctactggctcccgaagtccccttccgcccagggaattgtgtccgccatttgcttggtcccaggagctctgggaatgtgtcatccccggtagagggtgcccgtcacggccaaccacagagatcccggtcctccgggattctagagcgtccggccgaaccctccactgacttccggtggctgagcctctccgcagcttccggccaagttggactgcagctcgcggtttcctggcttctagtttccagagtatgatgacctctactgcaagtactgctttgtgtacggccaggactgggcccccacagcgggtctggaggaggggatctcacagatcacatccaagagccaagatgtgcggcaagcactggtgtggaacttccccattgatgtcacctttaaaagcaccaacccctacggctggccacagatcgtgctcagcgtgtatggaccagatgtgttcgggaacgatgtggttcgaggctatggggccgtgcacgtgcccttctcacctggccggcacaaaaggaccatccccatgtttgtcccagaatctacgtctaaactgcagaagtttacaagctggttcatggggcggcggcccgagtacacagaccccaaggtggtggctcagggtgaaggccgggaagccaccttcagggctgtctgtcaaagatagcagtgtttcaagatgaaagcggcttgagtccctgagtcactgacttctgtgagaaacttccgcgggaagccgctgagacctggagatgtgttactgcagcgtaaccaagagcatcccacacacccttctttctctcctgtcccctgcactgaacgggcaccccctg

SEQ ID NO: 316747 - DNA, 1092 bp, Artificial Sequence
  derived and/or modified sequence
atgaagcctcttaaggccaccgccaccacaagccaaccagttctgacgatacaacagatagagacaatcttctacaagatccaagacatctacgagatccataaagagttttatgataacctgtgcccaaaggtccagcaatgggatagccaagttactatggggcacctcttccagaaactggccagccagctgggcgtatacaaggcctttgtcgacaactacaaggtcgccctcgagacggccgaaaagtgcagtcagtctaacaatcagtttcagaaaatctccgaggagcttaaggttaaaggcccaaaagactcaaaggatagccatacttctgtgactatggaggcccttctgtacaagcccatcgacagagttacgagatctacactggtcctccatgatctgctgaaacacacacctgtggatcacccagattacccactacttcaggatgcactgaggatctcccaaaattttctcagctccatcaacgaggatatcgatccacgcaggacagccgtgacaacgcccaagggcgagacccgccagcttgtaaaggacgggttcctggttgaggtcagcgaaagtagccgaaaactgagacatgtgtttcttttcactgacgtgctgctttgcgcaaaactcaagaagacctccgccgggaagcaccaacaatacgactgcaagtggtatattccccttgctgacttggtgttcccaagcccagaggagagcgaagctagtccacaagttcatccattcccagaccacgaactggaagatatgaagatgaagatcagcgccctgaagtccgagattcagaaagaagaagtggagaaacgcgggatagaggaggtgggaatttaccgcatctccggtgtggccacagacatccaagccttgaaggccgtgttcgacgcaaataataaagatattttgctgatgctctcagacatggatatcaacgccatcgctggcaccctgaaactttactttcgcgaattacccgagcctttgttaacggatcgacttagtccatgcccaacaccaactagttcaccaagctcatcttgctggaacacttag

SEQ ID NO: 316748 - DNA, 1092 bp, Artificial Sequence
  derived and/or modified sequence
atgaagcccctgaaggccacagccaccaccagccagcctgtgctgaccatccagcagatcgagaccatcttctacaagatccaggacatctatgagatccacaaggagttctatgacaacctgtgccccaaggtgcagcagtgggacagccaggtgaccatgggccacctgttccagaagctggccagccagctgggcgtgtacaaggcctttgtggacaactacaaggtggccctggagacagctgagaagtgcagccagagcaacaaccagttccagaagatcagcgaggagctgaaggtgaagggccccaaggacagcaaggacagccacacctctgtgaccatggaggccctgctgtacaagcccatcgacagagtgaccaggagcaccctggtgctgcatgacctgctgaagcacacccctgtggaccacccagactaccccctgctgcaggatgccctgcgcatcagccagaacttcctgagcagcatcaatgaagatattgaccccaggagaacagctgtgaccacccccaagggggagacccggcagctggtgaaggatggcttcctggtggaggtgtctgagagcagcaggaagctgcggcacgtgttcctgttcacagatgtgctgctgtgtgccaagctgaagaagaccagcgctgggaagcaccagcagtatgactgcaagtggtacatccccctggccgacctggtgttccccagccctgaggagagcgaggccagcccccaggtgcaccccttcccagaccacgagctggaggacatgaagatgaagatcagcgccctgaagtctgagatccagaaggaggaggtggagaagaggggcatcgaggaggtgggcatctaccgcatcagcggcgtggccacagacatccaggccctgaaggctgtgtttgatgccaacaacaaggacatcctgctgatgctgagtgacatggacatcaatgccatcgccggcaccctgaagctgtacttccgggagctgcctgagcccctgctgacagaccggctgagcccctgccccacccccaccagcagccccagcagcagctgctggaacacctag

SEQ ID NO: 316749 - DNA, 1092 bp, Artificial Sequence
  derived and/or modified sequence
atgaagcccctgaaggccaccgccaccaccagccagcccgtgctgacaatacagcaaatagaaaccatcttttacaagatccaggatatctacgaaatacacaaggagttctacgacaacttgtgtccaaaggtacagcagtgggattctcaagttaccatggggcatctttttcagaaacttgcctcccaacttggcgtgtataaggcatttgtcgataactacaaagtcgcactggaaaccgcggaaaagtgctcacagtccaataatcagttccaaaagatcagtgaagaactcaaggtgaagggacccaaggacagcaaagactctcacacaagtgtaacgatggaagcccttctgtataagccaatcgaccgagtcactaggtccaccctggtgctgcatgatctcctgaaacacaccccagttgaccaccccgactacccgttactccaggatgcacttcgcatctcgcagaactttctctcttcaattaatgaagatattgaccccagaagaaccgcagttaccacccctaaaggggagacacgacaacttgtcaaggatggctttctggtggaagtatccgaatcctctcggaagctccggcacgtttttctgttcacagatgtgctgctgtgcgccaagttgaagaaaacaagtgctggtaagcatcagcagtacgactgcaagtggtatatcccactcgctgatctagtatttccgtcaccggaggagtctgaggcctccccccaggtccaccctttccccgatcacgagttagaggacatgaaaatgaaaatttccgcactgaagagcgaaattcagaaagaggaggtggaaaaacgcggcatcgaggaagtggggatttaccggatctctggtgtcgctaccgatatccaggctttgaaggccgtttttgatgcgaacaataaggatattttactgatgctgagcgacatggacatcaacgccattgcgggtacgttgaagttatacttccgcgagctgccagagccgcttttaacagatcggctgagtccttgcccaacacccacatctagcccctccagctcttgctggaatacctag

SEQ ID NO: 316750 - DNA, 1092 bp, Artificial Sequence
  derived and/or modified sequence
atgaaaccccttaaggccaccgctacaacatcccagcccgtgttgactatccagcaaatcgagacaattttttacaaaatacaggacatttacgagatccacaaggagttctacgacaacctatgccccaaggtgcaacagtgggacagtcaagtcactatgggccatctgttccagaagctggctagccaactcggagtttacaaggccttcgtagataactataaagtggcccttgaaacagctgaaaaatgttctcaatcaaacaaccagttccaaaaaatctccgaagagcttaaagtgaagggacctaaagatagtaaggactcccacacatctgtcaccatggaggctctgctgtacaaacccatcgatagagtgacccgctccactctcgtgctgcacgacttattgaagcacacccctgtggatcatccggactatccgctactccaggacgctctgcgaatttctcaaaattttctgagtagcatcaacgaagatatcgacccaagacgaactgcagtcaccacccccaagggagaaactcgtcagctcgtgaaagacgggtttctggtcgaggttagtgagtcttccaggaaattgagacatgtgtttctatttacggacgtgttactttgcgcgaaactcaagaaaacgagtgcgggaaaacaccagcagtacgattgcaaatggtacatcccactagccgatctggtgtttccgtcccccgaggaaagcgaagcgtccccccaggtgcacccctttcccgatcatgagctcgaggacatgaagatgaagatctcagctctcaagtctgaaatacagaaggaggaggtagaaaagcggggaatcgaagaggtggggatctacaggattagcggggtcgcaacagacattcaggctctcaaagcagtgtttgatgccaacaataaggacatcctcctgatgttgtcagacatggacattaatgccatcgccggaacgctaaagctgtacttcagggaactgccagaacccctgctgacagataggttgtccccatgccccaccccaacttcatctccatccagctcttgttggaacacctag

SEQ ID NO: 316751 - DNA, 1092 bp, Artificial Sequence
  derived and/or modified sequence
atgaagcccctgaaggccaccgccaccaccagccagcccgtgctgaccatccagcagatcgagaccatcttctacaagatccaggacatctacgagatccacaaggagttctacgacaacctgtgccccaaggtgcagcagtgggacagccaggtgaccatgggccacctgttccagaagctggccagccagctgggcgtgtacaaggccttcgtggacaactacaaggtggccctggagaccgccgagaagtgcagccagagcaacaaccagttccagaagatcagcgaggagctgaaggtgaagggccccaaggacagcaaggacagccacaccagcgtgaccatggaggccctgctgtacaagcccatcgacagagtgaccagaagcaccctggtgctgcacgacctgctgaagcacacccccgtggaccaccccgactaccccctgctgcaggacgccctgagaatcagccagaacttcctgagcagcatcaacgaggacatcgaccccagaagaaccgccgtgaccacccccaagggcgagaccagacagctggtgaaggacggcttcctggtggaggtgagcgagagcagcagaaagctgagacacgtgttcctgttcaccgacgtgctgctgtgcgccaagctgaagaagaccagcgccggcaagcaccagcagtacgactgcaagtggtacatccccctggccgacctggtgttccccagccccgaggagagcgaggccagcccccaggtgcaccccttccccgaccacgagctggaggacatgaagatgaagatcagcgccctgaagagcgagatccagaaggaggaggtggagaagagaggcatcgaggaggtgggcatctacagaatcagcggcgtggccaccgacatccaggccctgaaggccgtgttcgacgccaacaacaaggacatcctgctgatgctgagcgacatggacatcaacgccatcgccggcaccctgaagctgtacttcagagagctgcccgagcccctgctgaccgacagactgagcccctgccccacccccaccagcagccccagcagcagctgctggaacacctag

SEQ ID NO: 316752 - protein, 184 aa, Artificial Sequence
  derived and/or modified sequence
MWRLALGGVFLAAAQACVFCRLPAHDLSGRLARLCSQMEARQKECGASPDFSAFALDEVSMNKVTEKTHRVLRVMEIKEAVSSLPSYWSWLRKTKLPEYTREALCPPACPLPLLSPAGGSTTLYNCSTCKGTEVSCWPRKRCFPGSQDLWEAKILLLSIFGAFLLLGVLSLLVESHHLQAKSGL

SEQ ID NO: 316753 - DNA, 555 bp, Artificial Sequence
  derived and/or modified sequence
atgtggagactggccctgggcggcgtgttcctggccgccgcccaggcctgcgtgttctgcagactgcccgcccacgacctgagcggcagactggccagactgtgcagccagatggaggccagacagaaggagtgcggcgccagccccgacttcagcgccttcgccctggacgaggtgagcatgaacaaggtgaccgagaagacccacagagtgctgagagtgatggagatcaaggaggccgtgagcagcctgcccagctactggagctggctgagaaagaccaagctgcccgagtacaccagagaggccctgtgcccccccgcctgccccctgcccctgctgagccccgccggcggcagcaccaccctgtacaactgcagcacctgcaagggcaccgaggtgagctgctggcccagaaagagatgcttccccggcagccaggacctgtgggaggccaagatcctgctgctgagcatcttcggcgccttcctgctgctgggcgtgctgagcctgctggtggagagccaccacctgcaggccaagagcggcctgtag

SEQ ID NO: 316754 - DNA, 555 bp, Artificial Sequence
  derived and/or modified sequence
atgtggaggctggctctgggtggagtgttcctcgccgccgcacaagcatgtgtcttctgtcgccttcctgcccatgacctctccggacgtttggctagactctgctcccagatggaggcccgacaaaaggaatgcggtgccagccctgacttttcagcattcgctctagacgaagtgagcatgaataaagtgacggaaaagacacatcgagttctgcgcgtcatggagattaaggaggccgtcagctcactgccctcttactggtcctggctccgtaagacaaagctccccgagtacacacgcgaggctctgtgccctcctgcctgcccgttgccactactttcacccgcgggtggaagcactacgctgtacaattgctcaacatgtaaaggcactgaggtaagctgctggccacggaagaggtgttttccaggctcccaggatttgtgggaagccaagatactgctactgtctatctttggcgcttttctcctattgggtgtgctgtctctcctggtggagagccaccatctccaggctaagtccgggctgtag

SEQ ID NO: 316755 - DNA, 555 bp, Artificial Sequence
  derived and/or modified sequence
atgtggaggctggccctgggcggcgtcttcctggccgccgcccaggcctgtgtgttctgccgcctgcctgcccatgacctgagcggccgcctggcccggctgtgcagccagatggaggcccggcagaaggaatgtggggccagcccagacttcagcgcctttgccctggatgaggtgtccatgaacaaggtgacagagaagacccaccgggtgctgcgggtgatggagatcaaggaggccgtgagcagcctgcccagctactggagctggctgaggaagaccaagctgcctgagtacacccgggaggccctgtgccccccagcctgccccctgcccctgctgagccctgctgggggcagcaccaccctgtacaactgcagcacctgcaagggcacagaggtgtcctgctggcccaggaagcgctgcttccctggcagccaggacctgtgggaggccaagatcctgctgctgagcatctttggagccttcctgctgctgggcgtgctgagcctgctggtggagagccaccacctgcaggccaagagcggcctgtag

SEQ ID NO: 316756 - DNA, 555 bp, Artificial Sequence
  derived and/or modified sequence
atgtggcggctggccctgggcggcgtgttcctggccgccgcccaggcgtgcgtgttttgccgcctgccggcgcacgacctgagtggaagactggcaagactgtgttctcagatggaagcccgccagaaagagtgtggcgcttcaccagacttttctgccttcgccctggatgaggtcagcatgaacaaggtgactgagaaaacacaccgcgttctacgcgtgatggaaatcaaagaggcggtctccagtctgcccagttactggtcttggctccggaaaaccaaattgcccgaatacacccgcgaggccctttgccccccagcatgtccccttcccctcctgtcaccggcagggggctccacaactttatacaactgcagcacgtgcaaaggaaccgaagtgagctgctggccaaggaaacgatgtttccccggctcccaggacttgtgggaagctaaaattctactcctgagcattttcggagccttcctcctgcttggagtgctcagcctgctggtggagtcacaccatctccaagccaagagcgggctatag

SEQ ID NO: 316757 - DNA, 555 bp, Artificial Sequence
  derived and/or modified sequence
atgtggagactggcacttgggggagtattcctcgccgcagcacaggcctgcgttttttgcagacttcctgcacatgatctgtccggcagactcgcccgtctgtgttcacagatggaggcgagacagaaggagtgtggcgctagcccggattttagcgcttttgccctggacgaggtgtcgatgaacaaggttaccgaaaagacccaccgagtgctgcgtgtgatggaaataaaagaggccgtgtcctccctgccctcttattggtcttggctccgaaagaccaagctgcctgagtatacacgggaagcattatgccctcctgcctgccctcttccgctgctctctcctgccggaggatccacaactctttacaactgctctacgtgcaaaggtacggaggtgtcatgctggccccgaaagcgatgtttcccaggcagccaagatctttgggaagccaagatcctgctgctgagcatctttggcgcttttctgctgctcggtgttctgagcctcctagtcgaatcacaccatctgcaggcaaaatcggggctgtag

SEQ ID NO: 316758 - DNA, 1169 bp, Artificial Sequence
  derived and/or modified sequence
gcgccgccccatcccccagtggtcctcatgtggaggctggcactaggcggggttttcctggcagccgcccaggcttgtgtcttctgtcgcctcccagcccacgacttgtcaggccgcctggctcggctctgcagccagatggaggccaggcagaaggaatgtggggcctccccagacttctcggcctttgccttagatgaggtgtccatgaacaaagtcacagagaagactcacagagtcctgagggtcatggaaatcaaagaggctgtctcctcactcccttcatattggagttggcttcgaaagaccaagctccctgagtacaccagggaagctctctgtccccccgcctgcccgttgcctctgctgtctcctgcagggggcagcaccacgctgtacaactgctccacctgcaaggggacggaggtgtcctgctggccccgaaagcgctgcttcccaggaagtcaggatctttgggaagccaagattctgctcctctccatcttcggagctttcctgcttctgggtgttctgagcctcctggtggagtcccaccacctccaagcaaaaagtggcttgtgaagacgctgaaaacctcccagcctccagctctaaggggtatgcactcacaacttccacatcccttggaggggaaccagtcagccccttagtcccagctccaaagacagtctccagaccctaaaacccagacatccctgcttctggttggtgagataatgaaaaacaagaaaatccccaaaaacccagatcccccacaatcccagtgtcagatggcctcccgggaacccaggcacccacagctggaaagttcctcccctccagccctcaaccaatcacatggctgtcaacaatgccaggaaaatatctacagaaggaaagaatcccctacgccactcccaccacacccacacccccttctgcctgttccgggaaagcgggggcatctgccccagaagctattccaggccctcctatgactgatggggaatccgggaatgcatgttctggaaaactcaccccactagagtgagatcacatcagtgggttcgcgggcatgccctccctccatcgtgttaacagtttgaaatcctggcctccctcagaggcctccatcctgccaggcctaagtaaaacttgctgttcatggc

SEQ ID NO: 316759 - DNA, 3860 bp, Artificial Sequence
  derived and/or modified sequence
ccgcctcctggcctcctggctgaggggaagctgagtgggccacggcccatgtgtcgcactcgcctcggctcccacacagccgcctctgctccagcaaggatgtggctcttccacactctgctctgcatagccagcctggccctgctggccgctttcaatgtggatgtggcccggccctggctcacgcccaagggaggtgcccctttcgtgctcagctcccttctgcaccaagaccccagcaccaaccagacctggctcctggtcaccagccccagaaccaagaggacaccagggcccctccatcgatgttcccttgtccaggatgaaatcctttgccatcctgtagagcatgtccccatccccaaggggaggcaccggggagtgaccgttgtccggagccaccacggtgttttgatatgcattcaagtgctggtccggcggcctcacagcctcagctcagaactcacaggcacctgtagcctcctgggccctgacctccgtccccaggctcaggccaacttcttcgaccttgaaaatctcctggatccagatgcacgtgtggacactggagactgctacagcaacaaagaaggcggtggagaagacgatgtgaacacagccaggcagcgccgggctctggagaaggaggaggaggaagacaaggaggaggaggaagacgaggaggaggaggaagctggcaccgagattgccatcatcctggatggctcaggaagcattgatcccccagactttcagagagccaaagacttcatctccaacatgatgaggaacttctatgaaaagtgttttgagtgcaactttgccttggtgcagtatggaggagtgatccagactgagtttgaccttcgggacagccaggatgtgatggcctccctcgccagagtccagaacatcactcaagtggggagtgtcaccaagactgcctcagccatgcaacacgtcttagacagcatcttcacctcaagccacggctccaggagaaaggcatccaaggtcatggtggtgctcaccgatggtggcatattcgaggaccccctcaaccttacgacagtcatcaactcccccaaaatgcagggtgttgagcgctttgccattggggtgggagaagaatttaagagtgctaggactgcgagggaactgaacctgatcgcctcagacccggatgagacccatgctttcaaggtgaccaactacatggcgctggatgggctgctgagcaaactgcggtacaacatcatcagcatggaaggcacggttggagacgcccttcactaccagctggcacagattggcttcagtgctcagatcctggatgagcggcaggtgctgctcggcgccgtcggggcctttgactggtccggaggggcgttgctctacgacacacgcagccgccggggccgcttcctgaaccagacagcggcggcggcggcagacgcggaggctgcgcagtacagctacctgggttacgctgtggccgtgctgcacaagacctgcagcctctcctacatcgcgggggctccacggtacaaacatcatggggccgtgtttgagctccagaaggagggcagagaggccagcttcctgccagtgctggagggagagcagatggggtcctattttggctctgagctgtgccctgtggacattgacatggatggaagcacggacttcttgctggtggctgctccattttaccacgttcatggagaagaaggcagagtctacgtgtaccgtctcagcgagcaggatggttctttctccttggcacgcatactgagtgggcaccccgggttcaccaatgcccgctttggctttgccatggcggctatgggggatctcagtcaggataagctcacagatgtggccatcggggcccccctggaaggttttggggcagatgatggtgccagcttcggcagtgtgtatatctacaatggacactgggacggcctctccgccagcccctcgcagcggatcagagcctccacggtggccccaggactccagtacttcggcatgtccatggctggtggctttgatattagtggcgacggccttgccgacatcaccgtgggcactctgggccaggcggttgtgttccgctcccggcctgtggttcgcctgaaggtctccatggccttcacccccagcgcactgcccatcggcttcaacggcgtcgtgaatgtccgtttatgttttgaaatcagctctgtaaccacagcctctgagtcaggcctccgcgaggcacttctcaacttcacgctggatgtggatgtggggaagcagaggagacggctgcagtgttcagacgtaagaagctgtctgggctgcctgagggagtggagcagcggatcccagctttgtgaggacctcctgctcatgcccacagagggagagctctgtgaggaggactgcttctccaatgccagtgtcaaagtcagctaccagctccagacccctgagggacagacggaccatccccagcccatcctggaccgctacactgagccctttgccatcttccagctgccctatgagaaggcctgcaagaataagctgttttgtgtcgcagaattacagttggccaccaccgtctctcagcaggagttggtggtgggtctcacaaaggagctgaccctgaacattaacctaactaactccggggaagattcctacatgacaagcatggccttgaattaccccagaaacctgcagttgaagaggatgcaaaagcctccctctccaaacattcagtgtgatgaccctcagccggttgcttctgtcctgatcatgaactgcaggattggtcaccccgtcctcaagaggtcatctgctcatgtttcagtcgtttggcagctagaggagaatgcctttccaaacaggacagcagacatcactgtgactgtcaccaattccaatgaaagacggtctttggccaacgagacccacacccttcaattcaggcatggcttcgttgcagttctgtccaaaccatccataatgtacgtgaacacaggccaggggctttctcaccacaaagaattcctcttccatgtacatggggagaacctctttggagcagaataccagttgcaaatttgcgtcccaaccaaattacgaggtctccaggttgtagcagtgaagaagctgacgaggactcaggcctccacggtgtgcacctggagtcaggagcgcgcttgtgcgtacagttcggttcagcatgtggaagaatggcattcagtgagctgtgtcatcgcttcagataaagaaaatgtcaccgtggctgcagagatctcctgggatcactctgaggagttactaaaagatgtaactgaactgcagatccttggtgaaatatctttcaacaaatctctatatgagggactgaatgcagagaaccacagaactaagatcactgtcgtcttcctgaaagatgagaagtaccattctttgcctatcatcattaaaggcagcgttggtggacttctggtgttgatcgtgattctggtcatcctgttcaagtgtggcttttttaaaagaaaatatcaacaactgaacttggagagcatcaggaaggcccagctgaaatcagagaatctgctcgaagaagagaattaggacctgctatccactgggagaggctatcagccagtcctgggacttggagacccagcatcctttgcattactttttccttcaggatgatctagagcagcatggagctgttggtagaatattagtttttaaccatacattgtcccaaaagtgtctgtgcattgtgcaaaaagtaaacttaggaaacatttggtattaaataaatttacacttttctttgcagt

SEQ ID NO: 316760 - DNA, 162 bp, Artificial Sequence
  derived and/or modified sequence
atggaggcagcgggaggctttcaagtgcattttcacccaagcaatggcgatggtcgatttattgaaacgagcagcgctgccgatctcgaagtcatttcctattcctccaaggtctcagtcactgagaggtgctttattaaagtgtgcacagtgctgttctag

SEQ ID NO: 316761 - protein, 410 aa, Artificial Sequence
  derived and/or modified sequence
AANRAGGGRAHHGGETRDQLTVYLGKRDFVDHLDKVDPVDGVVLVDPDYLKDRKVFVTLTCAFRYGREDLDVLGLSFRKDLFIATYQAFPPVPNPPRPPTRLQDRLLRKLGQHAHPFFFTIPQNLPCSVTLQPGPEDTGKACGVDFEIRAFCAKSLEEKSHKRNSVRLVIRKVQFAPEKPGPQPSAETTRHFLMSDRSLHLEASLDKELYYHGEPLNVNVHVTNNSTKTVKKIKVSVRQYADICLFSTAQYKCPVAQLEQDDQVSPSSTFCKVYTITPLLSDNREKRGLALDGKLKHEDTNLASSTIVKEGANKEVLGILVSYRVKVKLVVSRGGDVSVELPFVLMHPKPHDHIPLPRPQSAAPETDVPVDTNLIEFDTNYATDDDIVFEDFARLRLKGMKDDDYDDQLC

SEQ ID NO: 316762 - protein, 1940 aa, Artificial Sequence
  derived and/or modified sequence
MSSDTEMEVFGIAAPFLRKSEKERIEAQNQPFDAKTYCFVVDSKEEYAKGKIKSSQDGKVTVETEDNRTLVVKPEDVYAMNPPKFDRIEDMAMLTHLNEPAVLYNLKDRYTSWMIYTYSGLFCVTVNPYKWLPVYNPEVVEGYRGKKRQEAPPHIFSISDNAYQFMLTDRENQSILITGESGAGKTVNTKRVIQYFATIAATGDLAKKKDSKMKGTLEDQIISANPLLEAFGNAKTVRNDNSSRFGKFIRIHFGTTGKLASADIETYLLEKSRVTFQLKAERSYHIFYQILSNKKPELIELLLITTNPYDYPFISQGEILVASIDDAEELLATDSAIDILGFTPEEKSGLYKLTGAVMHYGNMKFKQKQREEQAEPDGTEVADKTAYLMGLNSSDLLKALCFPRVKVGNEYVTKGQTVDQVHHAVNALSKSVYEKLFLWMVTRINQQLDTKLPRQHFIGVLDIAGFEIFEYNSLEQLCINFTNEKLQQFFNHHMFVLEQEEYKKEGIEWTFIDFGMDLAACIELIEKPMGIFSILEEECMFPKATDTSFKNKLYDQHLGKSNNFQKPKVVKGRAEAHFSLIHYAGTVDYSVSGWLEKNKDPLNETVVGLYQKSSNRLLAHLYATFATADADSGKKKVAKKKGSSFQTVSALFRENLNKLMSNLRTTHPHFVRCIIPNETKTPGAMEHSLVLHQLRCNGVLEGIRICRKGFPNRILYGDFKQRYRVLNASAIPEGQFIDSKKACEKLLASIDIDHTQYKFGHTKVFFKAGLLGTLEEMRDDRLAKLITRTQAVCRGFLMRVEFQKMVQRRESIFCIQYNIRSFMNVKHWPWMKLFFKIKPLLKSAETEKEMATMKEEFQKTKDELAKSEAKRKELEEKLVTLVQEKNDLQLQVQAESENLLDAEERCDQLIKAKFQLEAKIKEVTERAEDEEEINAELTAKKRKLEDECSELKKDIDDLELTLAKVEKEKHATENKVKNLTEELSGLDETIAKLTREKKALQEAHQQALDDLQAEEDKVNSLNKTKSKLEQQVEDLESSLEQEKKLRVDLERNKRKLEGDLKLAQESILDLENDKQQLDERLKKKDFEYCQLQSKVEDEQTLGLQFQKKIKELQARIEELEEEIEAERATRAKTEKQRSDYARELEELSERLEEAGGVTSTQIELNKKREAEFLKLRRDLEEATLQHEAMVAALRKKHADSVAELGEQIDNLQRVKQKLEKEKSEFKLEIDDLSSSMESVSKSKANLEKICRTLEDQLSEARGKNEEIQRSLSELTTQKSRLQTEAGELSRQLEEKESIVSQLSRSKQAFTQQTEELKRQLEEENKAKNALAHALQSSRHDCDLLREQYEEEQEGKAELQRALSKANSEVAQWRTKYETDAIQRTEELEEAKKKLAQRLQDSEEQVEAVNAKCASLEKTKQRLQGEVEDLMVDVERANSLAAALDKKQRNFDKVLAEWKTKCEESQAELEASLKESRSLSTELFKLKNAYEEALDQLETVKRENKNLEQEIADLTEQIAENGKTIHELEKSRKQIELEKADIQLALEEAEAALEHEEAKILRIQLELTQVKSEIDRKIAEKDEEIEQLKRNYQRTVETMQSALDAEVRSRNEAIRLKKKMEGDLNEIEIQLSHANRQAAETLKHLRSVQGQLKDTQLHLDDALRGQEDLKEQLAIVERRANLLQAEVEELRATLEQTERARKLAEQELLDSNERVQLLHTQNTSLIHTKKKLETDLMQLQSEVEDASRDARNAEEKAKKAITDAAMMAEELKKEQDTSAHLERMKKNLEQTVKDLQHRLDEAEQLALKGGKKQIQKLETRIRELEFELEGEQKKNTESVKGLRKYERRVKELTYQSEEDRKNVLRLQDLVDKLQVKVKSYKRQAEEADEQANAHLTKFRKAQHELEEAEERADIAESQVNKLRAKTRDFTSSRMVVHESEE

SEQ ID NO: 316763 - DNA, 5823 bp, Artificial Sequence
  derived and/or modified sequence
atgtcttcagacacagaaatggaagtgttcggcatcgcagccccctttttgaggaagtctgagaaagaacgaatcgaggctcagaatcagccattcgacgcgaagacatattgcttcgtggtcgattccaaggaagaatatgccaagggcaaaataaagtcatcacaggacgggaaggtgacagtggagactgaggacaaccggacactggttgttaagccagaagatgtgtacgcaatgaatcctccaaagttcgatagaatcgaggacatggccatgctgacacatttaaatgaacctgcagttctctacaatctcaaagataggtacactagttggatgatatacacttattctgggcttttctgcgtcaccgtgaatccttataagtggttgccggtgtataaccctgaagtggttgaaggttatcggggaaagaaacgccaggaagcacccccacatatctttagcatttccgataacgcatatcagtttatgttgacggatcgcgaaaatcaaagcattctcataactggcgagtcgggtgccggcaagactgtcaacacaaaaagggtcattcaatatttcgctactattgctgccactggcgacctcgcaaaaaagaaggattcaaaaatgaagggtacgctggaggaccagatcatcagtgctaaccccctcttggaagccttcggtaatgccaaaaccgtgcggaatgataattctagcagattcgggaaatttatccggatccatttcgggactacagggaaattagctagcgctgacatagaaacttacctgctggaaaaatcaagagtgacttttcagcttaaagcggaacgcagctatcacattttttaccagatcctgtccaataaaaagcccgagttgattgagctcctcctaattactaccaatccttacgactacccattcattagccaaggcgagatattggtggcatctatcgacgacgccgaggaactgctggccactgactccgccatcgatatcttggggttcaccccggaagagaagtctgggctttataaattgaccggcgccgtgatgcactatggaaacatgaaatttaagcagaaacaacgggaagagcaggccgaaccagacgggacagaggtcgccgacaaaaccgcttatctcatgggcctaaactcatccgacctgctcaaagcactgtgtttcccacgcgtcaaagttggcaacgagtatgttactaaagggcagacagtcgaccaggtgcatcacgccgtgaacgccctgtccaaaagtgtttacgagaagctgttcctgtggatggttacccgcatcaatcagcagttagataccaaattgccacggcagcatttcatcggtgtacttgatattgcgggctttgagattttcgagtacaattcactggagcagctgtgcataaacttcaccaatgaaaaactccaacaatttttcaaccaccatatgtttgtgttggaacaggaagagtacaagaaggaggggatcgagtggactttcatcgactttggtatggatctcgcggcctgtattgagttgatagagaagcccatgggcattttctcaatacttgaggaagagtgtatgttccccaaggctactgacacctcctttaaaaataagttgtacgatcagcacctggggaaaagtaataatttccagaagcccaaagtcgtaaagggacgtgcggaggcccacttctccctgattcactacgccgggaccgtggattactccgtttccgggtggcttgagaagaacaaggatccactcaacgaaaccgtggtcggcctgtaccaaaagtcttcaaatcggcttctggcccacctctatgcaacttttgctaccgcagatgcggattctggaaagaagaaggtcgcaaaaaagaagggaagctcgttccagaccgtttctgcgctgtttagggaaaatctgaataagctcatgtccaacttacgcaccacgcatccccatttcgtcagatgcattatccctaatgaaacaaagactcctggagcaatggagcatagccttgtgctgcaccagctgcggtgtaacggtgtgctggagggcatcagaatatgtcgtaaaggtttccccaatagaatactgtatggcgacttcaagcagcggtaccgggtactaaacgcctctgccatcccagagggccaatttatcgacagtaaaaaggcttgtgagaaacttctcgctagtatcgacatcgatcacacacaatacaagttcgggcacaccaaggtgtttttcaaggctggccttcttggaactttagaagagatgagggatgaccggttagcgaagttaatcacaaggactcaagccgtctgtcggggattcttaatgagggtcgaatttcaaaaaatggttcaaagacgcgagagtatcttttgtattcagtataatattcgcagttttatgaacgttaagcattggccttggatgaaactgttcttcaaaattaagccactcctgaaatcagctgaaaccgaaaaagaaatggcgaccatgaaagaagagttccaaaagaccaaagatgagctggcgaaatcagaggctaagcgaaaggagctagaagaaaaactggtgactctggtgcaggaaaaaaacgacctgcagctccaggtgcaggcagagtctgaaaatttactagacgctgaagagcgctgtgaccagctcattaaagcaaagttccagctggaggcaaagataaaggaggtgactgagagggctgaggacgaagaagagattaatgctgaattgacggctaaaaaacgaaagctggaggatgagtgttctgagctgaagaaggatattgacgaccttgagctcacacttgctaaagtcgaaaaggaaaagcatgctaccgaaaacaaggtgaaaaacttaactgaagagctcagcggcctggacgagactatcgctaaattgactcgagagaagaaggctctccaagaagctcatcaacaggctctcgatgacctgcaggcagaggaagacaaagtgaattccttaaacaaaactaaatctaagcttgaacaacaagtggaggacctagagagctccctggaacaggagaagaagttaagagtggacttggaaagaaataagcgaaaactggagggagatctgaaactggcccaggaaagcattctggacctggagaatgacaagcaacagttagacgagcggctcaaaaaaaaggattttgagtattgtcagctgcagtcaaaggtggaggatgaacaaacgctgggcctgcagttccaaaagaaaattaaagagcttcaggcacgcattgaagagttggaggaggagatcgaagctgaacgggctactagagctaagactgaaaaacagaggagcgactatgccagggagcttgaggagctgagcgagagactcgaagaagctggcggcgttactagcacccagatcgagttgaacaagaagcgcgaggctgagttcctgaagcttaggcgcgaccttgaggaggccactctgcaacatgaggctatggttgccgctctgcgaaagaagcatgccgattcagtcgcggaactgggcgaacaaatcgacaaccttcagcgagtgaaacagaaactggagaaggagaagagtgagtttaaactcgaaattgatgacctctcgtcgtctatggaaagcgtgtctaagagcaaggctaacttagagaagatttgtcgcacactggaggatcaactatccgaagccagagggaagaatgaggaaattcagcgcagcctctcagaactgacaacccagaagagcaggctccagacagaggctggagagttgtcgagacaacttgaggagaaggagagcatcgtctcccagctcagtcgcagcaaacaggcatttacacagcaaaccgaagaattgaagcgccagttagaagaggaaaacaaggccaagaatgccctggcccatgcactgcagagtagccggcacgattgcgacttgttacgagaacagtatgaagaggagcaggaaggaaaagctgagctacagcgggctctctcaaaggccaactctgaggtggcccagtggcgcacaaaatatgaaacagatgcaattcagcgaaccgaagagctggaagaagccaagaagaagttagcccagagactgcaggattctgaggaacaggttgaagccgtcaacgcaaagtgtgcatctctggagaagactaaacagagactgcaaggggaggtggaggacctgatggtggacgtcgaaagggctaattcactggctgctgcccttgacaaaaaacagcgaaactttgataaagtactcgccgagtggaagaccaagtgtgaggagagtcaggccgagttggaagcctcattgaaagaaagtagatccttgagcacagaactgttcaaactgaagaatgcatatgaggaggctctggaccagctggaaacagtgaaaagagagaataaaaacctggagcaggaaatcgccgatctgaccgaacaaatcgcagagaacggcaaaacgatccacgagctggagaaatctcggaaacagatcgagttggaaaaagcagacattcagctggctctggaggaagcggaagcggccctagagcacgaagaagccaagatccttcgcatccagctggagctgactcaggttaagtcagaaatagatcggaagattgccgagaaggatgaagaaattgagcagctcaaacggaactatcagcggacggtggagactatgcagagcgcactggacgcagaagtgaggtcccgaaatgaggcgattcggctgaaaaaaaaaatggagggagatcttaatgagatcgaaatccagttgtcccatgctaacaggcaggcggcagagaccttaaagcacctccgcagcgtgcaagggcaactgaaggacacacagctccacttggacgacgcattacgggggcaggaagacttaaaggaacagttggcgattgtggagagaagagcgaatctcctgcaggcggaggtcgaagagctcagagctaccttggagcaaacagagcgcgcgaggaagctggctgagcaggagctcttagattccaatgagcgcgtccagctgctccacactcagaacacatccctgattcatacgaaaaagaagctggaaactgacttaatgcaactacaatccgaagtcgaagacgcctcccgggatgcccgtaatgctgaagagaaggccaagaaggcaattaccgatgccgctatgatggctgaagaactcaaaaaggagcaagataccagcgcacaccttgaacggatgaagaagaatctcgagcagactgttaaggacctccagcatcgcctggatgaggcagaacagctggccctgaagggggggaaaaaacagattcaaaaacttgaaacacggattcgggagttggaatttgaattagagggagagcagaagaaaaacaccgagtcagtgaaaggacttcgcaagtacgaaaggagggtgaaggagcttacctaccagtcagaagaggatagaaaaaatgtgctccggctgcaggatcttgtggataagctccaggtgaaagttaagtcatataagcgccaagctgaagaagcagacgagcaagccaacgcccatctgactaaattcaggaaggctcagcacgagctcgaggaggccgaggagagagccgatatcgccgagtcccaggtcaacaagctgagagcaaagacacgcgattttactagctcccgcatggtggtgcacgagtctgaggaatag

SEQ ID NO: 316764 - DNA, 5823 bp, Artificial Sequence
  derived and/or modified sequence
atgagtagcgacactgaaatggaggtgttcggcatagccgccccattcctcagaaagtcggagaaagaacgtatcgaagcccaaaatcagcccttcgacgctaaaacttattgtttcgtagtggattcgaaggaggagtacgcgaaaggaaagatcaagtctagccaagacggcaaggtaactgttgaaacggaagacaacaggactctggttgtgaagcccgaagatgtttacgccatgaatcccccaaagtttgaccgaattgaggacatggcaatgcttacccacctgaatgagccagccgtgctttataacctgaaagaccgctatactagctggatgatctacacgtactccggacttttctgtgtgacagttaatccctataagtggctgcctgtctacaatccggaggttgtcgaagggtatagaggaaagaaacggcaggaggcccctccccatattttcagtatttcggataacgcctaccagtttatgctgacggaccgtgagaaccagtccattctgattaccggcgagagtggggcggggaaaaccgtaaacaccaagcgagtcatacagtactttgccaccattgccgctaccggtgaccttgcaaaaaagaaggatagcaaaatgaagggaaccctcgaggatcagattatctccgctaaccctctgctcgaggcgttcggcaatgccaaaacagtgcgcaatgacaactcctcccggtttgggaagtttatccgcatccacttcggtaccacaggaaagcttgcatctgccgacattgaaacctatcttcttgagaaatcgagagtgacctttcagctgaaggcagaacgatcctatcacatattctaccagattttgtctaataagaaacctgaacttatcgagctgctcctgatcaccaccaatccttacgattatccattcatttctcaaggcgaaatcctggtcgcgtcaattgatgacgccgaggaactactggcgactgatagtgccattgacatcctggggttcactcccgaagagaaatccgggctctataaattaactggagctgtcatgcactacggaaatatgaagtttaagcagaagcagagggaggagcaggcggaacctgacggcaccgaggtggcagacaaaacggcttacttaatgggattgaattcttccgatctgctgaaggcattatgttttccacgcgtcaaggttggtaacgagtatgtcactaagggccagacagtagatcaggtgcatcatgctgtgaacgccctgtcaaaatccgtctacgaaaagctctttttgtggatggtgacccgcattaatcaacagctggatacaaagctccctcggcagcattttatcggggtgctggacattgccgggttcgaaatttttgagtacaattctctcgaacaattatgcatcaatttcactaatgaaaaacttcaacaattttttaaccaccacatgttcgtactcgaacaggaagagtataaaaaagaggggatcgagtggacttttattgactttggcatggacttggccgcttgtattgaacttattgaaaaaccaatgggaatattctcgattttggaggaggagtgcatgtttccaaaggccacagatacttcctttaaaaacaagctctatgatcagcatttgggaaaatcaaacaacttccagaaaccaaaggtcgtgaaagggcgggcagaagctcacttttcactaattcactatgctgggactgtcgattactccgtatcggggtggctggaaaagaacaaggatccgctgaatgaaacagttgtcggattgtatcaaaaaagttcaaaccgcttgctggcccacctttatgcaacatttgcaactgcagacgcagattccggcaagaaaaaggtggccaagaaaaagggctcctcgtttcaaactgttagcgccctatttcgggagaatctcaacaagctgatgagcaatctgaggaccacccatcctcactttgtgcgatgcattattccaaatgagaccaaaaccccgggcgctatggagcatagtttggtgttacaccaactcagatgtaacggcgtcttggagggcatcagaatttgcaggaaaggtttccccaataggatcttatacggcgactttaagcagcgctatcgggttcttaatgcttccgccattccagaaggtcagttcatagactctaagaaagcttgcgaaaagctgctggcctcaatcgacatcgatcacactcaatataaattcgggcacaccaaagtatttttcaaagctgggctgctgggtaccctggaagagatgagagatgaccgccttgccaagctgatcaccagaacccaggccgtgtgcaggggattcctcatgcgcgtggagttccagaagatggtccagcggcgcgagtctattttctgtattcagtacaatatcagaagtttcatgaatgtcaaacattggccttggatgaaactattttttaagattaagccacttttgaagtccgcggaaaccgaaaaggagatggcgacaatgaaagaagagtttcaaaaaactaaagacgaattggcaaagagcgaagccaaacgaaaggaactggaagagaaactggtgactctggtgcaggaaaagaatgatctgcagcttcaggtccaggccgagtctgagaatctgctagatgccgaggaacggtgcgaccagcttattaaggctaaattccagctggaggcaaagataaaggaggttactgaaagggctgaggatgaggaggagatcaatgcagagctcacggctaagaaaagaaagctggaagatgaatgcagcgaacttaagaaggatattgacgatttggagctgacattagcaaaagtggagaaagaaaagcacgcaacagagaacaaagtaaaaaatcttacagaggaactgagcggactggacgagaccatcgctaagcttacccgggagaagaaggctctccaggaagcccaccagcaggctctggacgatctgcaggccgaagaggacaaggtgaacagcctgaataaaacgaagtcgaagctggagcagcaggtggaggatcttgaatcttccctggaacaggaaaaaaagctccgggttgatttagagcgcaataaaaggaaactggagggcgatcttaaacttgcccaggagtctattctagacctggagaatgacaaacaacagttggacgagcgcttgaaaaagaaagacttcgagtactgccagctgcaatcaaaagtcgaagatgagcagacccttggcctacagttccagaaaaaaataaaggagttgcaggcacgcatcgaggagttggaggaggagatcgaggctgagcgcgctacacgcgccaaaaccgagaaacaacgatctgattacgccagagagctggaggaactgtccgaaagactggaagaagccggaggcgtgacatctacgcagatcgagctgaataagaaacgggaagccgagttcctgaagttgagacgggatcttgaggaagcaaccctccagcatgaggcaatggtggccgcgctgagaaagaagcacgccgatagtgtggctgagctgggcgaacagatcgacaatctgcagcgagtgaaacagaaactcgaaaaggaaaagtccgaattcaagctagaaatcgatgatctgtcctccagcatggagagtgtgtccaagtcaaaagctaacctcgagaagatctgccgaactctagaagaccaactgagtgaagcacggggcaagaacgaggagatacaacgcagtctgtcagagctaacaacccagaaaagtcgcttgcaaacggaggccggggaactgagtcggcaactggaagaaaaggaatcgatcgtgagccagctttccaggtcaaaacaagcattcactcaacagacagaagagctgaagaggcagcttgaggaggagaataaagctaaaaacgccctggcccatgcactgcaaagctccagacacgactgtgatctgctcagggagcagtatgaggaggaacaagaaggaaaggcggagctccagcgggccttatcaaaagcgaacagtgaagttgcccagtggcggactaagtacgaaaccgacgctatccagcgtaccgaggagttggaagaggccaagaagaagttagcacagagactgcaggatagcgaggaacaggtggaagcagtgaacgccaaatgcgccagcctggagaaaactaagcagcgtctacagggagaagtggaggaccttatggtggacgtggagcgcgctaatagccttgctgctgcgctggataagaaacagcgcaattttgacaaagtcttggccgaatggaaaacgaagtgcgaggaatctcaagccgagcttgaggccagcctcaaagaaagcagatctctgtctacagaattattcaaactgaagaacgcatacgaagaagcactggatcaacttgaaacagttaaacgcgagaacaaaaacctcgagcaggaaattgctgacctcacagagcagatcgctgagaatggcaaaaccatccacgagctggagaagtcccgcaagcagattgaactggaaaaagccgacattcagctggccctggaagaggccgaggcagctttggagcatgaagaagccaagatcctgcgtatacagctcgagctaactcaggttaaatcagaaattgatcgcaagatcgctgagaaagacgaggaaatcgagcagctgaaacgtaactatcagcgcactgttgaaaccatgcagtctgctttggatgctgaggtgcgctcacggaacgaggccatcagactgaaaaagaagatggagggcgatttaaacgagattgaaattcagctgagccatgcaaacagacaggccgctgaaactctcaaacatctgagaagcgtgcagggtcagctgaaagacactcagctgcaccttgacgatgccctgcgcggacaggaggacctcaaggagcagctcgccatcgttgagagacgggccaaccttctacaagctgaggtggaggagctgagggccaccctggaacaaactgaaagagcccgaaaactggcggagcaggaactgcttgattccaatgagcgggtgcagctgctgcacacccagaacacaagcctcatccataccaagaagaaattagagacagacctgatgcagctgcagtccgaagtggaggacgcaagcagggacgcccgtaatgccgaggagaaggcaaagaaggctattactgatgccgctatgatggctgaggagctcaaaaaggaacaggatacctcagcgcacctcgaaagaatgaaaaaaaacctggagcagactgttaaggacttgcaacaccgcttagacgaggcagagcaacttgccttaaaagggggcaagaagcagattcaaaagttggagactagaattagggagcttgagtttgagctcgaaggcgagcagaagaaaaatactgagtcagtgaaaggtctgcgcaagtacgaaagacgagtaaaggaactgacttaccagagcgaggaggaccgaaaaaatgtgctcaggttgcaggatctagtagataagctgcaggtcaaggtgaagtcgtacaaacggcaagccgaggaagccgacgagcaggctaacgctcacctgaccaagttcaggaaagcccagcatgagctggaggaggcggaggaaagggccgatatcgccgaaagtcaggtgaacaagctcagggcaaagaccagagacttcacctcctcgaggatggtagtccacgagagcgaagagtag

SEQ ID NO: 316765 - DNA, 5823 bp, Artificial Sequence
  derived and/or modified sequence
atgagcagtgacacagagatggaggtgtttggaattgctgcccccttcctgaggaagtctgagaaggagagaattgaggcccagaaccagccctttgatgccaagacctactgctttgtggtggacagcaaggaggagtatgccaagggcaagatcaagagcagccaggacggcaaggtgacagtggagacagaggacaacagaaccctggtggtgaagccagaagatgtgtatgccatgaacccccccaagtttgacagaattgaggacatggccatgctgacccacctgaatgaacctgctgtgctgtacaacctgaaggaccgctacacctcctggatgatctacacctacagcggcctcttctgtgtgacagtgaacccctacaagtggctgcctgtgtacaaccctgaggtggtggagggctaccggggcaagaagaggcaggaggccccaccccacatcttcagcatcagtgacaatgcctaccagttcatgctgacagaccgggagaaccagagcatcctgatcaccggggagagcggggccggcaagacagtgaacaccaagagggtcatccagtactttgccaccatcgccgccaccggggacctggccaagaagaaggacagcaagatgaagggcaccctggaggaccagatcatcagcgccaaccccctgctggaggcctttggaaatgccaagacagtgagaaatgacaacagcagcagatttgggaagttcatccgcatccacttcggcaccaccgggaagctggccagcgctgacatcgagacctacctgctggagaagagccgggtgaccttccagctgaaggccgagaggagctaccacatcttctaccagatcctgagcaacaagaagccagagctgattgagctgctgctgatcaccaccaacccctatgactaccccttcatcagccagggcgagatcctggtggccagcattgatgatgctgaggagctgctggccacagattctgccatcgacatcctgggcttcaccccagaggagaagagcggcctgtacaagctgaccggggctgtgatgcactacggcaacatgaagttcaagcagaagcagcgggaggagcaggccgagccagatggaacagaggtggccgacaagacagcctacctgatgggcctgaacagcagtgacctgctgaaggccctgtgcttcccccgggtgaaggtgggcaatgaatatgtgaccaagggccagacagtggaccaggtgcaccacgctgtgaatgccctgagcaagtctgtgtatgagaagctgttcctgtggatggtgacccgcatcaaccagcagctggacaccaagctgccccggcagcacttcatcggcgtgctggacattgctggctttgagatctttgagtacaacagcctggagcagctgtgcatcaacttcaccaatgagaagctgcagcagttcttcaaccaccacatgtttgtgctggagcaggaggagtacaagaaggagggcatcgagtggaccttcatcgactttggcatggacctggccgcctgcatcgagctgattgagaagcccatgggcatcttcagcatcctggaggaggagtgcatgttccccaaggccacagacaccagcttcaagaacaagctgtatgaccagcacctgggcaagagcaacaacttccagaagcccaaggtggtgaagggccgggcagaggcccacttcagcctcatccactacgccggcaccgtggactacagcgtgtctggctggctggagaagaacaaggaccccctgaatgaaacagtggtgggcctgtaccagaagagcagcaaccggctgctggcccacctgtatgccacctttgccacagcagatgctgacagcggcaagaagaaggtggccaagaagaagggcagcagcttccagacagtgtctgccctcttccgggagaacctgaacaagctgatgagcaacctgcggaccacccacccccactttgtgcgctgcatcatccccaatgagaccaagacccctggggccatggagcacagcctggtgctgcaccagctgcgctgcaatggagtgctggagggcatccgcatctgcaggaagggcttccccaaccgcatcctgtatggagacttcaagcagcgctacagagtgctgaatgccagcgccatccctgagggccagttcatcgacagcaagaaggcctgtgagaagctgctggccagcattgacatcgaccacacccagtacaagtttggccacaccaaggtgttcttcaaggccggcctgctgggcaccctggaggagatgagagatgaccggctggccaagctgatcaccaggacccaggccgtgtgccggggcttcctgatgagggtggagttccagaagatggtgcagaggcgggagagcatcttctgcatccagtacaacatccgctccttcatgaatgtgaagcactggccctggatgaagctgttcttcaagatcaagcccctgctgaagtctgctgagacagagaaggagatggccaccatgaaggaggagttccagaagaccaaggatgagctggccaagtctgaggccaagaggaaggagctggaggagaagctggtgaccctggtgcaggagaagaatgacctgcagctgcaggtgcaggccgagagcgagaacctgctggatgctgaggagcgctgtgaccagctgatcaaggccaagttccagctggaggccaagatcaaggaggtgacagaaagagcagaagatgaggaggagatcaatgctgagctgacagccaagaagaggaagctggaggatgaatgttctgagctgaagaaggacattgatgacctggagctgaccctggccaaggtggagaaggagaagcacgccacagagaacaaggtgaagaacctgacagaggagctgagcggcctggatgagaccatcgccaagctgacccgggagaagaaggccctgcaggaggcccaccagcaggccctggatgacctgcaggccgaggaggacaaggtgaacagcctgaacaagaccaagagcaagctggagcagcaggtggaggacctggagagcagcctggagcaggagaagaagctgcgggtggacctggagaggaacaagaggaagctggagggggacctgaagctggcccaggagagcatcctggacctggagaatgacaagcagcagctggatgagcggctgaagaagaaggactttgagtactgccagctgcagagcaaggtggaggatgagcagaccctgggcctgcagttccagaagaagatcaaggagctgcaggcccgcatcgaggagctggaggaggagattgaagctgagcgggccacccgggccaagacagagaagcagaggagtgactatgcccgggagctggaggagctgtctgagcggctggaggaggccggcggcgtgaccagcacccagatcgagctgaacaagaagcgggaggccgagttcctgaagctgcggcgggacctggaggaggccaccctgcagcacgaggccatggtggccgccctgaggaagaagcacgccgacagcgtggccgagctgggggagcagattgacaacctgcagagggtgaagcagaagctggagaaggagaagtctgagttcaagctggagattgatgacctgagcagctccatggagagcgtgtccaagagcaaggccaacctggagaagatctgcaggaccctggaggaccagctgtctgaggcccggggcaagaatgaggagatccagaggagcctgtctgagctgaccacccagaagagccggctgcagacagaagctggggagctgagccggcagctggaggagaaggagagcatcgtgtcccagctgagccgcagcaagcaggccttcacccagcagacagaggagctgaagaggcagctggaggaggagaacaaggccaagaatgccctggcccacgccctgcagagcagcagacatgactgtgacctgctgcgggagcagtatgaggaggagcaggagggcaaggccgagctgcagagggccctgagcaaggccaacagcgaggtggcccagtggaggaccaagtatgaaacagatgccatccagaggacagaggagctggaggaggccaagaagaagctggcccagaggctgcaggacagcgaggagcaggtggaggccgtgaatgccaagtgtgccagcctggagaagaccaagcagaggctgcagggcgaggtggaggacctgatggtggatgtggagcgggccaacagcctggccgccgccctggacaagaagcagaggaactttgacaaggtgctggccgagtggaagaccaagtgtgaggagagccaggccgagctggaggccagcctgaaggagagccgcagcctgagcacagagctgttcaagctgaagaatgcctatgaggaggccctggaccagctggagaccgtgaagcgggagaacaagaacctggagcaggagattgctgacctgacagagcagattgctgaaaatggcaagaccatccacgagctggagaagagcaggaagcagatcgagctggagaaggctgacatccagctggccctggaggaggccgaggccgccctggagcacgaggaggccaagatcctgcgcatccagctggagctgacccaggtgaagtcagaaattgacaggaagattgctgagaaggatgaggagattgagcagctgaagaggaactaccagaggacagtggagaccatgcagagcgccctggatgctgaggtgcgcagcagaaatgaggccatccggctgaagaagaagatggagggggacctgaatgaaattgagatccagctgagccacgccaaccggcaggccgctgagaccctgaagcacctgcggtctgtgcagggccagctgaaggacacccagctgcacctggatgatgccctgcggggccaggaggacctgaaggagcagctggccatcgtggagcggcgggccaacctgctgcaggccgaggtggaggagctgcgggccaccctggagcagacagagcgggccaggaagctggccgagcaggagctgctggacagcaatgaaagagtgcagctgctgcacacccagaacaccagcctcatccacaccaagaagaagctggagacagacctgatgcagctgcagagcgaggtggaggatgccagcagagatgccagaaatgctgaggagaaggccaagaaggccatcacagatgctgccatgatggccgaggagctgaagaaggagcaggacaccagcgcccacctggagaggatgaagaagaacctggagcagacagtgaaggacctgcagcaccggctggatgaagctgagcagctggccctgaagggcggcaagaagcagatccagaagctggagacccgcatccgggagctggagtttgagctggagggggagcagaagaagaacacagaatctgtgaagggcctgaggaaatatgaaagaagagtgaaggagctgacctaccagagcgaggaggacaggaagaatgtgctgcggctgcaggacctggtggacaagctgcaggtgaaggtgaagagctacaagaggcaggccgaggaggctgatgagcaggccaatgcccacctgaccaagttcaggaaggcccagcacgagctggaggaggccgaggagagagctgacattgctgagagccaggtgaacaagctgcgggccaagacccgggacttcaccagcagcaggatggtggtgcatgagagcgaggagtag

SEQ ID NO: 316766 - DNA, 6037 bp, Artificial Sequence
  derived and/or modified sequence
gtggctcgcttgtgggcggaggtctgggatctcctggctgttgctgtcttctgctctcatcctgcaggtgggactctcagctgacaccatgagtagtgacactgaaatggaagtgttcggcatagctgctcctttcctccggaagtcagaaaaggagaggatcgaggctcagaaccagccctttgatgccaagacgtattgcttcgtggtggactcaaaggaagaatatgccaaggggaaaatcaagagttctcaggatgggaaggtcactgtggaaactgaggacaacaggaccctggtggtcaaaccagaggatgtgtacgccatgaacccccccaagttcgacaggatcgaagacatggccatgctgacgcacctgaatgagccagccgtgctgtacaacctgaaggaccgttacacatcttggatgatctatacctactcaggcctcttctgtgtcactgtcaacccctacaagtggctgccggtgtacaaccccgaggtggtggaaggctaccgaggcaaaaagcgccaggaggccccaccccacatcttctccatctctgacaacgcctatcagttcatgctgactgatcgtgaaaaccagtccattctgatcaccggagaatccggggcaggaaagactgtgaacaccaaacgggtcatccagtactttgcaacaattgcagctactggggacctggccaagaagaaggactccaaaatgaaggggactctggaagatcaaatcatcagtgccaatcccctgctggaggcctttgggaacgccaagactgtgaggaatgacaactcctcccgttttggcaagttcatccgaatccattttggaaccactgggaagctggcctctgcagatattgaaacttatcttctggaaaaatcaagagtcactttccagctgaaggctgaaagaagctaccacatcttctaccagattctttctaacaagaagcctgagctcatagagctgctgcttattacgaccaacccttacgactacccgttcattagccagggggagatcctggtggccagcatagatgatgcagaggagctgctggctacagacagcgccattgacatcctgggcttcaccccagaagagaaatctgggctctacaagctgacgggagccgtgatgcactacgggaacatgaagttcaagcagaagcagcgagaggagcaggccgagccggatggcacagaagtggctgacaaaacagcctatctgatgggcctgaactcttcggacctcctaaaagctttgtgctttcctagagtgaaagttgggaatgagtacgttaccaaaggtcaaactgtggatcaggttcaccatgctgtgaatgctctttcaaaatcagtttatgaaaagttgttcttgtggatggtcactcgcattaaccagcaactggatacgaagcttccaagacaacacttcattggtgttttggacattgcaggctttgaaatctttgagtataacagcctggagcagctgtgcatcaacttcaccaatgagaaactgcaacagtttttcaaccaccacatgttcgtgctggagcaggaggagtacaagaaggaaggcatcgagtggacgttcattgacttcgggatggacctggctgcctgcatcgagctcatcgagaagcctatgggcatcttctccatcctggaagaggagtgcatgttccccaaggcaacagacacctccttcaagaacaagctgtatgaccagcatcttggaaagtccaacaacttccagaagcccaaggtggtcaaaggcagggccgaggctcacttctcactgatccactatgcgggcaccgtggactacagtgtctcaggttggctggagaagaacaaggaccctctgaacgagactgtggttgggctgtaccagaagtcttccaacaggctcctggcacacctctatgccacgtttgccacggcggatgctgacagtggaaagaagaaagttgccaagaagaagggttcttccttccaaactgtctctgcccttttcagggaaaacctgaacaagctgatgtcaaatttaagaactactcaccctcattttgtgcgttgtataattcccaatgaaaccaaaactccaggggctatggaacacagccttgttctgcaccagctgcggtgtaacggtgtcctggagggcatccgcatctgcaggaaagggttcccaaacaggattctctatggcgattttaaacaaagataccgagtgctgaatgccagtgcaatccctgagggacaattcattgacagcaagaaagcctgtgaaaagcttctggcatccattgatattgaccacactcagtacaaatttggacataccaaggtgttcttcaaggctggcttgctgggaaccctggaagagatgcgggatgaccgcctggccaaactaatcacccggacacaagctgtgtgcagagggttcctcatgcgtgtggaattccagaagatggtgcagaggagggagtccatcttctgcatccagtacaacattcgctcattcatgaacgtcaagcactggccctggatgaaactcttcttcaagatcaagcccctcctcaagagtgcagagactgagaaagagatggccaccatgaaggaagaattccagaaaaccaaagatgaactcgccaagtcggaggcaaaaaggaaggagctagaggaaaaactggtgactctggtccaagagaagaatgacctgcagctccaagtacaagctgaaagcgaaaatttgttggatgctgaggaaagatgcgatcagctgatcaaagccaaattccagctcgaggccaagatcaaggaggtgacagagagagctgaagatgaggaggagatcaatgctgagctgacggccaagaagaggaaactggaggatgaatgctcagagctcaagaaagacattgatgaccttgagttgaccctggccaaggttgagaaggagaagcatgccacagagaacaaggttaaaaaccttactgaggaactctctgggttagatgaaacaattgcaaagttaaccagagagaagaaggccctccaagaggcgcaccagcaggccttggatgacctccaagctgaagaagacaaagtcaattctttgaacaaaaccaagagcaaactggaacagcaagtggaagacctggaaagctccctagaacaagaaaagaagctccgagtagacctggaaaggaacaaaaggaaattggaaggagacttgaagcttgctcaagagtccatattagatctggagaatgacaagcaacagctggacgaaaggctcaagaagaaagattttgaatattgtcaacttcaaagcaaagtggaagatgagcagacactgggcctccagtttcagaagaaaatcaaagagttgcaggctcgaattgaggagctggaagaggagatagaggcggagagggccacccgcgcgaagacagagaaacagcgcagcgactatgcccgggagctggaggagctgagcgagcggctggaggaggcgggaggcgtcacctccacgcagatagagctcaacaagaagcgggaggcggagttcctgaagctgcgcagggacctggaggaggccacactgcagcacgaagccatggtggccgcgctgaggaagaagcatgcggatagtgtggccgagcttggggagcagattgacaacctgcagcgggtcaagcagaagctggagaaggagaagagcgagttcaagctggagatcgatgacctctccagcagcatggagagtgtgtcgaaatctaaggcaaatctggaaaaaatctgccgaaccctggaggatcagttaagtgaggccaggggcaagaatgaggaaattcagaggagcctgagcgagctgaccacacagaagtctcgtttgcagaccgaggctggtgagctgagtcgtcagctggaagaaaaagaaagcatagtatcccaactttccaggagcaagcaagcctttacccagcaaacagaagagctcaagaggcagctggaggaagagaacaaggccaagaacgccctggcgcacgccctgcagtcctcccgccacgactgtgacctgctgcgggaacagtatgaggaggagcaggaaggcaaagctgagctgcagagggcgctgtccaaggccaatagtgaggttgcccagtggagaaccaaatacgagacggacgccatccagcgcacagaagagctggaggaggccaagaaaaaacttgctcagcgccttcaagattccgaggaacaggttgaggcagtgaatgctaaatgtgcttcactggagaagaccaagcagaggctgcaaggagaggtggaggatctgatggttgatgttgaaagagccaattccttggccgccgctctggacaagaagcagaggaactttgacaaggtgttggcagagtggaagacaaagtgtgaggagagccaagcagagctggaggcatccctgaaggagtcccgctccttgagcactgagctcttcaaactgaaaaatgcctacgaggaagccttagatcaacttgaaactgtgaaacgggaaaataagaacttagagcaggagatagcagatctcacagaacaaattgctgaaaatggcaaaaccatccatgaactggagaaatcaagaaagcagattgagctggaaaaggctgatatccagctggctctcgaggaagcagaggctgctcttgagcatgaagaagccaagatcctccgaatccagcttgaattgacacaagtgaaatcagaaattgatagaaagatcgccgagaaggatgaagagatcgagcagctgaagaggaactaccagagaacagtggaaaccatgcagagcgccctggacgccgaggtgcggagcaggaatgaagccatccggctcaagaagaagatggagggggacctgaatgaaatcgagatccagctgagccacgccaaccgccaggcggcggagaccctcaaacacctcaggagtgtccagggacagctgaaggatacgcagctccacctggatgatgccctccggggccaggaggacctgaaggagcagctggcgattgtggagcgcagagccaacctgctgcaggccgaggtggaggagctgcgggctactctggagcagacggagagggcccggaaactggcggaacaggagctcctggactccaacgagagggtgcagctgctgcatacccagaacaccagcctcatccacaccaagaagaagctggagacagacctcatgcagctccagagtgaggtagaagatgccagcagggatgcaaggaacgctgaggagaaggccaagaaggccatcacggacgctgccatgatggcggaggagctgaagaaggagcaggacaccagcgcccaccttgagcggatgaagaagaacctggaacagacggtgaaggacctgcagcatcgtctagatgaggccgagcagctggcgctgaagggcgggaagaagcagatccagaaactggagaccaggatccgagagctggagtttgaacttgagggagagcagaagaagaacacagagtctgttaagggcctgaggaagtatgagcggagggtcaaggagctgacgtaccagagtgaagaggacaggaagaatgtgctgagattgcaggatctggtggataaactgcaagtgaaagtcaagtcctacaagaggcaggcggaggaggctgatgaacaagccaatgctcatctcaccaaattccgaaaggctcagcatgagctggaggaggccgaggaacgtgcggatatcgcagaatctcaagtcaacaagctccgcgctaagactcgagacttcacctccagcaggatggtggtccacgagagtgaagagtgagccagcccttctggagcaggacagaagatatgcaaaatgtatattttcttgattcctgaccattgatacttaatgtccatgtgactctttttcacatgcaataaactttgctttgtttcaatctgg

SEQ ID NO: 316767 - DNA, 6016 bp, Artificial Sequence
  derived and/or modified sequence
gtctgggatctcctggctgttgctgtcttctgctctcatcctgcaggtgggactctcagctgacaccatgagtagtgacactgaaatggaagtgttcggcatagctgctcctttcctccggaagtcagaaaaggagaggatcgaggctcagaaccagccctttgatgccaagacgtattgcttcgtggtggactcaaaggaagaatatgccaaggggaaaatcaagagttctcaggatgggaaggtcactgtggaaactgaggacaacaggaccctggtggtcaaaccagaggatgtgtacgccatgaacccccccaagttcgacaggatcgaagacatggccatgctgacgcacctgaatgagccagccgtgctgtacaacctgaaggaccgttacacatcttggatgatctatacctactcaggcctcttctgtgtcactgtcaacccctacaagtggctgccggtgtacaaccccgaggtggtggaaggctaccgaggcaaaaagcgccaggaggccccaccccacatcttctccatctctgacaacgcctatcagttcatgctgactgatcgtgaaaaccagtccattctgatcaccggagaatccggggcaggaaagactgtgaacaccaaacgggtcatccagtactttgcaacaattgcagctactggggacctggccaagaagaaggactccaaaatgaaggggactctggaagatcaaatcatcagtgccaatcccctgctggaggcctttgggaacgccaagactgtgaggaatgacaactcctcccgttttggcaagttcatccgaatccattttggaaccactgggaagctggcctctgcagatattgaaacttatcttctggaaaaatcaagagtcactttccagctgaaggctgaaagaagctaccacatcttctaccagattctttctaacaagaagcctgagctcatagagctgctgcttattacgaccaacccttacgactacccgttcattagccagggggagatcctggtggccagcatagatgatgcagaggagctgctggctacagacagcgccattgacatcctgggcttcaccccagaagagaaatctgggctctacaagctgacgggagccgtgatgcactacgggaacatgaagttcaagcagaagcagcgagaggagcaggccgagccggatggcacagaagtggctgacaaaacagcctatctgatgggcctgaactcttcggacctcctaaaagctttgtgctttcctagagtgaaagttgggaatgagtacgttaccaaaggtcaaactgtggatcaggttcaccatgctgtgaatgctctttcaaaatcagtttatgaaaagttgttcttgtggatggtcactcgcattaaccagcaactggatacgaagcttccaagacaacacttcattggtgttttggacattgcaggctttgaaatctttgagtataacagcctggagcagctgtgcatcaacttcaccaatgagaaactgcaacagtttttcaaccaccacatgttcgtgctggagcaggaggagtacaagaaggaaggcatcgagtggacgttcattgacttcgggatggacctggctgcctgcatcgagctcatcgagaagcctatgggcatcttctccatcctggaagaggagtgcatgttccccaaggcaacagacacctccttcaagaacaagctgtatgaccagcatcttggaaagtccaacaacttccagaagcccaaggtggtcaaaggcagggccgaggctcacttctcactgatccactatgcgggcaccgtggactacagtgtctcaggttggctggagaagaacaaggaccctctgaacgagactgtggttgggctgtaccagaagtcttccaacaggctcctggcacacctctatgccacgtttgccacggcggatgctgacagtggaaagaagaaagttgccaagaagaagggttcttccttccaaactgtctctgcccttttcagggaaaacctgaacaagctgatgtcaaatttaagaactactcaccctcattttgtgcgttgtataattcccaatgaaaccaaaactccaggggctatggaacacagccttgttctgcaccagctgcggtgtaacggtgtcctggagggcatccgcatctgcaggaaagggttcccaaacaggattctctatggcgattttaaacaaagataccgagtgctgaatgccagtgcaatccctgagggacaattcattgacagcaagaaagcctgtgaaaagcttctggcatccattgatattgaccacactcagtacaaatttggacataccaaggtgttcttcaaggctggcttgctgggaaccctggaagagatgcgggatgaccgcctggccaaactaatcacccggacacaagctgtgtgcagagggttcctcatgcgtgtggaattccagaagatggtgcagaggagggagtccatcttctgcatccagtacaacattcgctcattcatgaacgtcaagcactggccctggatgaaactcttcttcaagatcaagcccctcctcaagagtgcagagactgagaaagagatggccaccatgaaggaagaattccagaaaaccaaagatgaactcgccaagtcggaggcaaaaaggaaggagctagaggaaaaactggtgactctggtccaagagaagaatgacctgcagctccaagtacaagctgaaagcgaaaatttgttggatgctgaggaaagatgcgatcagctgatcaaagccaaattccagctcgaggccaagatcaaggaggtgacagagagagctgaagatgaggaggagatcaatgctgagctgacggccaagaagaggaaactggaggatgaatgctcagagctcaagaaagacattgatgaccttgagttgaccctggccaaggttgagaaggagaagcatgccacagagaacaaggttaaaaaccttactgaggaactctctgggttagatgaaacaattgcaaagttaaccagagagaagaaggccctccaagaggcgcaccagcaggccttggatgacctccaagctgaagaagacaaagtcaattctttgaacaaaaccaagagcaaactggaacagcaagtggaagacctggaaagctccctagaacaagaaaagaagctccgagtagacctggaaaggaacaaaaggaaattggaaggagacttgaagcttgctcaagagtccatattagatctggagaatgacaagcaacagctggacgaaaggctcaagaagaaagattttgaatattgtcaacttcaaagcaaagtggaagatgagcagacactgggcctccagtttcagaagaaaatcaaagagttgcaggctcgaattgaggagctggaagaggagatagaggcggagagggccacccgcgcgaagacagagaaacagcgcagcgactatgcccgggagctggaggagctgagcgagcggctggaggaggcgggaggcgtcacctccacgcagatagagctcaacaagaagcgggaggcggagttcctgaagctgcgcagggacctggaggaggccacactgcagcacgaagccatggtggccgcgctgaggaagaagcatgcggatagtgtggccgagcttggggagcagattgacaacctgcagcgggtcaagcagaagctggagaaggagaagagcgagttcaagctggagatcgatgacctctccagcagcatggagagtgtgtcgaaatctaaggcaaatctggaaaaaatctgccgaaccctggaggatcagttaagtgaggccaggggcaagaatgaggaaattcagaggagcctgagcgagctgaccacacagaagtctcgtttgcagaccgaggctggtgagctgagtcgtcagctggaagaaaaagaaagcatagtatcccaactttccaggagcaagcaagcctttacccagcaaacagaagagctcaagaggcagctggaggaagagaacaaggccaagaacgccctggcgcacgccctgcagtcctcccgccacgactgtgacctgctgcgggaacagtatgaggaggagcaggaaggcaaagctgagctgcagagggcgctgtccaaggccaatagtgaggttgcccagtggagaaccaaatacgagacggacgccatccagcgcacagaagagctggaggaggccaagaaaaaacttgctcagcgccttcaagattccgaggaacaggttgaggcagtgaatgctaaatgtgcttcactggagaagaccaagcagaggctgcaaggagaggtggaggatctgatggttgatgttgaaagagccaattccttggccgccgctctggacaagaagcagaggaactttgacaaggtgttggcagagtggaagacaaagtgtgaggagagccaagcagagctggaggcatccctgaaggagtcccgctccttgagcactgagctcttcaaactgaaaaatgcctacgaggaagccttagatcaacttgaaactgtgaaacgggaaaataagaacttagagcaggagatagcagatctcacagaacaaattgctgaaaatggcaaaaccatccatgaactggagaaatcaagaaagcagattgagctggaaaaggctgatatccagctggctctcgaggaagcagaggctgctcttgagcatgaagaagccaagatcctccgaatccagcttgaattgacacaagtgaaatcagaaattgatagaaagatcgccgagaaggatgaagagatcgagcagctgaagaggaactaccagagaacagtggaaaccatgcagagcgccctggacgccgaggtgcggagcaggaatgaagccatccggctcaagaagaagatggagggggacctgaatgaaatcgagatccagctgagccacgccaaccgccaggcggcggagaccctcaaacacctcaggagtgtccagggacagctgaaggatacgcagctccacctggatgatgccctccggggccaggaggacctgaaggagcagctggcgattgtggagcgcagagccaacctgctgcaggccgaggtggaggagctgcgggctactctggagcagacggagagggcccggaaactggcggaacaggagctcctggactccaacgagagggtgcagctgctgcatacccagaacaccagcctcatccacaccaagaagaagctggagacagacctcatgcagctccagagtgaggtagaagatgccagcagggatgcaaggaacgctgaggagaaggccaagaaggccatcacggacgctgccatgatggcggaggagctgaagaaggagcaggacaccagcgcccaccttgagcggatgaagaagaacctggaacagacggtgaaggacctgcagcatcgtctagatgaggccgagcagctggcgctgaagggcgggaagaagcagatccagaaactggagaccaggatccgagagctggagtttgaacttgagggagagcagaagaagaacacagagtctgttaagggcctgaggaagtatgagcggagggtcaaggagctgacgtaccagagtgaagaggacaggaagaatgtgctgagattgcaggatctggtggataaactgcaagtgaaagtcaagtcctacaagaggcaggcggaggaggctgatgaacaagccaatgctcatctcaccaaattccgaaaggctcagcatgagctggaggaggccgaggaacgtgcggatatcgcagaatctcaagtcaacaagctccgcgctaagactcgagacttcacctccagcaggatggtggtccacgagagtgaagagtgagccagcccttctggagcaggacagaagatatgcaaaatgtatattttcttgattcctgaccattgatacttaatgtccatgtgactctttttcacatgcaataaactttgctttgtttcaatctgg

SEQ ID NO: 316768 - DNA, 5823 bp, Artificial Sequence
  derived and/or modified sequence
atgagcagcgacaccgagatggaggtgttcggcatcgccgccccctttctgagaaagtccgagaaagaaagaatcgaagcccaaaaccagcccttcgatgccaaaacgtattgctttgtggtggactcgaaggaagagtatgcgaaaggaaagatcaaatccagtcaggacggaaaggtaacggtggaaacagaagacaatcggaccctcgtggtcaagcctgaggatgtctatgcaatgaacccccccaaatttgatagaatcgaggatatggccatgcttactcacctgaatgagccagcggtgctttataacctcaaggacaggtacacatcctggatgatttacacctatagtggtctgttctgcgtcacagttaatccctacaagtggctcccagtctacaatccagaggttgtagaaggctatcgggggaagaagcgccaggaggcacctcctcacatattctcaatctctgataacgcttaccagtttatgcttaccgaccgagaaaatcagagcatcctgataaccggggaatccggtgctggcaagacagtcaacaccaaacgggtgatccagtactttgccaccatcgccgccacgggagacctggccaagaagaaggattcaaagatgaaaggtaccctcgaagatcaaatcattagcgcaaatcctctgctcgaagcttttggaaatgccaaaacagtccgcaacgataactcttccaggttcggtaaattcattcgcatccattttgggaccacgggcaagctggcctctgccgatatcgaaacctatcttctggaaaaatctcgcgtgaccttccaactgaaggctgagaggtcctatcacattttctaccaaatcctctctaacaaaaaacccgaacttatcgaactcctcctcattacaaccaacccctacgattaccccttcatatcccagggcgagattcttgtggcctccatcgacgacgccgaggaactgttagccacggattctgcaatcgacatcttaggtttcactcctgaagaaaaatccggactgtacaaactgactggcgccgtcatgcattatgggaacatgaaattcaagcagaaacagagggaagagcaggccgaaccagacggaacagaggttgccgacaagactgcgtacctgatgggcctcaatagttcagatctgctaaaagctctttgtttcccgcgcgtgaaagtaggcaatgaatatgtgaccaagggccaaacagtggatcaagtacatcacgcagtaaatgcgctgtctaaaagtgtatatgaaaaactgttcctgtggatggtcacacggatcaaccagcagctggacaccaagttgcccaggcagcacttcatcggcgtgctggacatcgctgggttcgaaatttttgaatataacagtctggaacagctctgcatcaactttactaacgagaagctgcagcagttcttcaaccaccatatgtttgtgttagagcaggaggaatataaaaaagaaggaatcgaatggaccttcatcgactttggtatggacctggctgcctgcatcgaactcatcgagaagcctatggggattttctcaatactggaggaggaatgcatgtttccgaaagccactgatacgtcatttaagaacaagctgtacgatcagcacctgggcaagtctaataattttcaaaaacccaaagtggttaaaggacgggccgaagcccatttctcactgattcattatgccggtactgtagactactccgtgtccgggtggctggagaagaacaaggaccctttgaacgaaactgtcgtggggctctaccagaagagttccaaccgtttgctcgcccacctgtacgcgactttcgcaaccgcagatgcagactcaggcaagaagaaggttgccaagaaaaaggggagtagcttccagaccgtctccgccttgtttcgcgagaatcttaataagcttatgtccaacctaagaactacacatcctcattttgtgcggtgcattattccaaacgagactaaaaccccaggggcaatggagcatagtctcgttctgcaccagctccggtgtaatggcgtactggagggtattcgcatatgcaggaaaggttttccaaatagaatactttatggggatttcaagcagcggtacagggtattgaacgctagcgccataccagaaggccagttcatcgatagcaaaaaagcgtgcgagaagctgctcgcgagcatcgatatagatcatacacagtacaaatttggacataccaaggtctttttcaaggcggggctgctgggaacccttgaggaaatgcgtgatgaccggctggcaaagctgataacaagaactcaggccgtgtgccggggattcctcatgcgcgttgagtttcagaagatggtgcagaggcgagagtctatcttctgcattcaatataacatacgctcatttatgaatgtaaaacactggccctggatgaagctgttttttaagattaagccgctcctgaagtctgctgaaacagagaaggagatggctacaatgaaagaggagttccagaagacaaaggatgagctggccaaatctgaagcgaaacgcaaagaactggaggagaagctcgtgaccctggtgcaagagaagaatgatctccagctgcaagtccaggcagagtccgagaacctgttggatgctgaggagcgttgtgatcagctgatcaaggccaaattccagctggaggccaagatcaaggaggtcaccgaacgggcggaggatgaggaagagataaatgctgagctaaccgcaaagaagcggaaactggaggatgagtgcagcgagctcaaaaaggacatagatgacctcgagttgactctggcaaaggtggagaaggagaagcacgccactgaaaacaaggttaaaaatttgaccgaggagctgagtggcctggacgaaactattgctaaactcacgcgagaaaaaaaggcactacaggaagctcatcaacaggccctcgacgatctgcaggctgaagaggacaaagttaattccctcaacaaaacaaaatctaaactggagcagcaggttgaagacctggagtcctcattggaacaagaaaagaaacttagagttgaccttgaacggaataaacgcaagctcgagggcgacctgaagttggcccaggaaagtatccttgacctagagaatgacaaacagcagctggacgaacggctgaagaaaaaggattttgagtactgtcagctccagagcaaggtggaggatgagcaaaccctggggctccaattccaaaaaaaaatcaaggaactgcaggcccggatagaggagctcgaagaagagatagaggctgagcgggccacccgggccaaaacagaaaaacagcgctcagattatgccagagagctcgaagaactgtccgaacggctagaagaggccggtggtgtgacctctacccagatagagcttaacaaaaaacgtgaagcggagtttctcaagctccgccgagacctggaggaagctactttacagcatgaggctatggtagccgcactcagaaaaaaacatgccgattcagtggccgagcttggtgagcagatcgacaacctccaacgggtgaagcagaaactcgaaaaagagaaaagcgagttcaaactcgaaattgacgacttatcttcgtccatggagtctgtgtctaaaagcaaggccaacctggaaaaaatatgcagaacactggaggatcaactgtccgaagctagagggaaaaatgaggaaatccagcggagcctgtctgaattgacaacccagaagtcaagactgcaaactgaggcaggcgaactcagtaggcagcttgaggagaaggaatccattgttagtcagctgtctaggtctaagcaggcatttactcagcagaccgaggaactgaagcggcagctcgaggaagaaaacaaggcgaagaatgccctcgcacatgctctgcagagttctcgacacgattgtgatcttctccgggagcaatacgaggaggaacaggagggcaaggccgagttgcagagagcccttagcaaggcaaacagcgaggttgcccagtggcgcactaaatacgaaacagacgcaattcaacgaaccgaagagctcgaagaggccaaaaaaaaactggcacaacgtctgcaagattccgaggaacaggtagaggcagtgaacgccaagtgcgccagcctggagaaaactaagcagagactgcagggcgaggtcgaagacttaatggtggatgtcgagagagctaatagcctggctgcagcgctggataaaaaacagcgaaattttgacaaggtcctggccgagtggaagacaaagtgcgaagagtcccaggcagagctcgaggccagcctgaaggagagccgatctctaagcaccgagctgtttaaacttaagaacgcctacgaggaggctctggaccagttggagacggtgaaaagagagaataaaaacctggagcaggaaatcgccgacttgactgagcagattgctgaaaatggcaaaacaattcacgagcttgaaaagagccgcaaacagatcgagctcgaaaaggccgacattcagcttgccttggaggaggcagaagccgcgctagagcacgaggaggccaagattctgagaatccagctggaacttacccaggtgaaaagcgagatcgaccggaagattgcggagaaggatgaagagattgaacagttgaagaggaattatcaaaggacagtggagacaatgcagagcgctctcgatgccgaggttaggtcaagaaacgaagctattcggttgaaaaagaagatggaaggcgacctgaatgagattgagattcaactgagccacgcaaacagacaggccgccgagaccctgaagcacttgagatccgtgcagggtcagctgaaagacacccagctccatctcgatgatgctctaagaggacaggaggacctgaaagaacaactggccatcgtggagcggagagcaaatctgctgcaagctgaggtcgaagagctgcgggctacactcgaacagacagagcgagctcggaagctggctgagcaggaactgctggattcaaacgaacgggtccaactgctccacacccaaaatacctctctaatccatacaaagaagaagctggagacggacctgatgcagctccagtccgaagtcgaagatgccagccgagatgcaagaaatgccgaggagaaagcaaagaaggcaataacagatgccgctatgatggcggaggagctcaaaaaggagcaggatacatcagctcatttagagaggatgaaaaagaacctggaacagacagtaaaggacctgcagcaccgattagacgaggccgaacagctggccctgaaaggagggaagaaacagatccagaagctcgaaacccgaatcagggagctcgagttcgaattggagggcgagcagaaaaaaaacaccgaaagcgtgaaagggcttcgcaagtacgaacgacgcgttaaagagctgacttatcagagtgaggaggaccgaaagaacgtgttaagactccaggacctggttgataagctgcaggtgaaagtgaaatcatacaaaaggcaagcggaggaggccgatgagcaggccaatgcccatctcaccaagtttcggaaggcgcagcacgaattggaagaagccgaagagagagcagacattgcggaaagtcaggtgaataagctccgtgcaaaaactagagatttcacctcttcacgaatggtcgtccatgagtcagaagagtag

SEQ ID NO: 316769 - DNA, 5823 bp, Artificial Sequence
  derived and/or modified sequence
atgagcagcgacaccgagatggaggtgttcggcatcgccgcccccttcctgcgaaagtccgagaaggagcggatagaggcacaaaatcagcccttcgacgccaagacgtattgtttcgtggttgatagtaaagaggagtatgcgaaaggcaagatcaaatcatctcaggatggcaaggtgaccgtagaaaccgaggataataggacactggttgtgaagccggaggacgtgtatgccatgaatccccctaaattcgacagaattgaggacatggccatgttgacgcatctcaatgagcctgccgtgctctacaacctcaaggacaggtacacttcatggatgatctacacctactctgggcttttttgcgtgactgtgaatccgtacaagtggttaccagtatacaaccctgaggtggtggagggttacagagggaaaaaaagacaggaggcgcccccccacatattctctatttctgacaatgcgtaccagttcatgctgactgatcgggagaaccagtcaattctcattactggggagagcggggccggcaagaccgttaataccaaacgtgttatccagtattttgcgacaattgcggcaactggagatctggcaaagaaaaaggactctaaaatgaaggggacattggaagatcaaataatctccgctaatccactgctggaagccttcggaaatgctaagactgtccggaacgacaattcttcacgcttcggtaagtttatccgtattcatttcggaacaaccgggaagctggccagcgcagacattgaaacctatctcctggagaagagcagagtgacatttcaattgaaggctgagaggagctaccacattttttaccagatacttagtaataaaaagcctgagctgattgagcttctcctaatcactaccaatccctacgattatccgttcatatcgcagggagagattcttgtcgcctcaatcgatgacgcagaggagctgttggcaactgactcagcaatagatatcctaggcttcacacctgaagagaaaagcggtctgtataagctgactggagccgtgatgcactatgggaatatgaaattcaaacaaaagcagagggaggaacaagcggaaccagatggtacagaggtcgcagataaaacagcttacttgatgggtctgaacagtagcgatctgttgaaggccttgtgctttcctcgggtgaaggtggggaatgaatacgtgacaaagggccagaccgtggatcaggtgcatcacgccgttaacgccctgtctaaatcagtgtatgaaaaactctttctctggatggtcactcgcattaatcagcaactcgacacaaagctgcctcgacagcacttcattggcgtgctcgacatcgcgggctttgaaatttttgaatacaactctctcgagcagttatgcataaatttcaccaatgagaagttgcaacagttcttcaatcaccacatgttcgtacttgaacaggaggagtacaagaaagaaggtattgaatggacatttattgattttggcatggacctagccgcctgcattgaacttatcgaaaagccaatgggcattttctcaatactggaagaagaatgtatgttcccgaaagcgacagacacaagtttcaagaataagctgtacgaccagcacttaggtaagagtaataattttcagaaacctaaggtcgtcaaaggccgggctgaagcgcacttctcactcatccattacgctggaactgtggattactctgtcagcggatggctcgaaaagaacaaggaccccctgaacgagactgtcgttggactgtatcaaaagtcatctaatcggttactcgcacacttgtacgctaccttcgcaaccgcggacgctgattctggtaaaaagaaggtcgccaaaaagaaggggagcagttttcagacagtgtctgccctttttcgcgagaacctgaacaaactgatgtcaaacctgcggactacccatccccactttgtacggtgcataatacctaacgaaaccaaaaccccaggggctatggagcacagcctggtcctgcatcagttgaggtgcaatggggtattggaaggtatccggatctgcaggaagggttttcctaaccggatcctctacggggacttcaagcagcgctatagggttttaaacgctagtgccatacctgaaggccagttcatcgatagcaagaaggcttgtgaaaagttactggcttccatagatatcgatcacacacagtacaagttcgggcacactaaagtgtttttcaaggccgggcttctgggcacccttgaggagatgagggacgacaggttagctaagcttatcaccagaacccaggccgtatgtcgtggattcttgatgcgagtggagttccaaaaaatggtccagagaagagagtccattttctgtattcagtataacatcaggagttttatgaatgtgaaacattggccatggatgaaactctttttcaagatcaagccacttttgaagagcgccgagacggaaaaggagatggcaacaatgaaggaggagtttcagaaaacaaaagacgagttggctaagtctgaagccaagagaaaggagcttgaggaaaaactggtgactctggttcaagagaaaaatgatctccagctgcaggtgcaggccgaatctgagaaccttttagacgctgaagaacggtgcgaccagcttataaaagccaagttccagctggaagctaagataaaggaggtcactgaacgtgccgaggatgaagaagagatcaatgccgagcttactgccaaaaaaaggaagctggaggacgagtgctcagagctcaagaaggacatcgacgatttggaactgacattggccaaggttgaaaaagaaaagcatgccaccgagaacaaggtgaaaaatctcaccgaagaattgagtggactggacgaaaccatcgctaagttgacaagggaaaaaaaagccctacaggaagcacaccaacaggccctggacgatcttcaagccgaagaggataaagtcaacagtttaaacaagactaagtctaaacttgagcaacaagtggaagacttggagagtagcttggagcaagagaagaagctgcgcgtggacctagagcgtaacaaaagaaaattagaaggggatttaaagctggctcaggaaagtatcctcgacttggagaacgataagcagcagctggatgaacgtcttaaaaaaaaagattttgagtattgtcagctgcagtctaaggtcgaggacgagcagacactgggtctgcaattccagaaaaaaatcaaggaactgcaggccaggatcgaggagttggaagaagaaatcgaagctgagagagctacgagagcaaagacagaaaagcaacgatctgactatgcccgggaactggaggagcttagcgaacggcttgaagaggcgggcggagtgacttcgactcaaattgagctgaataaaaagcgagaggctgaattccttaagcttcgccgggatctcgaagaggccacattacagcacgaggccatggtggccgctcttagaaagaaacatgccgactccgttgcagaactcggtgagcaaatcgataacctgcagagggtcaaacaaaaactcgagaaggaaaagtcagaatttaagctcgaaattgatgatctttcttccagcatggaatccgtaagcaagtcaaaggccaatctagagaaaatctgtcggacacttgaggaccagctttctgaggctagaggcaaaaacgaagagatacagcgatcattatcagaactgactacccagaagtccagactgcaaacggaggcaggggaactgagccgtcagttggaggaaaaagagtctattgtgtctcagctctcccgttctaaacaggcattcactcagcaaactgaagagctcaaacgacagctggaggaagagaataaggccaaaaatgcactggcacatgccttgcagagttcccgccacgattgcgatttgctgcgagaacagtatgaggaggaacaggagggcaaggctgagttgcaaagggcgttgtcaaaggctaattcagaggtcgcgcagtggagaaccaaatatgagaccgatgctattcagagaactgaagaattggaggaggccaaaaagaaactggcacagcggttacaggactcagaggaacaggttgaagcagtgaatgcaaagtgcgcatcactggaaaaaaccaagcagaggctgcaaggcgaagtcgaagatctcatggtggacgtggagagggctaatagccttgcggccgctctcgataagaagcagagaaattttgataaagtcttggcagagtggaagacgaagtgtgaagagtctcaagccgagctcgaggcctctctcaaagagtcccggagcctatcaacagaacttttcaagctgaagaacgcctatgaagaagcacttgaccagcttgaaaccgtgaagcgagagaacaaaaaccttgagcaggagattgctgatctgacagaacagatcgctgaaaacgggaagacaatccacgaattagaaaagagtagaaaacagatagaactcgagaaggccgacattcagctggcactcgaagaggccgaagccgccctggagcacgaggaggctaagattttaagaatccagctggaactgactcaggtaaaatcggagatcgacaggaagattgcagagaaagatgaggagatagagcaattgaagaggaactaccagcgaacagttgaaacaatgcagtcagccctggacgctgaggtccggagccggaacgaagccatcagactgaagaaaaaaatggagggcgatttgaacgagatcgagatacagttgtcccacgctaaccgccaggccgccgaaaccctgaagcatctgcggagcgtacagggccagctgaaggacactcagctacatctcgacgatgcacttagaggccaggaggacctgaaggaacagttggcaatcgtagaaaggagggccaacctactgcaagcggaagtagaagagttgcgcgctacactggagcagactgaaagagccaggaaactcgctgaacaggagctgttagactctaatgagagagtgcaactgctgcacacacagaacacctccctgatccacaccaaaaagaagttagagacagatctcatgcagcttcagagtgaggtggaagacgcttctcgcgacgctcggaacgcagaggaaaaagctaagaaagcaataacggatgctgcaatgatggcggaggaacttaagaaggaacaggatacaagcgcacacctggagagaatgaaaaaaaatttagaacagacagtgaaagaccttcagcacaggttggacgaagccgaacaacttgctctgaaaggtggtaagaaacagatccagaagctagaaactcgaattagggagctggaatttgaactcgaaggcgagcagaagaaaaacaccgagtctgtcaaaggcctcagaaaatatgaacggcgggtcaaggagctaacgtaccaaagcgaggaagacagaaagaacgtgctgcgcctgcaagacttggttgacaagttgcaggtgaaggtgaaatcctataagaggcaggcggaagaagctgacgagcaagcgaatgcgcatttgactaaatttcgcaaggcccagcatgaactcgaagaagcagaggagagggctgacattgccgaaagccaagtaaataagctgcgcgctaagaccagggatttcacttctagcaggatggtagttcacgaatctgaggagtag

SEQ ID NO: 316770 - DNA, 5822 bp, Artificial Sequence
  derived and/or modified sequence
atgagctcagacacagagatggaagtattcggaatagcagctccctttctccgaaaatccgagaaagagcggatcgaggcacaaaaccagcccttcgacgccaagacctactgcttcgtggtggacagcaaggaggagtatgccaaggggaagataaaatcctcccaagacggcaaggtcacagtcgagacagaggataacagaactctggtggttaaacctgaggacgtttacgccatgaatccaccaaagtttgatcgaatcgaagacatggcaatgcttacccacctgaacgaacctgccgtgctgtataacctgaaagaccgctacaccagctggatgatctacacttatagcggattattttgcgtgacagttaatccatataaatggcttcccgtgtacaaccccgaagttgtcgaaggttaccgaggtaagaagagacaggaagcccctccacatatcttcagcatctctgacaatgcctaccagtttatgctgactgatcgtgaaaatcagagcattctgatcacaggagaatctggcgcagggaaaactgttaacactaagcgggtcattcagtatttcgcgacgatcgccgctaccggagatctggcaaagaagaaggactccaaaatgaaagggacattagaggatcagatcatcagtgccaaccccctcctcgaggcattcgggaacgcaaagacagttcgaaatgacaactccagccggtttgggaagttcatcaggattcatttcggcactacaggcaagctggccagtgccgatattgagacttacttgctggaaaaatctagggtaacctttcaactcaaagccgaacgctcataccacatcttctatcagatactgtccaataaaaagccagagctgatcgagttgctgctgatcacgactaacccctatgactatccattcattagtcagggcgaaattctggtggccagtattgatgatgctgaggaactgttggccactgattcagctatagatattttgggctttaccccggaagaaaagagcggactttataagttgaccggagcagtgatgcattatggcaacatgaaatttaagcaaaagcaacgtgaggaacaggcagaaccagacggcactgaggtagccgacaaaaccgcctacctgatggggctgaacagctctgatttgctgaaagccctttgcttccctcgagtcaaggttggaaatgagtatgtcactaaaggccagacagtagaccaggttcaccacgccgtcaatgccctgagcaagagcgtgtatgagaaactcttcctttggatggttaccaggataaaccagcagctggacacaaagctgcctcggcaacactttatcggagttctagacattgcaggttttgaaatattcgaatacaacagccttgaacagctgtgtatcaacttcacaaacgagaagctacaacagttttttaaccaccacatgtttgtgctggagcaggaggaatacaagaaagaaggtatagaatggacatttatcgacttcggtatggatctggcagcatgcatcgagttgattgagaaaccaatgggcatcttttccatccttgaagaggagtgtatgttcccaaaagccaccgatacatcttttaaaaataaactttacgaccagcacttaggcaaaagtaacaacttccagaagccaaaagtagttaaaggcagggcagaggcccatttttctctgattcactacgccggaactgtcgactattcagtgagcggctggctggagaaaaacaaggacccgctgaatgaaactgttgtgggtctgtaccagaaatcttccaatcggctcctcgcccatctctacgccacctttgccaccgctgacgccgatagtggaaaaaagaaggtggcaaaaaagaaaggcagctcgtttcaaaccgtgtccgctctgttcagggagaatctgaacaagttaatgagcaatctgaggaccactcatccccacttcgtccgctgtattattccaaatgaaaccaagacgcctggcgctatggagcactccttggttttgcatcagctgcgctgcaatggagtgctggaggggatcagaatctgtcgtaaaggtttcccaaatcggatcttgtatggggattttaaacaacgttacagagttttgaacgctagcgcaatacccgaaggacaattcatagactcaaagaaagcctgcgagaaattactggcttcaatcgatattgaccacacccagtacaaatttggacatacgaaagttttctttaaggccggtttgctgggtactctcgaggaaatgcgggacgatcgcttggccaagctaatcaccagaacgcaggcagtgtgcagagggttccttatgagggtggaatttcagaagatggttcagcgcagagagtctatcttttgcatccagtataatatcagatcattcatgaacgtcaagcactggccgtggatgaagttgttcttcaaaattaagcccctgcttaagagcgccgagactgaaaaagagatggctaccatgaaagaagagttccaaaagacaaaagacgagctggccaaatctgaagcaaagcgtaaagagcttgaagaaaagcttgttacactcgtgcaagaaaaaaacgatctccagctgcaggtgcaggccgagtcggagaatctactggacgcagaagaacgttgtgaccagttgattaaagctaaatttcaacttgaagcaaagattaaggaggtgaccgagagagccgaagacgaagaggaaattaacgcggagctgacagccaaaaagagaaaattagaagacgagtgttccgaacttaaaaaagacattgatgatttagaactgactctggcaaaggtggaaaaggagaaacacgccaccgaaaataaggtgaagaacctgacagaagaactgagtgggcttgatgaaactattgccaagctgaccagggagaaaaaggccttacaggaggctcaccagcaggccttggacgatctgcaagctgaggaagacaaggtgaattcgctcaataagaccaaaagcaagttagaacagcaagtggaggatctggaatcttccctggagcaggaaaaaaagttgcgtgtcgatctggagaggaacaaacgcaaactggaaggcgatctgaaactggcccaggaaagcattctagatcttgagaatgataagcagcagcttgacgaaagattgaagaaaaaagatttcgaatactgccagctgcagtctaaagtcgaggatgagcagaccctcggactacagttccagaagaaaattaaagagcttcaggcccgtatcgaagagttggaggaggagatcgaggctgagagagccaccagggcgaagaccgagaagcagcgctctgattatgcaagagaactggaggaactgtctgaacgcctcgaggaggctggcggagtgaccagtactcagatcgaattaaataagaagcgcgaggccgaatttcttaagctcaggagggacctggaagaagctactctgcagcatgaagcaatggttgcagcccttcgcaagaagcacgccgattcagtagcggagttaggcgagcaaattgacaacctacagagagtaaaacaaaaactggaaaaggaaaaaagcgaatttaagctggaaatagacgatctttctagctctatggaatcagtctcaaaaagcaaagccaatcttgagaaaatctgccgaactctcgaggaccagctatcagaagccagggggaagaatgaagaaattcaacgctcactcagtgagctgaccacacaaaagtcccgattgcagactgaggcgggagaactgtcccgccaacttgaagaaaaggagagtatcgtttcccagttaagcaggagcaagcaggccttcactcagcagactgaagagctgaagcgccaactcgaggaagagaacaaagccaaaaacgcactggctcatgcactgcagtcttcacggcatgactgtgacctcctccgcgagcaatatgaggaggagcaagagggaaaggccgaactgcaacgcgctctttctaaggcaaactccgaggtggcacaatggcgcaccaagtacgagacggacgctattcaacggaccgaggaacttgaggaggctaaaaagaagctcgctcagagactgcaagacagtgaggaacaggtggaggcagttaacgctaagtgcgctagtctggagaaaacaaagcaaaggttgcaaggggaagtggaagacctcatggtggacgtggaacgcgctaacagcctcgcagccgcactggacaagaagcaaagaaactttgacaaggtgctggccgaatggaagactaaatgcgaggagagtcaagctgaactagaggcttcgcttaaggaatcacgatctctatccacagaactctttaaacttaagaacgcctacgaagaggccctcgaccagttggaaacggtgaaaagagagaacaaaaatctagagcaggaaatcgctgatctgaccgagcagattgctgagaatggcaaaaccatccacgagcttgagaagtctcggaaacaaattgagctcgagaaggccgacatccagctcgcactggaggaagccgaggccgcactagaacacgaggaggcgaaaatcctgcggatccagttggaactgactcaagttaagtccgaaatcgaccggaagatcgccgagaaggatgaagagatcgagcagctaaagaggaattatcagcgcacggtagagacaatgcaaagtgccctcgacgccgaggtgcgctcccgaaatgaggctattcgccttaaaaaaaagatggaaggtgatctgaatgaaatcgagatccagctaagtcatgccaatagacaggcggctgaaactcttaagcatctccgatccgtccaaggccagttaaaggatacccagctgcatctcgacgacgcgttgagaggccaggaggacctcaaagagcagctggccatcgttgaacggagagcaaatctgctccaggccgaagtggaagagctcagagcgaccctggagcaaactgaacgggcaagaaagttagctgagcaagaactgctggattccaacgaacgggtgcagctgttgcacacccagaacaccagcctgatacacacgaagaagaagctggagaccgatctgatgcagctccagtcagaagtcgaggacgcaagcagagacgcacgcaacgctgaagagaaagcaaagaaggccatcaccgacgccgcaatgatggccgaggaattaaaaaaggagcaggacacctccgcccatctggagcggatgaaaaagaacctcgaacagactgtgaaagatctccagcacagactagatgaagccgagcagctggctcttaagggtggaaagaagcaaatacagaagttggagaccaggatcagggagctggaattcgagttggagggagagcagaagaagaatacagaatccgtaaaaggccttagaaaatacgagcggagggtaaaagaactcacttaccagagtgaggaggaccggaagaatgtactgcgcctgcaggacctcgtagataaattacaggtgaaggtgaagtcttacaagagacaggctgaggaagcggatgagcaagctaatgctcacctgaccaaattcagaaaggcccaacacgagctcgaggaagccgaagagagggcggacatagccgaaagtcaggtgaataagttgcgcgcaaaaacacgggactttacaagttcacggatggtagtccatgaatcagaagagta

SEQ ID NO: 316771 - DNA, 5823 bp, Artificial Sequence
  derived and/or modified sequence
atgtcttctgacaccgaaatggaggttttcggaatcgccgcacccttcttgcgaaagtccgagaaagagcgcatagaggcccagaatcagcctttcgatgccaagacttattgctttgtagtggactctaaggaagagtacgccaagggaaaaatcaagagtagtcaggatgggaaggtgacagtggagacggaggacaataggaccctggtggtgaagccagaggatgtctatgccatgaatcccccaaagtttgatagaatcgaagacatggccatgctgactcacttaaacgaacccgcagtattgtacaacctgaaggacaggtacacatcatggatgatatatacctatagcgggctgttctgcgtcaccgtgaatccctacaagtggctgccagtctataaccccgaagtagtggagggctaccgcggtaagaagcgtcaagaagcgcctccacatatattttcgatctctgacaatgcttatcagtttatgctgaccgatagggaaaaccagagcattttgataactggtgagtctggcgcaggcaagactgtcaacacgaagcgtgtgatacagtattttgccactatcgcagctactggtgacttggctaaaaaaaaagattccaagatgaaaggcacattagaggaccagatcatctctgccaatccacttctggaagcattcggcaacgctaaaacagtgagaaatgataacagctctcggttcggcaagtttataagaatacatttcggaacgaccggaaagctggcatccgccgatatagaaacatacctcctggagaagtcccgggtgactttccagctcaaggcggagaggtcataccatatattctatcagattctcagtaacaagaagcccgagctgatcgaactcttgttgattaccacaaacccctacgattacccatttatcagccaaggcgaaatcctcgtggcatctatcgacgacgccgaggaactgctggccaccgactccgccatcgacattctgggatttacccctgaagaaaaatctggtctttacaagctcacaggggctgttatgcactacgggaatatgaagttcaaacagaaacaacgggaagaacaagcagaacccgatgggactgaggtggcagataagacagcctacctgatgggactcaactcgtcagaccttctgaaggccctctgttttcccagggtaaaggtgggtaatgaatacgtgaccaaggggcagacagtggatcaggttcaccatgctgttaacgccctcagcaagtcagtgtatgagaagctgttcctgtggatggtgactcggattaatcagcaactcgacaccaaacttccgagacagcattttatcggggtgttggacatcgcaggcttcgagatattcgaatacaatagcttagaacagctctgcatcaatttcaccaatgagaaactacaacagttttttaatcatcacatgtttgtgctcgaacaggaggaatataagaaagagggcatcgagtggacctttattgacttcggaatggaccttgccgcatgcatcgagctgattgaaaagccgatgggcatcttcagcattctggaggaagaatgcatgttcccaaaggccacggacaccagcttcaagaataagctgtacgatcagcacttgggcaagtctaacaactttcagaaacccaaagttgttaagggacgggctgaggcccacttttccctgatccattatgccggtacggttgactattctgttagtggatggctcgagaaaaacaaggaccccctgaacgagacggtcgtcggtctctaccagaaaagctccaataggctcctggcccacctctacgctacattcgccacagcagatgccgactccgggaaaaagaaggtcgcgaagaagaaagggagttctttccagaccgtttctgcactgtttcgagagaatctgaacaaacttatgtcaaacctgcgcacaactcatcctcatttcgtgagatgtataatcccaaatgaaacaaaaacccccggtgctatggagcacagccttgtgctgcaccagctacggtgtaatggagtacttgaggggataaggatctgtaggaaggggtttccgaataggatactgtacggtgactttaaacaacgctatcgggttctgaacgcctcagccatccctgagggccagtttattgattcaaagaaggcttgcgaaaaactcctggctagcattgatattgaccatactcaatacaagttcgggcacacgaaggtgttttttaaagccggattactgggcactctggaggaaatgagggatgatcgtttggccaaactgattacgcggacccaggctgtgtgtcgtggatttttgatgcgtgtcgagttccagaaaatggtacaacggagagaatccatcttttgtatccagtacaatataaggtcatttatgaacgtgaaacactggccatggatgaagctcttttttaaaattaaaccgttactgaagagcgcggaaactgagaaggaaatggcaactatgaaggaagaattccagaaaaccaaggacgagctggccaagtccgaggccaagcgcaaggagcttgaggaaaaactggtgactctggtgcaggagaagaacgatctccaactccaggtccaagctgaaagcgaaaaccttcttgacgccgaggaacgatgtgatcagctcattaaagcgaagttccaattggaggctaagattaaagaggtaactgaacgcgcagaggatgaggaggagatcaacgcagagctgaccgcgaagaaacgaaagctggaggacgaatgctctgaactcaaaaaggacatagatgaccttgaactcaccctcgctaaggtcgaaaaggaaaaacatgccactgaaaacaaagtgaagaatctgacagaggagctctcaggcctggatgagactatcgccaaacttactagagagaaaaaggctctacaggaagcccaccagcaggctctcgatgacttgcaggcggaggaagacaaggttaactctttaaacaaaaccaagagcaagttggagcagcaagtcgaggatctagagtcctctctggaacaggagaagaaactgcgcgttgatctggaacgcaacaaaagaaaactggaaggcgacttgaagttggctcaagaatccatcctggacttagagaatgataagcagcagttggatgagcgcctgaagaagaaggactttgagtactgtcaactgcagagtaaagttgaagatgagcagacattgggcctccagttccagaagaaaatcaaggagcttcaggcccgtatcgaagagctagaggaggaaattgaggcagaaagagctacacgagccaagaccgagaagcaaagatcagactacgccagagagttagaggaactgtcagagaggcttgaagaggccggaggcgtcaccagtacacaaatagaactcaacaaaaagcgggaggccgagttcctaaagttaaggcgcgatctggaggaggccacattacagcatgaagccatggtcgctgccctccgcaaaaagcacgcagattccgtagccgaactgggtgagcagatcgacaatcttcaacgcgtgaagcagaagctcgagaaggagaagtccgagttcaaactggagattgatgacctcagtagtagtatggagagcgtcagtaagagtaaggcgaatctggaaaagatctgtaggacattggaggatcagctgtcagaggctaggggcaagaacgaagagatccagaggagcctctccgagctcacaacacagaaatcacggctgcagaccgaagctggtgagttaagtagacagctcgaagagaaggagtctatagtgtctcaactctcacgcagcaaacaggcctttacccagcagaccgaggaactcaagaggcagttggaggaagagaataaagctaaaaacgcacttgctcacgctctccagtccagccgtcacgactgcgatttgctgcgagagcagtacgaggaggaacaggaagggaaggctgaactgcagcgcgcattgagtaaagcaaactctgaagtcgctcagtggaggacaaagtacgagacagatgccatccagaggacagaggaattggaagaggcaaaaaaaaaactggcccaacggttacaggatagcgaggagcaggtggaggccgtgaacgcgaagtgtgctagcctcgagaagactaagcagagacttcaaggcgaagtggaagatctgatggtcgatgtcgaacgggctaatagtttagctgcggctctggacaaaaaacagcgtaactttgataaggtcctggccgagtggaaaactaaatgcgaagagagccaggccgaactcgaggcctcactcaaggagtctcgctctctcagtacagagctatttaagctgaagaatgcttacgaagaggccctggatcagttagagaccgtcaagcgagagaacaagaacctcgaacaggagattgctgacttgaccgagcagattgcagagaacggtaaaaccatccacgagctcgaaaaatcacggaaacaaatcgagctggaaaaggccgacatacagctggccctggaagaagccgaagctgccctcgagcatgaagaagccaaaatcctgcggatccaactggaactgacgcaggtcaagtccgagatcgacagaaaaatcgccgagaaagacgaagaaattgaacagctgaaaaggaactaccagcggaccgtggaaacaatgcagagcgccctagacgcagaggtgcgctctcggaacgaagccatcaggctgaaaaagaagatggagggagatcttaatgaaattgaaatccagctctctcatgccaatagacaggccgctgaaaccctgaaacatctgaggagtgtgcagggacaactgaaggacacgcagttgcatctggatgatgccctacggggtcaggaggacctgaaggagcaactggctatagtggagcgcagggccaacctgctgcaggctgaagtagaagaacttagagcaactctggaacaaacggagagggcgaggaaacttgcagaacaggagctattggatagcaatgagagggtgcagctcctccacactcagaatacatctttaatccatacaaaaaaaaagctggaaactgaccttatgcaacttcagtccgaggtggaggatgcctcgcgggacgcccgaaatgcagaggaaaaggccaagaaagcaataaccgatgccgctatgatggcagaggagctgaaaaaagagcaggatacctctgcccacttggagcgaatgaaaaagaacctggagcagacagtgaaagatttacagcacaggctggatgaagctgagcaactggctctaaaaggtgggaaaaagcagatccaaaaactggagacgaggatcagagagctggagttcgagctggaaggcgaacaaaagaagaatacagagtcagtcaagggcctccgcaagtacgagagacgggtgaaagaactgacgtaccaatctgaagaggaccgcaaaaatgtgctaaggctgcaggacctcgtggataagctgcaggtgaaagttaaaagctacaagaggcaggcggaagaagcagatgaacaagcaaatgcacatttgacaaagtttagaaaggcccagcatgagctcgaggaggctgaagaaagagctgacatcgcagaaagccaggtgaacaagctccgcgctaagacaagagactttacatcgtcacgcatggtggtgcacgagtccgaagagtag

SEQ ID NO: 316772 - DNA, 5823 bp, Artificial Sequence
  derived and/or modified sequence
atgagcagcgacaccgagatggaggtgttcggcatcgccgcccccttcctgagaaagagcgagaaggagagaatcgaggcccagaaccagcccttcgacgccaagacctactgcttcgtggtggacagcaaggaggagtacgccaagggcaagatcaagagcagccaggacggcaaggtgaccgtggagaccgaggacaacagaaccctggtggtgaagcccgaggacgtgtacgccatgaacccccccaagttcgacagaatcgaggacatggccatgctgacccacctgaacgagcccgccgtgctgtacaacctgaaggacagatacaccagctggatgatctacacctacagcggcctgttctgcgtgaccgtgaacccctacaagtggctgcccgtgtacaaccccgaggtggtggagggctacagaggcaagaagagacaggaggcccccccccacatcttcagcatcagcgacaacgcctaccagttcatgctgaccgacagagagaaccagagcatcctgatcaccggcgagagcggcgccggcaagaccgtgaacaccaagagagtgatccagtacttcgccaccatcgccgccaccggcgacctggccaagaagaaggacagcaagatgaagggcaccctggaggaccagatcatcagcgccaaccccctgctggaggccttcggcaacgccaagaccgtgagaaacgacaacagcagcagattcggcaagttcatcagaatccacttcggcaccaccggcaagctggccagcgccgacatcgagacctacctgctggagaagagcagagtgaccttccagctgaaggccgagagaagctaccacatcttctaccagatcctgagcaacaagaagcccgagctgatcgagctgctgctgatcaccaccaacccctacgactaccccttcatcagccagggcgagatcctggtggccagcatcgacgacgccgaggagctgctggccaccgacagcgccatcgacatcctgggcttcacccccgaggagaagagcggcctgtacaagctgaccggcgccgtgatgcactacggcaacatgaagttcaagcagaagcagagagaggagcaggccgagcccgacggcaccgaggtggccgacaagaccgcctacctgatgggcctgaacagcagcgacctgctgaaggccctgtgcttccccagagtgaaggtgggcaacgagtacgtgaccaagggccagaccgtggaccaggtgcaccacgccgtgaacgccctgagcaagagcgtgtacgagaagctgttcctgtggatggtgaccagaatcaaccagcagctggacaccaagctgcccagacagcacttcatcggcgtgctggacatcgccggcttcgagatcttcgagtacaacagcctggagcagctgtgcatcaacttcaccaacgagaagctgcagcagttcttcaaccaccacatgttcgtgctggagcaggaggagtacaagaaggagggcatcgagtggaccttcatcgacttcggcatggacctggccgcctgcatcgagctgatcgagaagcccatgggcatcttcagcatcctggaggaggagtgcatgttccccaaggccaccgacaccagcttcaagaacaagctgtacgaccagcacctgggcaagagcaacaacttccagaagcccaaggtggtgaagggcagagccgaggcccacttcagcctgatccactacgccggcaccgtggactacagcgtgagcggctggctggagaagaacaaggaccccctgaacgagaccgtggtgggcctgtaccagaagagcagcaacagactgctggcccacctgtacgccaccttcgccaccgccgacgccgacagcggcaagaagaaggtggccaagaagaagggcagcagcttccagaccgtgagcgccctgttcagagagaacctgaacaagctgatgagcaacctgagaaccacccacccccacttcgtgagatgcatcatccccaacgagaccaagacccccggcgccatggagcacagcctggtgctgcaccagctgagatgcaacggcgtgctggagggcatcagaatctgcagaaagggcttccccaacagaatcctgtacggcgacttcaagcagagatacagagtgctgaacgccagcgccatccccgagggccagttcatcgacagcaagaaggcctgcgagaagctgctggccagcatcgacatcgaccacacccagtacaagttcggccacaccaaggtgttcttcaaggccggcctgctgggcaccctggaggagatgagagacgacagactggccaagctgatcaccagaacccaggccgtgtgcagaggcttcctgatgagagtggagttccagaagatggtgcagagaagagagagcatcttctgcatccagtacaacatcagaagcttcatgaacgtgaagcactggccctggatgaagctgttcttcaagatcaagcccctgctgaagagcgccgagaccgagaaggagatggccaccatgaaggaggagttccagaagaccaaggacgagctggccaagagcgaggccaagagaaaggagctggaggagaagctggtgaccctggtgcaggagaagaacgacctgcagctgcaggtgcaggccgagagcgagaacctgctggacgccgaggagagatgcgaccagctgatcaaggccaagttccagctggaggccaagatcaaggaggtgaccgagagagccgaggacgaggaggagatcaacgccgagctgaccgccaagaagagaaagctggaggacgagtgcagcgagctgaagaaggacatcgacgacctggagctgaccctggccaaggtggagaaggagaagcacgccaccgagaacaaggtgaagaacctgaccgaggagctgagcggcctggacgagaccatcgccaagctgaccagagagaagaaggccctgcaggaggcccaccagcaggccctggacgacctgcaggccgaggaggacaaggtgaacagcctgaacaagaccaagagcaagctggagcagcaggtggaggacctggagagcagcctggagcaggagaagaagctgagagtggacctggagagaaacaagagaaagctggagggcgacctgaagctggcccaggagagcatcctggacctggagaacgacaagcagcagctggacgagagactgaagaagaaggacttcgagtactgccagctgcagagcaaggtggaggacgagcagaccctgggcctgcagttccagaagaagatcaaggagctgcaggccagaatcgaggagctggaggaggagatcgaggccgagagagccaccagagccaagaccgagaagcagagaagcgactacgccagagagctggaggagctgagcgagagactggaggaggccggcggcgtgaccagcacccagatcgagctgaacaagaagagagaggccgagttcctgaagctgagaagagacctggaggaggccaccctgcagcacgaggccatggtggccgccctgagaaagaagcacgccgacagcgtggccgagctgggcgagcagatcgacaacctgcagagagtgaagcagaagctggagaaggagaagagcgagttcaagctggagatcgacgacctgagcagcagcatggagagcgtgagcaagagcaaggccaacctggagaagatctgcagaaccctggaggaccagctgagcgaggccagaggcaagaacgaggagatccagagaagcctgagcgagctgaccacccagaagagcagactgcagaccgaggccggcgagctgagcagacagctggaggagaaggagagcatcgtgagccagctgagcagaagcaagcaggccttcacccagcagaccgaggagctgaagagacagctggaggaggagaacaaggccaagaacgccctggcccacgccctgcagagcagcagacacgactgcgacctgctgagagagcagtacgaggaggagcaggagggcaaggccgagctgcagagagccctgagcaaggccaacagcgaggtggcccagtggagaaccaagtacgagaccgacgccatccagagaaccgaggagctggaggaggccaagaagaagctggcccagagactgcaggacagcgaggagcaggtggaggccgtgaacgccaagtgcgccagcctggagaagaccaagcagagactgcagggcgaggtggaggacctgatggtggacgtggagagagccaacagcctggccgccgccctggacaagaagcagagaaacttcgacaaggtgctggccgagtggaagaccaagtgcgaggagagccaggccgagctggaggccagcctgaaggagagcagaagcctgagcaccgagctgttcaagctgaagaacgcctacgaggaggccctggaccagctggagaccgtgaagagagagaacaagaacctggagcaggagatcgccgacctgaccgagcagatcgccgagaacggcaagaccatccacgagctggagaagagcagaaagcagatcgagctggagaaggccgacatccagctggccctggaggaggccgaggccgccctggagcacgaggaggccaagatcctgagaatccagctggagctgacccaggtgaagagcgagatcgacagaaagatcgccgagaaggacgaggagatcgagcagctgaagagaaactaccagagaaccgtggagaccatgcagagcgccctggacgccgaggtgagaagcagaaacgaggccatcagactgaagaagaagatggagggcgacctgaacgagatcgagatccagctgagccacgccaacagacaggccgccgagaccctgaagcacctgagaagcgtgcagggccagctgaaggacacccagctgcacctggacgacgccctgagaggccaggaggacctgaaggagcagctggccatcgtggagagaagagccaacctgctgcaggccgaggtggaggagctgagagccaccctggagcagaccgagagagccagaaagctggccgagcaggagctgctggacagcaacgagagagtgcagctgctgcacacccagaacaccagcctgatccacaccaagaagaagctggagaccgacctgatgcagctgcagagcgaggtggaggacgccagcagagacgccagaaacgccgaggagaaggccaagaaggccatcaccgacgccgccatgatggccgaggagctgaagaaggagcaggacaccagcgcccacctggagagaatgaagaagaacctggagcagaccgtgaaggacctgcagcacagactggacgaggccgagcagctggccctgaagggcggcaagaagcagatccagaagctggagaccagaatcagagagctggagttcgagctggagggcgagcagaagaagaacaccgagagcgtgaagggcctgagaaagtacgagagaagagtgaaggagctgacctaccagagcgaggaggacagaaagaacgtgctgagactgcaggacctggtggacaagctgcaggtgaaggtgaagagctacaagagacaggccgaggaggccgacgagcaggccaacgcccacctgaccaagttcagaaaggcccagcacgagctggaggaggccgaggagagagccgacatcgccgagagccaggtgaacaagctgagagccaagaccagagacttcaccagcagcagaatggtggtgcacgagagcgaggagtag

SEQ ID NO: 316773 - DNA, 237 bp, Artificial Sequence
  derived and/or modified sequence
atgggtcagggacaacaagcaatgtgtcacgaggccttaagccacatctgggtaccttttgatctgaagcgatggttgctgtacaccttctgtaattggttcgacgttacctttcagttgcagctgtgtatcctcaggacattgaagcgtttttgccggagcatcctgtacaatctaaaagaccggaagacattttggctgccccaggcctacctgagctttctcttgatacaatag

SEQ ID NO: 316774 - DNA, 228 bp, Artificial Sequence
  derived and/or modified sequence
atgcatatttacttcacggcagagttactgaaaagacgcaacgctaagcctaccttctcaatgtcctccatgcaggctgccagatccattcccaaatctatgaatgtgcacagcatgccctccttcctctattcttcgtgttcatcaacaaatatgtggtggttgaagaattgctgcagcttctccctggtgaagttgatgcactcatgcagtcgcctgctcaattag

SEQ ID NO: 316775 - DNA, 7762 bp, Artificial Sequence
  derived and/or modified sequence
agcagtgctaaaggagcccggcggaggcagcggtgggtttgggactgaggcgctggatctgtggtcgcggctggggacgtgcgcccgcgccaccatcttcggctgaagaggcaattgcttttggatcgttccatttacaatggcgcagagaactggactcgaggatccagagaggtatctctttgtggacagggctgtcatctacaaccctgccactcaagctgattggacagctaaaaagctagtgtggattccatcagaacgccatggttttgaggcagctagtatcaaagaagaacggggagatgaagttatggtggagttggcagagaatggaaagaaagcaatggtcaacaaagatgatattcagaagatgaacccacctaagttttccaaggtggaggatatggcagaattgacatgcttgaatgaagcttccgttttacataatctgaaggatcgctactattcaggactaatctatacttattctggactcttctgtgtagttataaacccttacaagaatcttccaatttactctgagaatattattgaaatgtacagagggaagaagcgtcatgagatgcctccacacatctatgctatatctgaatctgcttacagatgcatgcttcaagatcgtgaggaccagtcaattctttgcacgggtgagtcaggtgctgggaagacagaaaatacaaagaaagttattcagtaccttgcccatgttgcttcttcacataaaggaagaaaggaccataatattcctcaggaatcgcctaaaccagtgaaacaccagggggaacttgaacggcagcttttgcaagcaaatccaattctggaatcatttggaaatgcgaagactgtgaaaaatgataactcatctcgttttggcaaatttattcggatcaactttgatgtaactggctatatcgttggggccaacattgaaacataccttctggaaaagtctcgtgctgttcgtcaagcaaaagatgaacgtacttttcatatcttttaccagttgttatctggagcaggagaacacctaaagtctgatttgcttcttgaaggatttaataactacaggtttctctccaatggctatattcctattccgggacagcaagacaaagataatttccaggagaccatggaagcaatgcacataatgggcttctcccatgaagagattctgtcaatgcttaaagtagtatcttcagtgctacagtttggaaatatttctttcaaaaaggagagaaatactgatcaagcttccatgccagaaaatacagttgcgcagaagctctgccatcttcttgggatgaatgtgatggagtttactcgggccatcctgactccccggatcaaggtcggccgagactatgtgcaaaaagcccagaccaaagaacaggcagattttgcagtagaagcattggcaaaagctacctatgagcggctctttcgctggctcgttcatcgcatcaataaagctctggataggaccaaacgtcagggagcatctttcattggaatcctggatattgctggatttgaaatttttgagctgaactcctttgaacaactttgcatcaactacaccaatgagaagctgcagcagctgttcaaccacaccatgtttatcctagaacaagaggaataccagcgcgaaggcatcgagtggaacttcatcgatttcgggctggatctgcagccatgcatcgacctaatagagagacctgcgaaccctcctggtgtactggcccttttggatgaagaatgctggttccctaaagccacagataaaacctttgttgaaaaactggttcaagagcaaggttcccactccaagtttcagaaacctcgacaattaaaagacaaagctgatttttgcattatacattatgcagggaaggtggactataaggcagatgagtggctgatgaagaatatggaccccctgaatgacaacgtggccacccttttgcaccagtcatcagacagatttgtggcagagctttggaaagatgagattcagaatattcagagagcttctttctatgacagtgtttctggtcttcatgagccaccagtggaccgtatcgtgggtctggatcaagtcactggtatgactgagacagcttttggctccgcatataaaaccaagaagggcatgtttcgtaccgttgggcaactctacaaagaatctctcaccaagctgatggcaactctccgaaacaccaaccctaactttgttcgttgtatcattccaaatcacgagaagagggctggaaaattggatccacacctagtcctagatcagcttcgctgtaacggtgtcctggaagggatccgaatctgtcgccagggcttccctaaccgaatagttttccaggaattcagacagagatatgagatcctaactccaaatgctattcctaaaggttttatggatggtaaacaggcctgtgaacgaatgatccgggctttagaattggacccaaacttgtacagaattggacagagcaagatatttttcagagctggagttctggcacacttagaggaagaaagagatttaaaaatcaccgatatcattatcttcttccaggccgtttgcagaggttacctggccagaaaggcctttgccaagaagcagcagcaactaagtgccttaaaggtcttgcagcggaactgtgccgcgtacctgaaattacggcactggcagtggtggcgagtcttcacaaaggtgaagccgcttctacaagtgactcgccaggaggaagaacttcaggccaaagatgaagagctgttgaaggtgaaggagaagcagacgaaggtggaaggagagctggaggagatggagcggaagcaccagcagcttttagaagagaagaatatccttgcagaacaactacaagcagagactgagctctttgctgaagcagaagagatgagggcaagacttgctgctaaaaagcaggaattagaagagattctacatgacttggagtctagggttgaagaagaagaagaaagaaaccaaatcctccaaaatgaaaagaaaaaaatgcaagcacatattcaggacctggaagaacagctagacgaggaggaaggggctcggcaaaagctgcagctggaaaaggtgacagcagaggccaagatcaagaagatggaagaggagattctgcttctcgaggaccaaaattccaagttcatcaaagaaaagaaactcatggaagatcgcattgctgagtgttcctctcagctggctgaagaggaagaaaaggcgaaaaacttggccaaaatcaggaataagcaagaagtgatgatctcagatttagaagaacgcttaaagaaggaagaaaagactcgtcaggaactggaaaaggccaaaagaaaactcgacggggagacgaccgacctgcaggaccagatcgcagagctgcaggcgcagattgatgagctcaagctgcagctggccaagaaggaggaggagctgcagggcgcactggccagaggtgatgatgaaacactccataagaacaatgcccttaaagttgtgcgagagctacaagcccaaattgctgaacttcaggaagactttgaatccgagaaggcttcacggaacaaggccgaaaagcagaaaagggacttgagtgaggaactggaagctctgaaaacagagctggaggacacgctggacaccacggcagcccagcaggaactacgtacaaaacgtgaacaagaagtggcagagctgaagaaagctcttgaggaggaaactaagaaccatgaagctcaaatccaggacatgagacaaagacacgcaacagccctggaggagctctcagagcagctggaacaggccaagcggttcaaagcaaatctagagaagaacaagcagggcctggagacagataacaaggagctggcgtgtgaggtgaaggtcctgcagcaggtcaaggctgagtctgagcacaagaggaagaagctcgacgcgcaggtccaggagctccatgccaaggtctctgaaggcgacaggctcagggtggagctggcggagaaagcaagtaagctgcagaatgagctagataatgtctccacccttctggaagaagcagagaagaagggtattaaatttgctaaggatgcagctagtcttgagtctcaactacaggatacacaggagcttcttcaggaggagacacgccagaaactaaacctgagcagtcggatccggcagctggaagaggagaagaacagtcttcaggagcagcaggaggaggaggaggaggccaggaagaacctggagaagcaagtgctggccctgcagtcccagttggctgataccaagaagaaagtagatgacgacctgggaacaattgaaagtctggaagaagccaagaagaagcttctgaaggacgcggaggccctgagccagcgcctggaggagaaggcactggcgtatgacaaactggagaagaccaagaaccgcctgcagcaggagctggacgacctcacggtggacctggaccaccagcgccaggtcgcctccaacttggagaagaagcagaagaagtttgaccagctgttagcagaagagaagagcatctctgctcgctatgccgaagagcgggaccgggccgaagccgaggccagagagaaagaaaccaaagccctgtcactggcccgggccctcgaggaagccctggaggccaaggaggagtttgagaggcagaacaagcagctccgagcagacatggaagacctcatgagctccaaagatgatgtgggaaaaaacgttcacgaacttgaaaaatccaaacgggccctagagcagcaggtggaggaaatgaggacccagctggaggagctggaagacgaactccaggccacggaagatgccaagcttcgtctggaggtcaacatgcaggccatgaaggcgcagttcgagagagacctgcaaaccagggatgagcagaatgaagagaagaagcggctgctgatcaaacaggtgcgggagctcgaggcggagctggaggatgagaggaaacagcgggcgcttgctgtagcttcaaagaaaaagatggagatagacctgaaggacctcgaagcccaaatcgaggctgcgaacaaagctcgggatgaggtgattaagcagctccgcaagctccaggctcagatgaaggattaccaacgtgaattagaagaagctcgtgcatccagagatgagatttttgctcaatccaaagagagtgaaaagaaattgaagagtctggaagcagaaatccttcaattgcaggaggaacttgcctcatctgagcgagcccgccgacacgccgagcaggagagagatgagctggcggacgagatcaccaacagcgcctctggcaagtccgcgctgctggatgagaagcggcgtctggaagctcggatcgcacagctggaggaggagctggaagaggagcagagcaacatggagctgctcaacgaccgcttccgcaagaccactctacaggtggacacactgaacgccgagctagcagccgagcgcagcgccgcccagaagagtgacaatgcacgccagcaactggagcggcagaacaaggagctgaaggccaagctgcaggaactcgagggtgctgtcaagtctaagttcaaggccaccatctcagccctggaggccaagattgggcagctggaggagcagcttgagcaggaagccaaggaacgagcagccgccaacaaattagtccgtcgcactgagaagaagctgaaagaaatcttcatgcaggttgaggatgagcgtcgacacgcggaccagtataaagagcagatggagaaggccaacgctcggatgaagcagcttaaacgccagctggaggaagcagaagaagaagcgacgcgtgccaacgcatctcggcgtaaactccagcgggaactggatgatgccaccgaggccaacgagggcctgagccgcgaggtcagcaccctgaagaaccggctgaggcggggtggccccatcagcttctcttccagccgatctggccggcgccagctgcaccttgaaggagcttccctggagctctccgacgatgacacagaaagtaagaccagtgatgtcaacgagacgcagccaccccagtcagagtaaagttgcaggaagccagaggaggcaatacagtgggacagttaggaatgcacccggggcctcctgcagatttcggaaattggcaagctacgggattccttcctgaaagatcaactgtgtcttaaggctctccagcctatgcatactgtatcctgcttcagacttaggtacaattgctcccctttttatatatagacacacacaggacacatatattaaacagattgtttcatcattgcatctattttccatatagtcatcaagagaccattttataaaacatggtaagaccctttttaaaacaaactccaggcccttggttgcgggtcgctgggttattggggcagcgccgtggtcgtcactcagtcgctctgcatgctctctgtcatacagacaggtaacctagttctgtgttcacgtggcccccgactcctcagccacatcaagtctcctagaccactgtggactctaaactgcacttgtctctctcatttccttcaaataatgatcaatgctatttcagtgagcaaactgtgaaaggggctttggaaagagtaggaggggtgggctggatcggaagcaacacccatttggggttaccatgtccatcccccaaggggggccctgcccctcgagtcgatggtgtcccgcatctactcatgtgaactggccttggcgagggctggtctgtgcatagaagggatagtggccacactgcagctgaggccccaggtggcagccatggatcatgtagacttccagatggtctcccgaaccgcctggctctgccggcgccctcctcacgtcaggagcaagcagccgtggacccctaagccgagctggtggaaggcccctccccatcgccagccgggccctcatgctgaccttgcaaattcagccgctgctttgagcccaaaatgggaatattggttttgtgtccgaggcttgttccaagtttgtcaatgaggtttatggagcctccagaacagatgccatcttcctgaatgttgacatgccagtgggtgtgactccttcatttttccttctcccttccctttggacagtgttacagtgaacacttagcatcctgtttttggttggtagttaagcaaactgacattacggaaagtgccttagacactacagtactaagacaatgttgaatatatcattcgcctctataacaatttaatgtattcagttttgactgtgcttcatatcatgtacctctctagtcaaagtggtattacagacattcagtgacaatgaatcagtgttaattctaaatccttgatcctctgcaatgtgcttgaaaacacaaaccttttgggttaaaagctttaacatctattaggaagaatttgtcctgtgggtttggaatcttggattttccccctttatgaactgtactggctgttgaccaccagacacctgaccgcaaatatcttttcttgtattcccatatttctagacaatgatttttgtaagacaataaatttattcattatagatatttgcgcctgctctgtttacttgaagaaaaaagcacccgtggagaataaagagacctcaataaacaagaataatcatgtgaacgtggaa

SEQ ID NO: 316776 - protein, 1997 aa, Artificial Sequence
  derived and/or modified sequence
MAQRTGLEDPERYLFVDRAVIYNPATQADWTAKKLVWIPSERHGFEAASIKEERGDEVMVELAENGKKAMVNKDDIQKMNPPKFSKVEDMAELTCLNEASVLHNLKDRYYSGLIYTYSGLFCVVINPYKNLPIYSENIIEMYRGKKRHEMPPHIYAISESAYRCMLQDREDQSILCTGESGAGKTENTKKVIQYLAHVASSHKGRKDHNIPGELERQLLQANPILESFGNAKTVKNDNSSRFGKFIRINFDVTGYIVGANIETYLLEKSRAVRQAKDERTFHIFYQLLSGAGEHLKSDLLLEGFNNYRFLSNGYIPIPGQQDKDNFQETMEAMHIMGFSHEEILSMLKVVSSVLQFGNISFKKERNTDQASMPENTVAQKLCHLLGMNVMEFTRAILTPRIKVGRDYVQKAQTKEQADFAVEALAKATYERLFRWLVHRINKALDRTKRQGASFIGILDIAGFEIFELNSFEQLCINYTNEKLQQLFNHTMFILEQEEYQREGIEWNFIDFGLDLQPCIDLIERPANPPGVLALLDEECWFPKATDKTFVEKLVQEQGSHSKFQKPRQLKDKADFCIIHYAGKVDYKADEWLMKNMDPLNDNVATLLHQSSDRFVAELWKDEIQNIQRASFYDSVSGLHEPPVDRIVGLDQVTGMTETAFGSAYKTKKGMFRTVGQLYKESLTKLMATLRNTNPNFVRCIIPNHEKRAGKLDPHLVLDQLRCNGVLEGIRICRQGFPNRIVFQEFRQRYEILTPNAIPKGFMDGKQACERMIRALELDPNLYRIGQSKIFFRAGVLAHLEEERDLKITDIIIFFQAVCRGYLARKAFAKKQQQLSALKVLQRNCAAYLKLRHWQWWRVFTKVKPLLQVTRQEEELQAKDEELLKVKEKQTKVEGELEEMERKHQQLLEEKNILAEQLQAETELFAEAEEMRARLAAKKQELEEILHDLESRVEEEEERNQILQNEKKKMQAHIQDLEEQLDEEEGARQKLQLEKVTAEAKIKKMEEEILLLEDQNSKFIKEKKLMEDRIAECSSQLAEEEEKAKNLAKIRNKQEVMISDLEERLKKEEKTRQELEKAKRKLDGETTDLQDQIAELQAQIDELKLQLAKKEEELQGALARGDDETLHKNNALKVVRELQAQIAELQEDFESEKASRNKAEKQKRDLSEELEALKTELEDTLDTTAAQQELRTKREQEVAELKKALEEETKNHEAQIQDMRQRHATALEELSEQLEQAKRFKANLEKNKQGLETDNKELACEVKVLQQVKAESEHKRKKLDAQVQELHAKVSEGDRLRVELAEKASKLQNELDNVSTLLEEAEKKGIKFAKDAASLESQLQDTQELLQEETRQKLNLSSRIRQLEEEKNSLQEQQEEEEEARKNLEKQVLALQSQLADTKKKVDDDLGTIESLEEAKKKLLKDAEALSQRLEEKALAYDKLEKTKNRLQQELDDLTVDLDHQRQVASNLEKKQKKFDQLLAEEKSISARYAEERDRAEAEAREKETKALSLARALEEALEAKEEFERQNKQLRADMEDLMSSKDDVGKNVHELEKSKRALEQQVEEMRTQLEELEDELQATEDAKLRLEVNMQAMKAQFERDLQTRDEQNEEKKRLLIKQVRELEAELEDERKQRALAVASKKKMEIDLKDLEAQIEAANKARDEVIKQLRKLQAQMKDYQRELEEARASRDEIFAQSKESEKKLKSLEAEILQLQEELASSERARRHAEQERDELADEITNSASGKSALLDEKRRLEARIAQLEEELEEEQSNMELLNDRFRKTTLQVDTLNAELAAERSAAQKSDNARQQLERQNKELKAKLQELEGAVKSKFKATISALEAKIGQLEEQLEQEAKERAAANKLVRRTEKKLKEIFMQVEDERRHADQYKEQMEKANARMKQLKRQLEEAEEEATRANASRRKLQRELDDATEANEGLSREVSTLKNRLRRGGPISFSSSRSGRRQLHLEGASLELSDDDTESKTSDVNETQPPQSE

SEQ ID NO: 316777 - DNA, 5994 bp, Artificial Sequence
  derived and/or modified sequence
atggcccagagaaccggcctggaggaccccgagagatacctgttcgtggacagagccgtgatctacaaccccgccacccaggccgactggaccgccaagaagctggtgtggatccccagcgagagacacggcttcgaggccgccagcatcaaggaggagagaggcgacgaggtgatggtggagctggccgagaacggcaagaaggccatggtgaacaaggacgacatccagaagatgaacccccccaagttcagcaaggtggaggacatggccgagctgacctgcctgaacgaggccagcgtgctgcacaacctgaaggacagatactacagcggcctgatctacacctacagcggcctgttctgcgtggtgatcaacccctacaagaacctgcccatctacagcgagaacatcatcgagatgtacagaggcaagaagagacacgagatgcccccccacatctacgccatcagcgagagcgcctacagatgcatgctgcaggacagagaggaccagagcatcctgtgcaccggcgagagcggcgccggcaagaccgagaacaccaagaaggtgatccagtacctggcccacgtggccagcagccacaagggcagaaaggaccacaacatccccggcgagctggagagacagctgctgcaggccaaccccatcctggagagcttcggcaacgccaagaccgtgaagaacgacaacagcagcagattcggcaagttcatcagaatcaacttcgacgtgaccggctacatcgtgggcgccaacatcgagacctacctgctggagaagagcagagccgtgagacaggccaaggacgagagaaccttccacatcttctaccagctgctgagcggcgccggcgagcacctgaagagcgacctgctgctggagggcttcaacaactacagattcctgagcaacggctacatccccatccccggccagcaggacaaggacaacttccaggagaccatggaggccatgcacatcatgggcttcagccacgaggagatcctgagcatgctgaaggtggtgagcagcgtgctgcagttcggcaacatcagcttcaagaaggagagaaacaccgaccaggccagcatgcccgagaacaccgtggcccagaagctgtgccacctgctgggcatgaacgtgatggagttcaccagagccatcctgacccccagaatcaaggtgggcagagactacgtgcagaaggcccagaccaaggagcaggccgacttcgccgtggaggccctggccaaggccacctacgagagactgttcagatggctggtgcacagaatcaacaaggccctggacagaaccaagagacagggcgccagcttcatcggcatcctggacatcgccggcttcgagatcttcgagctgaacagcttcgagcagctgtgcatcaactacaccaacgagaagctgcagcagctgttcaaccacaccatgttcatcctggagcaggaggagtaccagagagagggcatcgagtggaacttcatcgacttcggcctggacctgcagccctgcatcgacctgatcgagagacccgccaacccccccggcgtgctggccctgctggacgaggagtgctggttccccaaggccaccgacaagaccttcgtggagaagctggtgcaggagcagggcagccacagcaagttccagaagcccagacagctgaaggacaaggccgacttctgcatcatccactacgccggcaaggtggactacaaggccgacgagtggctgatgaagaacatggaccccctgaacgacaacgtggccaccctgctgcaccagagcagcgacagattcgtggccgagctgtggaaggacgagatccagaacatccagagagccagcttctacgacagcgtgagcggcctgcacgagccccccgtggacagaatcgtgggcctggaccaggtgaccggcatgaccgagaccgccttcggcagcgcctacaagaccaagaagggcatgttcagaaccgtgggccagctgtacaaggagagcctgaccaagctgatggccaccctgagaaacaccaaccccaacttcgtgagatgcatcatccccaaccacgagaagagagccggcaagctggacccccacctggtgctggaccagctgagatgcaacggcgtgctggagggcatcagaatctgcagacagggcttccccaacagaatcgtgttccaggagttcagacagagatacgagatcctgacccccaacgccatccccaagggcttcatggacggcaagcaggcctgcgagagaatgatcagagccctggagctggaccccaacctgtacagaatcggccagagcaagatcttcttcagagccggcgtgctggcccacctggaggaggagagagacctgaagatcaccgacatcatcatcttcttccaggccgtgtgcagaggctacctggccagaaaggccttcgccaagaagcagcagcagctgagcgccctgaaggtgctgcagagaaactgcgccgcctacctgaagctgagacactggcagtggtggagagtgttcaccaaggtgaagcccctgctgcaggtgaccagacaggaggaggagctgcaggccaaggacgaggagctgctgaaggtgaaggagaagcagaccaaggtggagggcgagctggaggagatggagagaaagcaccagcagctgctggaggagaagaacatcctggccgagcagctgcaggccgagaccgagctgttcgccgaggccgaggagatgagagccagactggccgccaagaagcaggagctggaggagatcctgcacgacctggagagcagagtggaggaggaggaggagagaaaccagatcctgcagaacgagaagaagaagatgcaggcccacatccaggacctggaggagcagctggacgaggaggagggcgccagacagaagctgcagctggagaaggtgaccgccgaggccaagatcaagaagatggaggaggagatcctgctgctggaggaccagaacagcaagttcatcaaggagaagaagctgatggaggacagaatcgccgagtgcagcagccagctggccgaggaggaggagaaggccaagaacctggccaagatcagaaacaagcaggaggtgatgatcagcgacctggaggagagactgaagaaggaggagaagaccagacaggagctggagaaggccaagagaaagctggacggcgagaccaccgacctgcaggaccagatcgccgagctgcaggcccagatcgacgagctgaagctgcagctggccaagaaggaggaggagctgcagggcgccctggccagaggcgacgacgagaccctgcacaagaacaacgccctgaaggtggtgagagagctgcaggcccagatcgccgagctgcaggaggacttcgagagcgagaaggccagcagaaacaaggccgagaagcagaagagagacctgagcgaggagctggaggccctgaagaccgagctggaggacaccctggacaccaccgccgcccagcaggagctgagaaccaagagagagcaggaggtggccgagctgaagaaggccctggaggaggagaccaagaaccacgaggcccagatccaggacatgagacagagacacgccaccgccctggaggagctgagcgagcagctggagcaggccaagagattcaaggccaacctggagaagaacaagcagggcctggagaccgacaacaaggagctggcctgcgaggtgaaggtgctgcagcaggtgaaggccgagagcgagcacaagagaaagaagctggacgcccaggtgcaggagctgcacgccaaggtgagcgagggcgacagactgagagtggagctggccgagaaggccagcaagctgcagaacgagctggacaacgtgagcaccctgctggaggaggccgagaagaagggcatcaagttcgccaaggacgccgccagcctggagagccagctgcaggacacccaggagctgctgcaggaggagaccagacagaagctgaacctgagcagcagaatcagacagctggaggaggagaagaacagcctgcaggagcagcaggaggaggaggaggaggccagaaagaacctggagaagcaggtgctggccctgcagagccagctggccgacaccaagaagaaggtggacgacgacctgggcaccatcgagagcctggaggaggccaagaagaagctgctgaaggacgccgaggccctgagccagagactggaggagaaggccctggcctacgacaagctggagaagaccaagaacagactgcagcaggagctggacgacctgaccgtggacctggaccaccagagacaggtggccagcaacctggagaagaagcagaagaagttcgaccagctgctggccgaggagaagagcatcagcgccagatacgccgaggagagagacagagccgaggccgaggccagagagaaggagaccaaggccctgagcctggccagagccctggaggaggccctggaggccaaggaggagttcgagagacagaacaagcagctgagagccgacatggaggacctgatgagcagcaaggacgacgtgggcaagaacgtgcacgagctggagaagagcaagagagccctggagcagcaggtggaggagatgagaacccagctggaggagctggaggacgagctgcaggccaccgaggacgccaagctgagactggaggtgaacatgcaggccatgaaggcccagttcgagagagacctgcagaccagagacgagcagaacgaggagaagaagagactgctgatcaagcaggtgagagagctggaggccgagctggaggacgagagaaagcagagagccctggccgtggccagcaagaagaagatggagatcgacctgaaggacctggaggcccagatcgaggccgccaacaaggccagagacgaggtgatcaagcagctgagaaagctgcaggcccagatgaaggactaccagagagagctggaggaggccagagccagcagagacgagatcttcgcccagagcaaggagagcgagaagaagctgaagagcctggaggccgagatcctgcagctgcaggaggagctggccagcagcgagagagccagaagacacgccgagcaggagagagacgagctggccgacgagatcaccaacagcgccagcggcaagagcgccctgctggacgagaagagaagactggaggccagaatcgcccagctggaggaggagctggaggaggagcagagcaacatggagctgctgaacgacagattcagaaagaccaccctgcaggtggacaccctgaacgccgagctggccgccgagagaagcgccgcccagaagagcgacaacgccagacagcagctggagagacagaacaaggagctgaaggccaagctgcaggagctggagggcgccgtgaagagcaagttcaaggccaccatcagcgccctggaggccaagatcggccagctggaggagcagctggagcaggaggccaaggagagagccgccgccaacaagctggtgagaagaaccgagaagaagctgaaggagatcttcatgcaggtggaggacgagagaagacacgccgaccagtacaaggagcagatggagaaggccaacgccagaatgaagcagctgaagagacagctggaggaggccgaggaggaggccaccagagccaacgccagcagaagaaagctgcagagagagctggacgacgccaccgaggccaacgagggcctgagcagagaggtgagcaccctgaagaacagactgagaagaggcggccccatcagcttcagcagcagcagaagcggcagaagacagctgcacctggagggcgccagcctggagctgagcgacgacgacaccgagagcaagaccagcgacgtgaacgagacccagcccccccagagcgagtag

SEQ ID NO: 316778 - DNA, 5994 bp, Artificial Sequence
  derived and/or modified sequence
atggcccagcggactggactggaggacccagaaaggtacctgtttgttgacagggctgtgatctataatccagccacacaggcagactggacagctaagaaacttgtgtggatcccctccgagcggcatggctttgaggccgcctctataaaggaagaacgaggggacgaggtgatggttgagctggctgagaacggtaagaaagccatggttaataaggatgatattcagaaaatgaaccctccaaagtttagcaaggtcgaggacatggccgagctgacgtgccttaacgaagctagcgtgctgcacaatctgaaggatcggtattatagcgggctcatatacacatactcaggtctgttctgcgtcgtaattaatccctataagaacctaccaatttactcagagaacatcattgagatgtacagaggcaagaaaagacacgaaatgccccctcacatatacgcaatctcggagagtgcctatcgttgtatgcttcaggatcgagaagaccagtccattttgtgcacaggcgaatccggagcaggaaaaaccgaaaataccaagaaggtcatacagtatttagcccatgttgcatcaagccataagggacgcaaggatcacaatatccctggagagctcgagcggcagcttctccaggccaatccaattctcgaatcctttggcaatgcaaaaactgtgaagaacgataatagctcaagattcgggaagtttattaggatcaatttcgacgtgaccggctatattgtgggtgctaacattgagacctatcttctggagaagagtcgggccgtgaggcaggcaaaggatgaaaggactttccacatcttttaccaactgttatcaggagcgggtgagcacctgaagagcgatctcctgctggaggggttcaataactaccgatttttgagcaatggttacatccccatcccagggcagcaggataaagataacttccaggagaccatggaggctatgcatatcatgggattttcccatgaggaaatcttgtccatgttgaaagtggtctcatcagtgctgcaattcggcaacatcagctttaaaaaggagaggaacactgatcaggcttcaatgccagaaaacacggtcgctcagaagttgtgtcatctactgggcatgaatgtcatggagtttaccagggcgatcctaacccctcggatcaaggtgggtcgcgattacgtccagaaagcacagaccaaggaacaagccgactttgcggtagaggcgctggcgaaagcaacttatgaaaggctctttagatggctggtacacagaataaataaggcattggataggaccaagagacagggcgcttccttcattgggatcctcgacatcgctgggttcgaaatttttgagctgaacagttttgagcaactctgtattaactatacgaatgagaagctccagcaacttttcaaccacacgatgttcattctggagcaggaggagtaccaaagagaaggcattgagtggaatttcattgatttcggtctggatctgcaaccctgtattgacctgattgaacgtcccgcaaacccccctggagtgttggcgttgctggacgaggaatgctggtttccaaaggccacggacaagacattcgtcgaaaagctcgtacaggagcaggggagtcattccaaatttcagaagcctcggcaacttaaggataaggctgacttttgtattattcattatgcagggaaggtagactataaggccgacgaatggctgatgaagaatatggatccactcaatgataacgtggccactttgctgcaccagtcctcggatagattcgtggcagaactgtggaaagatgagatacaaaacatacagcgggcgtcattctacgacagcgtaagtggactgcacgagccacctgttgacaggattgttggcctagaccaggtcacaggtatgaccgagaccgccttcggatcggcttacaagactaagaaaggaatgttccgcaccgtgggacaactttacaaggagtcacttaccaagctgatggctacattgcgcaataccaaccccaactttgtacggtgtatcatccccaaccatgaaaaacgggccgggaagttggatccacacctagtgctggaccaattacgatgcaacggagttctcgaagggattcgcatttgtaggcaggggttcccaaatcggattgtgttccaggaattcaggcagcgttatgagatacttactccaaatgccatccctaagggctttatggatggcaagcaggcctgtgagaggatgataagggccctggaactggaccctaacctctatcggatcggacagagtaagatcttctttagagctggtgtccttgcccatctggaggaagagcgagatctaaaaattactgatatcattattttttttcaagctgtttgtcgggggtacctcgcacgaaaggcattcgcaaaaaagcaacagcagctttcagctctaaaagtattacagcgtaattgtgccgcttacctcaaacttaggcattggcagtggtggagagtgtttactaaagtgaagcccctcctgcaggtgacaagacaggaagaggagcttcaggccaaagatgaggaactgctgaaggttaaggaaaaacagactaaggtggaaggagaactagaggagatggagagaaaacaccagcagctgctggaagagaaaaacatcctggccgaacagttgcaagctgaaacggagctgtttgctgaggccgaagagatgcgggctcgacttgcagccaaaaagcaggagctggaagagatactacatgacctggagtcaagagtggaggaagaagaggaacgtaaccagattctccaaaacgagaagaaaaaaatgcaggcccatatccaagatctcgaggaacagctggatgaggaggagggtgctcgacagaagctgcaactggaaaaggttacagccgaggccaagattaagaagatggaggaggagattctgctattagaggatcagaacagcaaattcatcaaggaaaaaaagctgatggaagacagaatcgcggaatgtagttctcagttagcggaagaggaggagaaagccaaaaacttggcaaaaattcggaacaagcaggaggtaatgatctctgacttggaagaaaggctaaaaaaggaggagaagactcggcaggaactcgaaaaagccaagcgtaagcttgatggtgagaccacggacctccaggaccagatcgccgaattacaggcgcagatcgacgaattaaagttacagctagccaagaaggaggaggagttgcagggcgccctggcacgaggggacgatgagactcttcataaaaataatgctctgaaggtggtgcgggagctgcaagcacaaatcgcggagttacaggaggatttcgagagcgaaaaagcttctcgcaacaaagcagaaaagcagaagcgcgacctgtccgaagaactggaggctctgaagaccgagctagaggacacgttggatacaacagcagctcagcaggagctaaggactaaacgtgagcaggaagtcgctgaactcaagaaggcattagaagaagagacaaagaatcacgaggcacagattcaggacatgcggcagaggcacgctaccgccctggaagagctctccgaacagctggaacaggccaagcggtttaaggccaacctggaaaagaacaagcagggcttagaaaccgacaataaagagctggcatgcgaagtgaaagtattgcagcaggtcaaggccgagtcagagcacaaacggaaaaagcttgatgcccaggtgcaagaactgcacgctaaggtgtcggagggtgacaggctgcgagtcgaattggccgaaaaagcttctaaactgcagaatgaactggacaacgttagtacgctcttggaagaggccgagaaaaaaggcatcaagttcgctaaagatgccgcgtccctggagtctcagttacaggacactcaagaacttttacaggaggagaccagacaaaagcttaacctgagtagcaggatcagacagctggaagaagaaaagaactcactgcaggagcagcaggaggaagaggaggaagctcgcaaaaatcttgagaagcaagtgttggctctgcagagccagcttgccgataccaaaaagaaggtagacgatgatctcggcacaatcgagtcacttgaggaggctaagaaaaagttgttgaaggatgccgaagccctgagccagcggctagaagagaaagcccttgcttatgataagctggagaagacaaaaaacagactccaacaggagctcgacgacctgaccgtcgatttggatcatcagaggcaagtagcttctaacttggagaaaaagcagaaaaaatttgaccagctgctggcagaagagaagtctatttccgctcgctacgccgaagagagagaccgagcagaggccgaggcaagagagaaggagaccaaggctctgagcctggcccgcgctctggaagaggccctggaggcaaaggaggagtttgaacgtcagaacaagcagctgcgggcagatatggaagacctgatgtcatccaaggacgatgtaggcaaaaacgtgcacgagctcgagaaaagtaagagagccctggaacaacaagtggaggagatgagaactcaactggaggaactcgaagatgagctgcaggctacggaggatgctaaattgcggctagaggtcaacatgcaggcgatgaaagcccagttcgagagagatctacagacacgggacgaacaaaacgaagaaaagaagcggttacttatcaagcaggtcagggagctggaggcggaactggaggacgaaaggaagcaacgcgctctggccgtagcatctaaaaaaaaaatggagatcgacctgaaggatctggaagctcaaattgaagctgcgaataaggcgagagatgaggtgattaagcaattgaggaagttacaggctcaaatgaaagattatcagcgcgagctggaagaggccagagccagcagggacgaaatctttgctcagtccaaagagagcgaaaagaagctcaagagcctggaggccgaaattctgcagctgcaagaggaacttgcatcgtcagagcgcgcccgaagacacgccgagcaagaacgcgacgagctggccgacgaaattacaaattcagccagcgggaagagcgcgctgctcgatgaaaagcgcaggctcgaggcccgtatcgcacagctcgaagaggagcttgaggaggagcaatcaaacatggaacttttgaatgacagatttcgaaaaacaaccctccaggttgacaccctcaatgccgaacttgccgcggaaaggtccgcagctcaaaagagcgacaacgcccgacagcaactagaaagacaaaacaaggagctcaaagcgaagctccaggagttggagggggcagtaaagagtaaattcaaagccacgataagcgcgctggaagccaaaatcggccaactagaggagcagcttgagcaggaagcaaaggaacgggccgccgcaaacaagctggtgcggcgcactgaaaaaaagttgaaagagatctttatgcaggtcgaggatgaaaggagacacgccgatcaatacaaagagcagatggagaaagcaaatgccaggatgaaacaacttaagagacaactggaagaagccgaagaggaggccacccgagccaatgccagccggcgtaagcttcagagagaactggacgatgccaccgaggccaatgagggactgagtagagaggttagtacgcttaagaaccgtttgcggcgaggtggcccaatcagtttttcaagcagtaggtctgggcgcaggcagctgcacttagaaggggccagtctggagttgagcgatgatgacacggagtccaaaacgtccgacgtcaacgagacacagcctccacaatccgaatag

SEQ ID NO: 316779 - DNA, 5994 bp, Artificial Sequence
  derived and/or modified sequence
atggcccagaggacaggcctggaggaccctgagcgctacctgtttgtggacagagctgtgatctacaacccagccacccaggccgactggacagccaagaagctggtgtggatccccagcgagagacatggctttgaagctgccagcatcaaggaggagagaggagatgaggtgatggtggagctggccgagaatggcaagaaggccatggtgaacaaggatgacatccagaagatgaacccccccaagttcagcaaggtggaggacatggccgagctgacctgcctgaatgaggcctctgtgctgcacaacctgaaggaccgctactacagcggcctcatctacacctacagcggcctcttctgtgtggtgatcaacccctacaagaacctgcccatctacagcgagaacatcatcgagatgtaccggggcaagaagagacatgagatgccaccccacatctatgccatcagcgagagcgcctaccgctgcatgctgcaggaccgggaggaccagagcatcctgtgcacaggagagagcggggccggcaagacagagaacaccaagaaggtgatccagtacctggcccacgtggccagcagccacaagggcaggaaggaccacaacatccctggagagctggagcggcagctgctgcaggccaaccccatcctggagagctttggaaatgccaagacagtgaagaatgacaacagcagcagatttgggaagttcatccgcatcaactttgatgtgacaggctacatcgtgggcgccaacatcgagacctacctgctggagaagagcagagctgtgcggcaggccaaggatgagaggaccttccacatcttctaccagctgctgtctggagctggggagcacctgaagagtgacctgctgctggagggcttcaacaactaccgcttcctgagcaatggctacatccccatccctggccagcaggacaaggacaacttccaggagaccatggaggccatgcacatcatgggcttcagccatgaggagatcctgtccatgctgaaggtggtgtcctctgtgctgcagtttggaaacatctccttcaagaaggagaggaacacagaccaggcctccatgcctgagaacacagtggcccagaagctgtgccacctgctgggcatgaatgtgatggagttcacccgggccatcctgaccccccgcatcaaggtgggccgggactatgtgcagaaggcccagaccaaggagcaggccgactttgctgtggaggccctggccaaggccacctatgagcggctcttccgctggctggtgcaccgcatcaacaaggccctggacaggaccaagaggcagggcgccagcttcatcggcatcctggacattgctggctttgagatctttgagctgaacagctttgagcagctgtgcatcaactacaccaatgagaagctgcagcagctgttcaaccacaccatgttcatcctggagcaggaggagtaccagcgggagggcatcgagtggaacttcatcgactttggcctggacctgcagccctgcatcgacctgattgaaagacctgccaaccccccaggagtgctggccctgctggatgaggagtgctggttccccaaggccacagacaagacctttgtggagaagctggtgcaggagcagggcagccacagcaagttccagaagccccggcagctgaaggacaaggctgacttctgcatcatccactacgccggcaaggtggactacaaggcagatgagtggctgatgaagaacatggaccccctgaatgacaacgtggccaccctgctgcaccagagcagtgacagatttgtggccgagctgtggaaggatgagatccagaacatccagagggccagcttctatgacagcgtgtctggcctgcacgagccccctgtggaccgcatcgtgggcctggaccaggtgacaggcatgacagaaacagccttcggcagcgcctacaagaccaagaagggcatgttcagaacagtgggccagctgtacaaggagagcctgaccaagctgatggccaccctgaggaacaccaaccccaactttgtgcgctgcatcatccccaaccacgagaagagagctgggaagctggacccccacctggtgctggaccagctgcgctgcaatggagtgctggagggcatccgcatctgccggcagggcttccccaaccgcatcgtgttccaggagttccggcagagatatgagatcctgaccccaaatgccatccccaagggcttcatggatggcaagcaggcctgtgagaggatgatccgggccctggagctggaccccaacctgtaccgcatcggccagagcaagatcttcttccgggccggcgtgctggcccacctggaggaggagcgggacctgaagatcacagacatcatcatcttcttccaggccgtgtgccggggctacctggccaggaaggcctttgccaagaagcagcagcagctgagcgccctgaaggtgctgcagaggaactgtgccgcctacctgaagctgcggcactggcagtggtggagggtcttcaccaaggtgaagcccctgctgcaggtgacccggcaggaggaggagctgcaggccaaggatgaggagctgctgaaggtgaaggagaagcagaccaaggtggagggggagctggaggagatggagaggaagcaccagcagctgctggaggagaagaacatcctggccgagcagctgcaggccgagacagagctgtttgctgaggccgaggagatgagggcccggctggccgccaagaagcaggagctggaggagatcctgcatgacctggagagccgggtggaggaggaggaggagaggaaccagatcctgcagaatgagaagaagaagatgcaggcccacatccaggacctggaggagcagctggatgaggaggagggcgcccggcagaagctgcagctggagaaggtgacagctgaggccaagatcaagaagatggaggaggagatcctgctgctggaggaccagaacagcaagttcatcaaggagaagaagctgatggaggacagaattgctgaatgtagcagccagctggccgaggaggaggagaaggccaagaacctggccaagatccggaacaagcaggaggtgatgatcagtgacctggaggagcggctgaagaaggaggagaagacccggcaggagctggagaaggccaagaggaagctggatggagagaccacagacctgcaggaccagattgctgagctgcaggcccagattgatgagctgaagctgcagctggccaagaaggaggaggagctgcagggcgccctggcccggggagatgatgagaccctgcacaagaacaatgccctgaaggtggtgcgggagctgcaggcccagattgctgagctgcaggaggactttgagagcgagaaggccagcaggaacaaggccgagaagcagaagagggacctgtctgaggagctggaggccctgaagacagagctggaggacaccctggacaccacagctgcccagcaggagctgcggaccaagcgggagcaggaggtggccgagctgaagaaggccctggaggaggagaccaagaaccacgaggcccagatccaggacatgaggcagagacatgccacagccctggaggagctgtctgagcagctggagcaggccaagcgcttcaaggccaacctggagaagaacaagcagggcctggagacagacaacaaggagctggcctgtgaggtgaaggtgctgcagcaggtgaaggccgagagcgagcacaagaggaagaagctggatgcccaggtgcaggagctgcacgccaaggtgtctgagggggaccggctgcgggtggagctggccgagaaggccagcaagctgcagaatgagctggacaacgtgtccaccctgctggaggaggccgagaagaagggcatcaagtttgccaaggatgctgccagcctggagagccagctgcaggacacccaggagctgctgcaggaggagacccggcagaagctgaacctgagcagccgcatccggcagctggaggaggagaagaacagcctgcaggagcagcaggaggaggaggaggaggccaggaagaacctggagaagcaggtgctggccctgcagagccagctggccgacaccaagaagaaggtggatgatgacctgggcaccatcgagagcctggaggaggccaagaagaagctgctgaaggatgctgaggccctgagccagaggctggaggagaaggccctggcctatgacaagctggagaagaccaagaaccggctgcagcaggagctggatgacctgactgtggacctggaccaccagaggcaggtggccagcaacctggagaagaagcagaagaagtttgaccagctgctggccgaggagaagagcatcagcgcccgctatgcagaggagcgggacagagctgaggccgaggcccgggagaaggagaccaaggccctgagcctggcccgggccctggaggaggccctggaggccaaggaggagtttgagcggcagaacaagcagctgcgggctgacatggaggacctgatgagcagcaaggatgatgtgggcaagaatgtgcatgagctggagaagagcaagagggccctggagcagcaggtggaggagatgaggacccagctggaggagctggaggatgagctgcaggccacagaagatgccaagctgcggctggaggtgaacatgcaggccatgaaggcccagtttgagcgggacctgcagaccagagatgagcagaatgaggagaagaagaggctgctgatcaagcaggtgcgggagctggaggccgagctggaggatgagaggaagcagagggccctggccgtggccagcaagaagaagatggagattgacctgaaggacctggaggcccagatcgaggccgccaacaaggccagagatgaggtgatcaagcagctgaggaagctgcaggcccagatgaaggactaccagcgggagctggaggaggcccgggccagcagagatgagatctttgcccagagcaaggagagcgagaagaagctgaagagcctggaggccgagatcctgcagctgcaggaggagctggccagcagcgagcgggccaggagacatgctgagcaggagagagatgagctggctgatgagatcaccaacagcgccagcggcaagagcgccctgctggatgagaagaggcggctggaggccagaattgcccagctggaggaggagctggaggaggagcagagcaacatggagctgctgaatgaccgcttcaggaagaccaccctgcaggtggacaccctgaatgctgagctggccgctgagaggtctgctgcccagaagagtgacaatgcccggcagcagctggagcggcagaacaaggagctgaaggccaagctgcaggagctggagggcgctgtgaagagcaagttcaaggccaccatcagcgccctggaggccaagattggccagctggaggagcagctggagcaggaggccaaggagagagctgctgccaacaagctggtgcggaggacagagaagaagctgaaggagatcttcatgcaggtggaggatgaaagaagacatgctgaccagtacaaggagcagatggagaaggccaatgccaggatgaagcagctgaagaggcagctggaggaggccgaggaggaggccacccgggccaatgccagcaggaggaagctgcagcgggagctggatgatgccacagaggccaatgaaggcctgagccgggaggtgtccaccctgaagaaccggctgcggcggggcggccccatctccttcagcagcagccgcagcggccggcggcagctgcacctggagggcgccagcctggagctgagtgatgatgacacagagagcaagaccagtgatgtgaatgagacccagcccccccagagcgagtag

SEQ ID NO: 316780 - DNA, 5994 bp, Artificial Sequence
  derived and/or modified sequence
atggcccagcggaccggcctggaggaccccgagcggtacctgttcgtggaccgcgctgttatttacaaccccgcgacccaagccgactggaccgctaaaaaactggtttggatcccatcggaacggcacggatttgaggccgcctccataaaggaggaaagaggagatgaagtgatggttgagctcgcagaaaatgggaaaaaggccatggttaacaaggacgacatccagaaaatgaatcctcctaagttctccaaggttgaggacatggccgaactgacatgtctcaatgaggcctccgttctgcacaaccttaaagaccgctactactcagggctgatttatacgtatagcggattgttttgcgtagtaatcaacccgtataaaaatctgccgatttatagcgaaaatattatcgaaatgtacagaggcaagaaacggcatgaaatgccgcctcatatttatgccatttctgagtctgcgtacagatgtatgttgcaggacagagaagaccaatcaatactgtgcactggggagtcaggcgccggcaagactgagaacactaaaaaggtcattcagtacttggcacacgtggcctcttcccataaaggtagaaaagaccacaatatcccaggagaattagagagacagctgcttcaggcaaacccaattctcgaatcattcggcaacgcaaagactgtcaaaaatgataacagttcccgcttcggtaagttcataagaatcaattttgacgtgacaggatacattgtgggcgctaatatagagacctaccttctagagaaaagtagggccgtaaggcaggctaaggatgaacgtacctttcacatcttctaccagcttctatccggcgcaggggaacacctgaagtccgatctgctgttagaaggatttaataattataggttcctctccaacgggtacatccccattcctggacagcaagacaaggataatttccaggaaacaatggaagccatgcatatcatggggttttcacacgaggaaatcttgtctatgttaaaggtcgtcagtagcgtattgcagtttggcaacattagctttaagaaagagagaaacactgatcaggccagtatgccagagaacaccgtagcccagaagctgtgccatcttcttggaatgaacgtgatggaattcacccgagccattctgacacccaggatcaaagtgggcagggactatgttcagaaggctcaaacaaaagaacaggccgatttcgcagtggaagcactggccaaagcgacatacgaacgcctgttccgatggttggttcatagaattaacaaggcccttgatcggaccaaacgacaaggggccagcttcattggaatcctcgacattgccggcttcgagatcttcgagctgaacagctttgagcagctgtgtatcaactatactaatgagaaactgcagcaactgtttaaccacacaatgtttatacttgagcaagaggagtatcaacgcgagggcatcgaatggaattttatcgattttggcttggacttgcaaccctgcattgatcttattgaacggcccgctaacccaccgggagtgctcgccctgctcgatgaagaatgttggttcccgaaggcaacagacaagactttcgtggagaagctcgtccaggaacagggctcacacagcaaattccagaagcctagacagctcaaggataaagcagacttttgtatcatccactacgccgggaaggtcgattataaggcggatgagtggctgatgaagaatatggatcccctgaacgataatgtcgccacattgctgcatcagtccagtgataggttcgtagccgaactgtggaaggacgaaattcagaatatccagcgcgctagcttctatgacagcgtttcaggattgcatgagccgccagtcgatcgtatcgtaggtctggaccaagtgactggaatgacagagactgcctttggcagtgcttataaaacaaaaaaaggtatgttccgtacggtgggtcagttgtataaagagagtttaacaaagctcatggccacattacgcaacaccaatccaaacttcgtgcggtgcatcattccaaaccacgagaagagagctggaaaacttgacccacacctcgtgctcgaccaactgagatgcaacggcgtgctggaaggaataagaatttgcaggcaaggatttcccaaccgcatagtgtttcaagagttccggcagagatatgaaatcctcaccccaaatgctattccgaaaggctttatggatggcaagcaggcatgcgagagaatgatccgggcacttgagctggatcctaacctttacagaatcggacagtctaagatcttcttcagggctggcgtactggcacacttggaggaggaaagggacttaaaaattacagatattattatcttcttccaagccgtctgccggggatacctcgcccggaaagcgtttgctaagaaacagcagcagcttagcgctttgaaagtgctccagcgcaactgtgcagcctacctgaagctgcggcattggcagtggtggcgggtgtttacaaaagtgaagccgctccttcaggttactcgtcaggaagaagaattacaagctaaagatgaggaactacttaaagtgaaggagaaacagactaaagtcgaaggagagctggaagagatggagcgaaaacatcagcagctgctggaggaaaagaacatactagccgaacagctgcaagcggagacagagttattcgccgaagctgaagaaatgagggcgaggttagctgcaaagaagcaggaactggaggagattctacacgaccttgagtcacgtgtggaggaagaggaagaacggaaccagattttacagaacgagaaaaagaagatgcaggcccacatacaggatctggaggagcagttagacgaggaggagggtgcaaggcaaaagctccagctggaaaaggtcacagccgaagcaaaaattaaaaagatggaagaagagatcttgcttttggaggaccagaatagcaagttcatcaaagagaaaaagttaatggaagatcggatcgccgagtgcagttcccagctggccgaagaggaggagaaggccaagaatctggccaaaattaggaacaaacaagaagtgatgatcagtgacctggaggagaggctgaaaaaggaagagaaaacacgccaggaactggagaaagctaagcgaaagctggatggggaaactaccgacttacaggatcagatcgccgaactgcaggcacagatcgacgaattgaagctccagctggcaaaaaaggaagaggagctgcagggggctttggcccggggggacgacgagacgctgcacaaaaacaatgccttgaaagtcgtaagagaacttcaagcacaaatcgcggagctccaggaagattttgaaagcgagaaggcaagcagaaataaggccgagaagcagaaacgggatttgtccgaagagctcgaagctctaaagaccgagctggaggacacgcttgatactactgccgcccagcaagagcttcggacgaagcgggagcaagaggtggcagaacttaagaaggccctggaagaagaaaccaaaaaccacgaggcgcagattcaggatatgcgccagcgacacgccactgccctggaagaactctccgagcagctcgagcaggcaaaacggtttaaagcaaatttggaaaagaataagcagggactagagacagacaacaaggaactggcctgtgaggtgaaggtcctacagcaggtgaaagcggagtcagagcataagcggaagaagttagatgctcaggtgcaggaactgcacgcaaaagttagcgagggggatcggttgcgagtggaactcgccgaaaaagcgagtaagctgcagaatgaactggataatgtatctaccctgttggaggaggcagagaaaaagggaattaagtttgcaaaggatgccgccagcctcgaatcgcagctgcaggatacacaggagctgctacaggaggaaacccggcagaaactcaatctcagctcccggattagacagttagaggaagagaagaacagcctgcaggagcagcaagaggaagaggaagaggccaggaagaatcttgaaaaacaggtcctggctctccagtcccagctggccgataccaaaaaaaaggtggatgatgatctcggcactattgaatcattggaggaggccaagaaaaaacttctgaaggatgccgaagccttgtcccaacgcttggaagagaaagctttggcttatgacaagttggagaagacaaaaaaccgcctccaacaggagctggacgatttaacagtcgatctcgaccatcaaagacaggttgcctcgaatctcgagaagaagcagaaaaaatttgatcagttgctcgccgaggagaagtccattagcgctaggtacgcagaggagcgcgatcgggctgaggcagaggctcgagaaaaagagactaaggccctcagcttagccagggccttggaggaagcccttgaggccaaagaggaatttgagagacagaacaagcaactgagggcagacatggaagacttaatgtcaagcaaagacgacgtgggcaaaaacgtgcatgagctggaaaagagtaaaagagccttggaacagcaggtggaggagatgcgcactcaacttgaggagctggaagacgagctccaggctaccgaggacgctaaactgagactggaggttaatatgcaggccatgaaggctcagttcgaacgtgacctacagactcgcgatgagcagaatgaagaaaaaaagcggttattaattaaacaggtgagagagctcgaggctgagctcgaagatgagcgcaagcaacgcgctcttgcggtagcctccaagaaaaagatggagattgacttgaaagacctggaagcacaaatagaggcagccaataaggctagggatgaggtgatcaaacagctgcgcaagctgcaggcccagatgaaggactaccaacgcgaactggaagaagcgagagcatcaagagatgaaatcttcgcccagagcaaggaaagcgaaaaaaagcttaaatctctggaggctgagatccttcagttgcaggaagaactggcgagctctgagagagccagacgacacgccgagcaggaacgagacgaactcgccgacgagattactaatagtgcatcaggaaagagcgcattactagatgagaaacgtcggcttgaggcacggatcgcacagcttgaagaggaactcgaggaggagcagagtaatatggaactactcaatgacaggtttcggaaaaccacccttcaggtggacacactgaatgctgaactggcggcagagcgatctgcggctcaaaaaagcgataacgcccgacagcagctagagcgccagaacaaagaactgaaagccaaattgcaggagctcgagggagcagttaagtctaagtttaaagccacaatctcagcactggaggcaaagatcggacagctcgaagagcaacttgagcaggaggctaaggaacgagctgctgctaataagttggtccgacgcaccgagaaaaaactcaaagaaatcttcatgcaggttgaagacgaacggaggcatgctgaccagtataaggaacagatggagaaagccaacgctcggatgaaacaactgaagcgtcagctagaagaggccgaggaggaggccacaagggcgaatgccagccgccgcaagcttcagcgggaattagacgacgctactgaggccaatgagggcctgtctcgagaggtctcaaccctgaagaaccgtctgaggagaggcggtccaatttcattttcatctagtcgaagcgggcgcaggcagttacacctggagggcgcaagtttagaactctctgatgacgacacagagtccaaaacttcagatgtcaacgagacgcagccaccacagagcgaatag

SEQ ID NO: 316781 - DNA, 7682 bp, Artificial Sequence
  derived and/or modified sequence
actgaggcgctggatctgtggtcgcggctggggacgtgcgcccgcgccaccatcttcggctgaagaggcaattgcttttggatcgttccatttacaatggcgcagagaactggactcgaggatccagagaggtatctctttgtggacagggctgtcatctacaaccctgccactcaagctgattggacagctaaaaagctagtgtggattccatcagaacgccatggttttgaggcagctagtatcaaagaagaacggggagatgaagttatggtggagttggcagagaatggaaagaaagcaatggtcaacaaagatgatattcagaagatgaacccacctaagttttccaaggtggaggatatggcagaattgacatgcttgaatgaagcttccgttttacataatctgaaggatcgctactattcaggactaatctatacttattctggactcttctgtgtagttataaacccttacaagaatcttccaatttactctgagaatattattgaaatgtacagagggaagaagcgtcatgagatgcctccacacatctatgctatatctgaatctgcttacagatgcatgcttcaagatcgtgaggaccagtcaattctttgcacgggtgagtcaggtgctgggaagacagaaaatacaaagaaagttattcagtaccttgcccatgttgcttcttcacataaaggaagaaaggaccataatattcctggggaacttgaacggcagcttttgcaagcaaatccaattctggaatcatttggaaatgcgaagactgtgaaaaatgataactcatctcgttttggcaaatttattcggatcaactttgatgtaactggctatatcgttggggccaacattgaaacataccttctggaaaagtctcgtgctgttcgtcaagcaaaagatgaacgtacttttcatatcttttaccagttgttatctggagcaggagaacacctaaagtctgatttgcttcttgaaggatttaataactacaggtttctctccaatggctatattcctattccgggacagcaagacaaagataatttccaggagaccatggaagcaatgcacataatgggcttctcccatgaagagattctgtcaatgcttaaagtagtatcttcagtgctacagtttggaaatatttctttcaaaaaggagagaaatactgatcaagcttccatgccagaaaatacagttgcgcagaagctctgccatcttcttgggatgaatgtgatggagtttactcgggccatcctgactccccggatcaaggtcggccgagactatgtgcaaaaagcccagaccaaagaacaggcagattttgcagtagaagcattggcaaaagctacctatgagcggctctttcgctggctcgttcatcgcatcaataaagctctggataggaccaaacgtcagggagcatctttcattggaatcctggatattgctggatttgaaatttttgagctgaactcctttgaacaactttgcatcaactacaccaatgagaagctgcagcagctgttcaaccacaccatgtttatcctagaacaagaggaataccagcgcgaaggcatcgagtggaacttcatcgatttcgggctggatctgcagccatgcatcgacctaatagagagacctgcgaaccctcctggtgtactggcccttttggatgaagaatgctggttccctaaagccacagataaaacctttgttgaaaaactggttcaagagcaaggttcccactccaagtttcagaaacctcgacaattaaaagacaaagctgatttttgcattatacattatgcagggaaggtggactataaggcagatgagtggctgatgaagaatatggaccccctgaatgacaacgtggccacccttttgcaccagtcatcagacagatttgtggcagagctttggaaagatgagattcagaatattcagagagcttctttctatgacagtgtttctggtcttcatgagccaccagtggaccgtatcgtgggtctggatcaagtcactggtatgactgagacagcttttggctccgcatataaaaccaagaagggcatgtttcgtaccgttgggcaactctacaaagaatctctcaccaagctgatggcaactctccgaaacaccaaccctaactttgttcgttgtatcattccaaatcacgagaagagggctggaaaattggatccacacctagtcctagatcagcttcgctgtaacggtgtcctggaagggatccgaatctgtcgccagggcttccctaaccgaatagttttccaggaattcagacagagatatgagatcctaactccaaatgctattcctaaaggttttatggatggtaaacaggcctgtgaacgaatgatccgggctttagaattggacccaaacttgtacagaattggacagagcaagatatttttcagagctggagttctggcacacttagaggaagaaagagatttaaaaatcaccgatatcattatcttcttccaggccgtttgcagaggttacctggccagaaaggcctttgccaagaagcagcagcaactaagtgccttaaaggtcttgcagcggaactgtgccgcgtacctgaaattacggcactggcagtggtggcgagtcttcacaaaggtgaagccgcttctacaagtgactcgccaggaggaagaacttcaggccaaagatgaagagctgttgaaggtgaaggagaagcagacgaaggtggaaggagagctggaggagatggagcggaagcaccagcagcttttagaagagaagaatatccttgcagaacaactacaagcagagactgagctctttgctgaagcagaagagatgagggcaagacttgctgctaaaaagcaggaattagaagagattctacatgacttggagtctagggttgaagaagaagaagaaagaaaccaaatcctccaaaatgaaaagaaaaaaatgcaagcacatattcaggacctggaagaacagctagacgaggaggaaggggctcggcaaaagctgcagctggaaaaggtgacagcagaggccaagatcaagaagatggaagaggagattctgcttctcgaggaccaaaattccaagttcatcaaagaaaagaaactcatggaagatcgcattgctgagtgttcctctcagctggctgaagaggaagaaaaggcgaaaaacttggccaaaatcaggaataagcaagaagtgatgatctcagatttagaagaacgcttaaagaaggaagaaaagactcgtcaggaactggaaaaggccaaaagaaaactcgacggggagacgaccgacctgcaggaccagatcgcagagctgcaggcgcagattgatgagctcaagctgcagctggccaagaaggaggaggagctgcagggcgcactggccagaggtgatgatgaaacactccataagaacaatgcccttaaagttgtgcgagagctacaagcccaaattgctgaacttcaggaagactttgaatccgagaaggcttcacggaacaaggccgaaaagcagaaaagggacttgagtgaggaactggaagctctgaaaacagagctggaggacacgctggacaccacggcagcccagcaggaactacgtacaaaacgtgaacaagaagtggcagagctgaagaaagctcttgaggaggaaactaagaaccatgaagctcaaatccaggacatgagacaaagacacgcaacagccctggaggagctctcagagcagctggaacaggccaagcggttcaaagcaaatctagagaagaacaagcagggcctggagacagataacaaggagctggcgtgtgaggtgaaggtcctgcagcaggtcaaggctgagtctgagcacaagaggaagaagctcgacgcgcaggtccaggagctccatgccaaggtctctgaaggcgacaggctcagggtggagctggcggagaaagcaagtaagctgcagaatgagctagataatgtctccacccttctggaagaagcagagaagaagggtattaaatttgctaaggatgcagctagtcttgagtctcaactacaggatacacaggagcttcttcaggaggagacacgccagaaactaaacctgagcagtcggatccggcagctggaagaggagaagaacagtcttcaggagcagcaggaggaggaggaggaggccaggaagaacctggagaagcaagtgctggccctgcagtcccagttggctgataccaagaagaaagtagatgacgacctgggaacaattgaaagtctggaagaagccaagaagaagcttctgaaggacgcggaggccctgagccagcgcctggaggagaaggcactggcgtatgacaaactggagaagaccaagaaccgcctgcagcaggagctggacgacctcacggtggacctggaccaccagcgccaggtcgcctccaacttggagaagaagcagaagaagtttgaccagctgttagcagaagagaagagcatctctgctcgctatgccgaagagcgggaccgggccgaagccgaggccagagagaaagaaaccaaagccctgtcactggcccgggccctcgaggaagccctggaggccaaggaggagtttgagaggcagaacaagcagctccgagcagacatggaagacctcatgagctccaaagatgatgtgggaaaaaacgttcacgaacttgaaaaatccaaacgggccctagagcagcaggtggaggaaatgaggacccagctggaggagctggaagacgaactccaggccacggaagatgccaagcttcgtctggaggtcaacatgcaggccatgaaggcgcagttcgagagagacctgcaaaccagggatgagcagaatgaagagaagaagcggctgctgatcaaacaggtgcgggagctcgaggcggagctggaggatgagaggaaacagcgggcgcttgctgtagcttcaaagaaaaagatggagatagacctgaaggacctcgaagcccaaatcgaggctgcgaacaaagctcgggatgaggtgattaagcagctccgcaagctccaggctcagatgaaggattaccaacgtgaattagaagaagctcgtgcatccagagatgagatttttgctcaatccaaagagagtgaaaagaaattgaagagtctggaagcagaaatccttcaattgcaggaggaacttgcctcatctgagcgagcccgccgacacgccgagcaggagagagatgagctggcggacgagatcaccaacagcgcctctggcaagtccgcgctgctggatgagaagcggcgtctggaagctcggatcgcacagctggaggaggagctggaagaggagcagagcaacatggagctgctcaacgaccgcttccgcaagaccactctacaggtggacacactgaacgccgagctagcagccgagcgcagcgccgcccagaagagtgacaatgcacgccagcaactggagcggcagaacaaggagctgaaggccaagctgcaggaactcgagggtgctgtcaagtctaagttcaaggccaccatctcagccctggaggccaagattgggcagctggaggagcagcttgagcaggaagccaaggaacgagcagccgccaacaaattagtccgtcgcactgagaagaagctgaaagaaatcttcatgcaggttgaggatgagcgtcgacacgcggaccagtataaagagcagatggagaaggccaacgctcggatgaagcagcttaaacgccagctggaggaagcagaagaagaagcgacgcgtgccaacgcatctcggcgtaaactccagcgggaactggatgatgccaccgaggccaacgagggcctgagccgcgaggtcagcaccctgaagaaccggctgaggcggggtggccccatcagcttctcttccagccgatctggccggcgccagctgcaccttgaaggagcttccctggagctctccgacgatgacacagaaagtaagaccagtgatgtcaacgagacgcagccaccccagtcagagtaaagttgcaggaagccagaggaggcaatacagtgggacagttaggaatgcacccggggcctcctgcagatttcggaaattggcaagctacgggattccttcctgaaagatcaactgtgtcttaaggctctccagcctatgcatactgtatcctgcttcagacttaggtacaattgctcccctttttatatatagacacacacaggacacatatattaaacagattgtttcatcattgcatctattttccatatagtcatcaagagaccattttataaaacatggtaagaccctttttaaaacaaactccaggcccttggttgcgggtcgctgggttattggggcagcgccgtggtcgtcactcagtcgctctgcatgctctctgtcatacagacaggtaacctagttctgtgttcacgtggcccccgactcctcagccacatcaagtctcctagaccactgtggactctaaactgcacttgtctctctcatttccttcaaataatgatcaatgctatttcagtgagcaaactgtgaaaggggctttggaaagagtaggaggggtgggctggatcggaagcaacacccatttggggttaccatgtccatcccccaaggggggccctgcccctcgagtcgatggtgtcccgcatctactcatgtgaactggccttggcgagggctggtctgtgcatagaagggatagtggccacactgcagctgaggccccaggtggcagccatggatcatgtagacttccagatggtctcccgaaccgcctggctctgccggcgccctcctcacgtcaggagcaagcagccgtggacccctaagccgagctggtggaaggcccctccccatcgccagccgggccctcatgctgaccttgcaaattcagccgctgctttgagcccaaaatgggaatattggttttgtgtccgaggcttgttccaagtttgtcaatgaggtttatggagcctccagaacagatgccatcttcctgaatgttgacatgccagtgggtgtgactccttcatttttccttctcccttccctttggacagtgttacagtgaacacttagcatcctgtttttggttggtagttaagcaaactgacattacggaaagtgccttagacactacagtactaagacaatgttgaatatatcattcgcctctataacaatttaatgtattcagttttgactgtgcttcatatcatgtacctctctagtcaaagtggtattacagacattcagtgacaatgaatcagtgttaattctaaatccttgatcctctgcaatgtgcttgaaaacacaaaccttttgggttaaaagctttaacatctattaggaagaatttgtcctgtgggtttggaatcttggattttccccctttatgaactgtactggctgttgaccaccagacacctgaccgcaaatatcttttcttgtattcccatatttctagacaatgatttttgtaagacaataaatttattcattatagatatttgcgcctgctctgtttacttgaagaaaaaagcacccgtggagaataaagagacctcaataaacaagaataatcatgtgaa

SEQ ID NO: 316782 - DNA, 5993 bp, Artificial Sequence
  derived and/or modified sequence
atggcacagcgtaccggattagaagatcctgagcggtacttgttcgtggatagagccgttatttataacccagccacacaggccgactggaccgcgaagaagctggtttggatacctagcgaacgacacgggttcgaagccgcatctattaaggaggaacgcggagacgaggttatggtcgaactggcagaaaatggcaagaaggccatggtgaacaaagatgatattcaaaagatgaacccgcctaaattttccaaagtcgaagatatggctgagttgacatgccttaatgaagctagcgtcctccacaatctgaaggacaggtattatagtgggctcatctatacatattcaggcttattctgcgtcgttattaatccttacaaaaacctgccaatttatagtgaaaatataatcgagatgtaccggggaaaaaagagacacgagatgccgccacatatctatgccatttcggaatcagcgtacagatgcatgctccaggaccgggaagatcagtcgattttgtgtaccggcgaatccggggctggaaagaccgagaatactaaaaaagtcatccagtacctggctcacgtcgcttctagccataagggcagaaaggatcacaacattcctggagagctcgagcgacagctcctgcaggcaaatcccatccttgaatcctttgggaacgcgaaaaccgtaaaaaacgataatagttcacggtttggaaaattcatccgcatcaactttgatgtgaccggctatatagtcggtgcaaacattgaaacctatcttctggagaagtctcgagccgtcaggcaggcgaaggacgaaaggacattccacatattttaccagctcctgtctggtgccggtgagcaccttaagagtgatctgctactggagggcttcaataactaccgattcctctctaatggatacattcctatcccaggacaacaggataaagataacttccaggagaccatggaagccatgcacattatgggcttctcgcacgaggagatcctttcaatgctgaaagttgtgtcaagtgtgctccagtttggtaatatctccttcaagaaggaaagaaatactgaccaagcatcaatgccggagaacaccgttgctcagaagttatgccacctgctcgggatgaacgtgatggagtttaccagggccattttaacgccgcgtatcaaggtcgggcgagattatgtccaaaaggctcagaccaaagagcaggcagactttgccgtggaggcgttggccaaggcaacctacgagcggctgttcagatggctagtgcacaggattaataaagcattagatcgcaccaagcggcagggtgcctcgttcatcggaatacttgatatcgcagggttcgagatcttcgaattgaacagtttcgaacagctatgtataaactataccaacgagaagctccagcagttgttcaatcatactatgttcatcctcgaacaggaggagtaccagcgagaggggatcgagtggaatttcatcgactttggattggacttgcagccgtgtattgacctgatagagaggccagccaatcctcccggagtgttagccctactcgacgaggaatgctggttcccgaaggccacggacaaaactttcgttgaaaaacttgtgcaggaacaaggctctcactccaaattccagaagccacggcaattgaaagataaagccgacttctgcatcatccattatgccggaaaggtggattacaaagctgacgagtggttgatgaagaatatggatcccctcaatgacaatgtggccaccctcctgcatcagagctcggaccgcttcgtagctgagctctggaaagatgagattcaaaacatccaacgggctagcttctacgattcagtttcaggtctacacgagccaccagttgaccgtattgtcggccttgatcaggtgaccggaatgacagagactgctttcggaagtgcttataaaacgaaaaaggggatgttccggacagtaggacagctctacaaggagtctctgactaaattaatggccactcttagaaataccaatcccaactttgtgcggtgcattatcccaaaccacgagaaaagggcaggaaaactggacccccatctcgttctagatcagctgagatgtaacggagttctcgagggcattcgtatctgccgtcagggatttccaaataggatcgtctttcaggagttcaggcagaggtatgagattctgacgccaaacgctatcccaaaggggtttatggacggaaagcaggcctgcgagagaatgatccgtgccctggaactggatccaaatctctaccggataggccagtctaaaattttctttagagccggagttctcgcccacctagaagaggaaagggacctgaagatcactgatattattatcttcttccaggctgtatgtaggggttatttagcacgcaaagcatttgcaaaaaaacagcagcagttaagtgcgctgaaagtactgcagcggaattgtgccgcttatctgaaattgcgccactggcagtggtggcgagttttcactaaagttaagccattgctgcaggtaacaaggcaggaagaggagctccaagctaaggatgaagagctactgaaagtcaaggagaagcagaccaaagttgagggagaactcgaagaaatggagaggaaacatcaacagctattagaggaaaagaatattctcgctgagcaactgcaggccgaaaccgagttgtttgctgaggcggaggagatgcgtgccaggctcgccgctaaaaagcaggaactggaggaaattcttcatgacttggagagccgtgtcgaagaggaggaggagagaaaccagatcttgcaaaacgaaaaaaagaagatgcaggctcatattcaagatttggaggaacaacttgacgaggaggaaggagctcggcagaagctgcagcttgagaaggtgactgcagaagcaaaaattaagaagatggaggaagagatcctcctcttggaggatcaaaattcaaaattcatcaaagagaaaaaacttatggaggatcggatcgcggagtgttcttcccagctcgccgaagaggaggagaaggcaaagaacttggccaagatcaggaacaagcaggaggtaatgatttctgacctggaggagcggctgaagaaagaggagaaaaccaggcaagagttggaaaaagccaagcgcaagctggacggcgagacgaccgaccttcaggatcaaatagctgagctccaagcccagattgatgagttaaagctgcagctggccaaaaaagaggaggagctgcagggcgcactggccaggggggacgacgagaccctacacaaaaataacgctctgaaggtcgtgcgcgaactgcaggctcagatagctgagctacaggaagacttcgagagcgagaaggctagcaggaataaggccgaaaaacaaaagagggatctgagcgaagaactcgaggcattgaaaactgaactggaagacacactggataccaccgcggctcagcaggaattgaggactaagcgcgagcaggaggttgctgagctgaaaaaggctcttgaagaagaaaccaaaaatcacgaagcgcagatccaggacatgcgacagaggcacgcaacagcccttgaggaactgagcgaacaattggagcaagcaaagcggtttaaggcaaacttggagaagaataaacagggcctggagaccgataataaggagctggcctgcgaggtgaaggtgctgcaacaggtgaaggcagagagcgagcacaaaagaaagaagctggatgcccaggtgcaagaactccacgcaaaggtgtccgaaggtgatagactacgggtggagctggctgagaaggcaagcaagctgcagaacgaactggataatgtgtcaactctgctggaggaggctgagaaaaaaggaataaagttcgccaaggatgcggcttccctcgagtcccagctgcaggatactcaagagttactgcaggaagagacccggcagaaattgaatctttcttccagaatcagacagttggaagaggaaaagaatagcctgcaggagcagcaggaggaagaggaggaggcaagaaaaaatcttgagaagcaggtgctggctcttcaatcccagctggcagacaccaagaagaaagtggacgacgatctgggaacgatcgagtctctggaggaggccaaaaagaagctattaaaggatgccgaggccctcagtcagcgccttgaggagaaggcactcgcttatgacaagctcgagaaaactaaaaacaggttacagcaggagcttgatgatctcactgtggatctggaccaccagagacaggtggcttctaacttggaaaaaaagcaaaagaagtttgatcagctgctggcagaagagaaatccatttccgctaggtatgctgaagaacgggatagagctgaagctgaggcccgtgaaaaagagaccaaagcattatccctggcccgagctctcgaggaggcactggaggccaaggaagaattcgaaaggcagaacaaacaactgcgtgccgacatggaggacctaatgagctcgaaagatgatgtcgggaagaatgtgcacgagctggaaaagtcaaagcgggcattagagcagcaggttgaagagatgagaacccagctcgaggagctagaggacgagctgcaggctactgaagacgccaagttgcgtcttgaggtcaacatgcaggcaatgaaggcacagttcgagcgtgacctccagactagagacgagcagaacgaagaaaaaaagcgcctgctcatcaagcaagtgagggaacttgaagccgagctggaagacgaacgaaagcaacgagcattagcagttgcctccaagaagaaaatggagatcgatcttaaagatctggaggcccaaatcgaggcggctaacaaggccagagatgaggtgatcaaacagcttcgcaagctacaggcacagatgaaagactatcaaagagagctggaggaagcccgagcctctcgagacgaaatatttgcccaaagcaaagagagcgagaagaagttgaagagccttgaggccgaaattctgcagctacaggaggaactggcctcatctgagcgagcgagaagacacgccgaacaggaaagggatgagctggccgatgaaatcacgaacagcgcctcagggaagtccgctcttctggacgaaaagcgcagattagaggcgaggatagcgcagttagaggaggaattagaagaagagcagtcaaatatggaactgctaaacgaccggtttcggaagaccaccttgcaggtcgatacattaaacgcggaactggctgctgaacgttccgctgcgcaaaagagtgacaatgcgagacaacagctcgagaggcagaataaggaattgaaggcaaagctgcaggaactggaaggcgcagttaagagcaagttcaaagctactatcagtgctctggaagctaaaattggacagttggaagagcaattggagcaggaggccaaggaaagagctgccgcaaacaagttggtcagaaggaccgaaaagaaactcaaagagatatttatgcaagtcgaggatgaaaggcgccacgctgaccagtataaagagcagatggagaaagctaatgccaggatgaagcagctcaagcgacaactcgaagaagccgaagaggaagctacgcgagccaacgccagccgaaggaaactgcaaagggaattagatgatgcgaccgaagctaacgaaggtctgagtcgagaggtctcaactttgaaaaacagactgcgaagaggcggacccatttccttctcctcttctagatcggggaggaggcagctacacctcgaaggcgctagcctcgaactctccgatgatgatacggagagtaaaacctctgatgttaacgagacccagcctccgcaaagtgaata

SEQ ID NO: 316783 - protein, 1992 aa, Artificial Sequence
  derived and/or modified sequence
MAQRTGLEDPERYLFVDRAVIYNPATQADWTAKKLVWIPSERHGFEAASIKEERGDEVMVELAENGKKAMVNKDDIQKMNPPKFSKVEDMAELTCLNEASVLHNLKDRYYSGLIYTYSGLFCVVINPYKNLPIYSENIIEMYRGKKRHEMPPHIYAISESAYRCMLQDREDQSILCTGESGAGKTENTKKVIQYLAHVASSHKGRKDHNIPQESPKPVKHQASALLYGELERQLLQANPILESFGNAKTVKNDNSSRFGKFIRINFDVTGYIVGANIETYLLEKSRAVRQAKDERTFHIFYQLLSGAGEHLKSDLLLEGFNNYRFLSNGYIPIPGQQDKDNFQETMEAMHIMGFSHEEILSMLKVVSSVLQFGNISFKKERNTDQASMPENTVAQKLCHLLGMNVMEFTRAILTPRIKVGRDYVQKAQTKEQADFAVEALAKATYERLFRWLVHRINKALDRTKRQGASFIGILDIAGFEIFELNSFEQLCINYTNEKLQQLFNHTMFILEQEEYQREGIEWNFIDFGLDLQPCIDLIERPANPPGVLALLDEECWFPKATDKTFVEKLVQEQGSHSKFQKPRQLKDKADFCIIHYAGKVDYKADEWLMKNMDPLNDNVATLLHQSSDRFVAELWKDVDRIVGLDQVTGMTETAFGSAYKTKKGMFRTVGQLYKESLTKLMATLRNTNPNFVRCIIPNHEKRAGKLDPHLVLDQLRCNGVLEGIRICRQGFPNRIVFQEFRQRYEILTPNAIPKGFMDGKQACERMIRALELDPNLYRIGQSKIFFRAGVLAHLEEERDLKITDIIIFFQAVCRGYLARKAFAKKQQQLSALKVLQRNCAAYLKLRHWQWWRVFTKVKPLLQVTRQEEELQAKDEELLKVKEKQTKVEGELEEMERKHQQLLEEKNILAEQLQAETELFAEAEEMRARLAAKKQELEEILHDLESRVEEEEERNQILQNEKKKMQAHIQDLEEQLDEEEGARQKLQLEKVTAEAKIKKMEEEILLLEDQNSKFIKEKKLMEDRIAECSSQLAEEEEKAKNLAKIRNKQEVMISDLEERLKKEEKTRQELEKAKRKLDGETTDLQDQIAELQAQIDELKLQLAKKEEELQGALARGDDETLHKNNALKVVRELQAQIAELQEDFESEKASRNKAEKQKRDLSEELEALKTELEDTLDTTAAQQELRTKREQEVAELKKALEEETKNHEAQIQDMRQRHATALEELSEQLEQAKRFKANLEKNKQGLETDNKELACEVKVLQQVKAESEHKRKKLDAQVQELHAKVSEGDRLRVELAEKASKLQNELDNVSTLLEEAEKKGIKFAKDAASLESQLQDTQELLQEETRQKLNLSSRIRQLEEEKNSLQEQQEEEEEARKNLEKQVLALQSQLADTKKKVDDDLGTIESLEEAKKKLLKDAEALSQRLEEKALAYDKLEKTKNRLQQELDDLTVDLDHQRQVASNLEKKQKKFDQLLAEEKSISARYAEERDRAEAEAREKETKALSLARALEEALEAKEEFERQNKQLRADMEDLMSSKDDVGKNVHELEKSKRALEQQVEEMRTQLEELEDELQATEDAKLRLEVNMQAMKAQFERDLQTRDEQNEEKKRLLIKQVRELEAELEDERKQRALAVASKKKMEIDLKDLEAQIEAANKARDEVIKQLRKLQAQMKDYQRELEEARASRDEIFAQSKESEKKLKSLEAEILQLQEELASSERARRHAEQERDELADEITNSASGKSALLDEKRRLEARIAQLEEELEEEQSNMELLNDRFRKTTLQVDTLNAELAAERSAAQKSDNARQQLERQNKELKAKLQELEGAVKSKFKATISALEAKIGQLEEQLEQEAKERAAANKLVRRTEKKLKEIFMQVEDERRHADQYKEQMEKANARMKQLKRQLEEAEEEATRANASRRKLQRELDDATEANEGLSREVSTLKNRLRRGGPISFSSSRSGRRQLHLEGASLELSDDDTESKTSDVNETQPPQSE

SEQ ID NO: 316784 - DNA, 5979 bp, Artificial Sequence
  derived and/or modified sequence
atggcccagagaaccggcctggaggaccccgagagatacctgttcgtggacagagccgtgatctacaaccccgccacccaggccgactggaccgccaagaagctggtgtggatccccagcgagagacacggcttcgaggccgccagcatcaaggaggagagaggcgacgaggtgatggtggagctggccgagaacggcaagaaggccatggtgaacaaggacgacatccagaagatgaacccccccaagttcagcaaggtggaggacatggccgagctgacctgcctgaacgaggccagcgtgctgcacaacctgaaggacagatactacagcggcctgatctacacctacagcggcctgttctgcgtggtgatcaacccctacaagaacctgcccatctacagcgagaacatcatcgagatgtacagaggcaagaagagacacgagatgcccccccacatctacgccatcagcgagagcgcctacagatgcatgctgcaggacagagaggaccagagcatcctgtgcaccggcgagagcggcgccggcaagaccgagaacaccaagaaggtgatccagtacctggcccacgtggccagcagccacaagggcagaaaggaccacaacatcccccaggagagccccaagcccgtgaagcaccaggccagcgccctgctgtacggcgagctggagagacagctgctgcaggccaaccccatcctggagagcttcggcaacgccaagaccgtgaagaacgacaacagcagcagattcggcaagttcatcagaatcaacttcgacgtgaccggctacatcgtgggcgccaacatcgagacctacctgctggagaagagcagagccgtgagacaggccaaggacgagagaaccttccacatcttctaccagctgctgagcggcgccggcgagcacctgaagagcgacctgctgctggagggcttcaacaactacagattcctgagcaacggctacatccccatccccggccagcaggacaaggacaacttccaggagaccatggaggccatgcacatcatgggcttcagccacgaggagatcctgagcatgctgaaggtggtgagcagcgtgctgcagttcggcaacatcagcttcaagaaggagagaaacaccgaccaggccagcatgcccgagaacaccgtggcccagaagctgtgccacctgctgggcatgaacgtgatggagttcaccagagccatcctgacccccagaatcaaggtgggcagagactacgtgcagaaggcccagaccaaggagcaggccgacttcgccgtggaggccctggccaaggccacctacgagagactgttcagatggctggtgcacagaatcaacaaggccctggacagaaccaagagacagggcgccagcttcatcggcatcctggacatcgccggcttcgagatcttcgagctgaacagcttcgagcagctgtgcatcaactacaccaacgagaagctgcagcagctgttcaaccacaccatgttcatcctggagcaggaggagtaccagagagagggcatcgagtggaacttcatcgacttcggcctggacctgcagccctgcatcgacctgatcgagagacccgccaacccccccggcgtgctggccctgctggacgaggagtgctggttccccaaggccaccgacaagaccttcgtggagaagctggtgcaggagcagggcagccacagcaagttccagaagcccagacagctgaaggacaaggccgacttctgcatcatccactacgccggcaaggtggactacaaggccgacgagtggctgatgaagaacatggaccccctgaacgacaacgtggccaccctgctgcaccagagcagcgacagattcgtggccgagctgtggaaggacgtggacagaatcgtgggcctggaccaggtgaccggcatgaccgagaccgccttcggcagcgcctacaagaccaagaagggcatgttcagaaccgtgggccagctgtacaaggagagcctgaccaagctgatggccaccctgagaaacaccaaccccaacttcgtgagatgcatcatccccaaccacgagaagagagccggcaagctggacccccacctggtgctggaccagctgagatgcaacggcgtgctggagggcatcagaatctgcagacagggcttccccaacagaatcgtgttccaggagttcagacagagatacgagatcctgacccccaacgccatccccaagggcttcatggacggcaagcaggcctgcgagagaatgatcagagccctggagctggaccccaacctgtacagaatcggccagagcaagatcttcttcagagccggcgtgctggcccacctggaggaggagagagacctgaagatcaccgacatcatcatcttcttccaggccgtgtgcagaggctacctggccagaaaggccttcgccaagaagcagcagcagctgagcgccctgaaggtgctgcagagaaactgcgccgcctacctgaagctgagacactggcagtggtggagagtgttcaccaaggtgaagcccctgctgcaggtgaccagacaggaggaggagctgcaggccaaggacgaggagctgctgaaggtgaaggagaagcagaccaaggtggagggcgagctggaggagatggagagaaagcaccagcagctgctggaggagaagaacatcctggccgagcagctgcaggccgagaccgagctgttcgccgaggccgaggagatgagagccagactggccgccaagaagcaggagctggaggagatcctgcacgacctggagagcagagtggaggaggaggaggagagaaaccagatcctgcagaacgagaagaagaagatgcaggcccacatccaggacctggaggagcagctggacgaggaggagggcgccagacagaagctgcagctggagaaggtgaccgccgaggccaagatcaagaagatggaggaggagatcctgctgctggaggaccagaacagcaagttcatcaaggagaagaagctgatggaggacagaatcgccgagtgcagcagccagctggccgaggaggaggagaaggccaagaacctggccaagatcagaaacaagcaggaggtgatgatcagcgacctggaggagagactgaagaaggaggagaagaccagacaggagctggagaaggccaagagaaagctggacggcgagaccaccgacctgcaggaccagatcgccgagctgcaggcccagatcgacgagctgaagctgcagctggccaagaaggaggaggagctgcagggcgccctggccagaggcgacgacgagaccctgcacaagaacaacgccctgaaggtggtgagagagctgcaggcccagatcgccgagctgcaggaggacttcgagagcgagaaggccagcagaaacaaggccgagaagcagaagagagacctgagcgaggagctggaggccctgaagaccgagctggaggacaccctggacaccaccgccgcccagcaggagctgagaaccaagagagagcaggaggtggccgagctgaagaaggccctggaggaggagaccaagaaccacgaggcccagatccaggacatgagacagagacacgccaccgccctggaggagctgagcgagcagctggagcaggccaagagattcaaggccaacctggagaagaacaagcagggcctggagaccgacaacaaggagctggcctgcgaggtgaaggtgctgcagcaggtgaaggccgagagcgagcacaagagaaagaagctggacgcccaggtgcaggagctgcacgccaaggtgagcgagggcgacagactgagagtggagctggccgagaaggccagcaagctgcagaacgagctggacaacgtgagcaccctgctggaggaggccgagaagaagggcatcaagttcgccaaggacgccgccagcctggagagccagctgcaggacacccaggagctgctgcaggaggagaccagacagaagctgaacctgagcagcagaatcagacagctggaggaggagaagaacagcctgcaggagcagcaggaggaggaggaggaggccagaaagaacctggagaagcaggtgctggccctgcagagccagctggccgacaccaagaagaaggtggacgacgacctgggcaccatcgagagcctggaggaggccaagaagaagctgctgaaggacgccgaggccctgagccagagactggaggagaaggccctggcctacgacaagctggagaagaccaagaacagactgcagcaggagctggacgacctgaccgtggacctggaccaccagagacaggtggccagcaacctggagaagaagcagaagaagttcgaccagctgctggccgaggagaagagcatcagcgccagatacgccgaggagagagacagagccgaggccgaggccagagagaaggagaccaaggccctgagcctggccagagccctggaggaggccctggaggccaaggaggagttcgagagacagaacaagcagctgagagccgacatggaggacctgatgagcagcaaggacgacgtgggcaagaacgtgcacgagctggagaagagcaagagagccctggagcagcaggtggaggagatgagaacccagctggaggagctggaggacgagctgcaggccaccgaggacgccaagctgagactggaggtgaacatgcaggccatgaaggcccagttcgagagagacctgcagaccagagacgagcagaacgaggagaagaagagactgctgatcaagcaggtgagagagctggaggccgagctggaggacgagagaaagcagagagccctggccgtggccagcaagaagaagatggagatcgacctgaaggacctggaggcccagatcgaggccgccaacaaggccagagacgaggtgatcaagcagctgagaaagctgcaggcccagatgaaggactaccagagagagctggaggaggccagagccagcagagacgagatcttcgcccagagcaaggagagcgagaagaagctgaagagcctggaggccgagatcctgcagctgcaggaggagctggccagcagcgagagagccagaagacacgccgagcaggagagagacgagctggccgacgagatcaccaacagcgccagcggcaagagcgccctgctggacgagaagagaagactggaggccagaatcgcccagctggaggaggagctggaggaggagcagagcaacatggagctgctgaacgacagattcagaaagaccaccctgcaggtggacaccctgaacgccgagctggccgccgagagaagcgccgcccagaagagcgacaacgccagacagcagctggagagacagaacaaggagctgaaggccaagctgcaggagctggagggcgccgtgaagagcaagttcaaggccaccatcagcgccctggaggccaagatcggccagctggaggagcagctggagcaggaggccaaggagagagccgccgccaacaagctggtgagaagaaccgagaagaagctgaaggagatcttcatgcaggtggaggacgagagaagacacgccgaccagtacaaggagcagatggagaaggccaacgccagaatgaagcagctgaagagacagctggaggaggccgaggaggaggccaccagagccaacgccagcagaagaaagctgcagagagagctggacgacgccaccgaggccaacgagggcctgagcagagaggtgagcaccctgaagaacagactgagaagaggcggccccatcagcttcagcagcagcagaagcggcagaagacagctgcacctggagggcgccagcctggagctgagcgacgacgacaccgagagcaagaccagcgacgtgaacgagacccagcccccccagagcgagtag

SEQ ID NO: 316785 - DNA, 5979 bp, Artificial Sequence
  derived and/or modified sequence
atggcgcagagaacgggccttgaggacccagagcggtacctgtttgtagatcgcgccgtgatctacaatccagccacacaggccgactggaccgctaagaaactggtctggatcccttcggagcggcacggcttcgaagcggccagcattaaggaggaaagaggcgacgaagttatggtggaattagccgagaacggtaaaaaagctatggtgaataaggacgatatacagaagatgaatcctccaaagttctcaaaggtagaggatatggccgaactcacttgcttgaacgaggcatcagttctccataatctcaaggataggtactactctggtcttatctatacctacagcggactgttctgcgttgtaatcaacccatataagaacctccccatctacagtgaaaacatcatcgagatgtatagaggtaaaaaacggcacgaaatgcctccacatatctacgccatttcagagtcagcctaccgctgcatgctccaggacagggaagatcaaagtatactgtgtacgggagagtcaggagctggcaagaccgagaatactaagaaggttatacagtacttagcccacgtggcctcttcccataagggacggaaggatcacaacattccacaagagagtccgaaaccggttaagcaccaggcaagcgccttactgtatggtgagctagagcgacaactgctgcaggcaaaccccatcttggaatctttcggcaatgctaaaactgtcaaaaacgacaacagtagccgtttcggtaaattcatccgcatcaatttcgatgtgactgggtacatcgtcggtgccaacatcgaaacatacctcctggaaaagtccagggcagtacgccaggcaaaagacgagaggacgtttcacattttctaccagttgctgtccggcgccggtgagcacctcaaatctgacctcctgctggaaggctttaacaattacaggtttctctccaatggatacatcccaattccaggccagcaggataaggacaactttcaagagaccatggaggctatgcatatcatgggcttcagtcacgaagaaatattgagcatgctgaaggtagtgtcctccgttctccaattcggtaacatcagtttcaaaaaggagcgcaacaccgatcaggcatcaatgccagaaaacacagtcgcccagaagctgtgccaccttttgggtatgaacgttatggaatttacaagagcgatactcactcccaggatcaaggtggggcgggactatgttcagaaagctcagactaaggagcaggctgattttgcagttgaagccttggcaaaggccacctacgaaaggctctttcggtggctggtccacaggatcaacaaagccctcgaccggaccaaaagacagggagcgtcattcattggcatactggatatagctggattcgagatattcgagctgaactcattcgagcagctatgcattaattacaccaacgaaaagctccagcagttatttaatcacacaatgtttattttagagcaggaggagtaccaaagagagggaatcgaatggaattttatcgactttggactggatctgcagccttgtatcgacctgatcgaacggcccgccaatccaccgggggtcctggcattgctagacgaagagtgctggttccccaaagcaacggataaaacatttgtggaaaaactcgtgcaggagcaaggtagccattccaagtttcagaagccccgacaactgaaagataaagccgatttttgcataatccattacgccggcaaggtcgattataaggccgatgagtggctcatgaaaaatatggaccccttgaacgacaatgtggccacattgctgcaccagagctctgacaggtttgtggcagagctctggaaagacgtggacaggattgtgggcttggaccaagtgacaggcatgacggaaacagcattcgggtccgcctataagacaaagaaagggatgtttcggacagtgggacagctgtacaaagagtcgctgaccaagttgatggccactctgcgcaataccaaccccaacttcgtgcggtgcatcatccccaatcatgagaagagggccggaaagttggacccacacctggttctcgatcagttaagatgcaatggcgtgcttgagggcataaggatctgtagacagggcttcccgaacagaatcgtgttccaggaattccggcagcgatatgaaatcttaactccaaacgccatccctaaagggtttatggatggtaaacaggcttgcgaacgaatgattcgtgccctagaattggaccccaatctgtatcgaattgggcagagtaaaattttcttcagagccggtgtactcgcacacctggaagaagagagagacttgaaaatcacggacatcatcatattttttcaagccgtatgcaggggctatctggctaggaaggcgtttgctaaaaaacagcagcagctttctgcgttaaaagtgcttcagcgcaattgcgcagcctatctcaagctgcgccattggcagtggtggagagtgtttaccaaagtgaagcctctcctgcaggtgacgcggcaggaggaggaacttcaggcaaaagacgaggaactcttaaaagtgaaggaaaaacagacaaaggtcgagggagaactggaagagatggagcggaaacatcagcagctgctggaagaaaagaacattttagcagaacagcttcaggccgagacagagctctttgccgaagctgaagaaatgagagcaagactcgcagctaagaaacaggaactggaagagatcctacacgatttggagtcccgggtggaagaggaagaagagcgcaatcagatcctacagaacgagaaaaagaagatgcaagctcatatacaagatctggaggagcaactggatgaggaagaaggagcgcgtcagaaattacaactggaaaaagtgacagcagaagcaaagattaagaagatggaagaagagatcctgctactagaggatcagaactcaaagttcatcaaagagaaaaagctcatggaagaccgcatcgctgaatgttcctcacaacttgccgaagaggaggaaaaggctaaaaatctggctaagatccggaacaagcaggaagttatgatttccgaccttgaagaaaggctcaaaaaggaggagaagaccaggcaggagctagagaaagccaaacgcaaacttgatggcgagaccactgatctgcaggatcagattgccgaattgcaggcccagattgacgaattaaagctgcagttggctaagaaagaggaagaactgcagggcgcactcgcccggggtgacgatgagacactccacaaaaataatgccctcaaggttgttagggaattgcaggctcaaatagccgagttacaggaggatttcgaaagtgagaaagcctctcggaataaggccgaaaagcagaagcgggacctctccgaagagctagaggctctcaagaccgaactggaagacacgctggataccacagccgcacagcaagagttacgtactaagagggaacaggaggtcgccgagctgaagaaggccctggaagaagaaactaagaaccatgaggcacagattcaggacatgaggcagcgacacgcaactgccctggaagagctgtcagagcagctcgagcaggcgaaacgatttaaagccaacctggagaaaaacaagcaaggcctggaaaccgacaataaggagctagcatgcgaagttaaggtgctacagcaagtgaaggccgaatcagaacacaaaaggaagaagttggacgcccaagttcaggaactccacgccaaagtctctgaaggcgacaggttgagagtcgagcttgcagagaaggcttccaagctgcagaacgagctggacaatgtcagcacactactggaggaggctgagaaaaagggaattaagtttgctaaagatgccgctagcctcgagagtcaactccaagacacccaggaactgctccaggaagaaacccggcagaagctaaatctgagctctagaattaggcaactagaggaggagaaaaattccttgcaagaacagcaggaggaggaggaagaagcacgtaaaaatctggaaaaacaggtcctggctctgcagtcacaactggccgacacaaaaaaaaaagttgatgacgatttaggaactatcgagtctctggaggaggctaagaagaaactcctcaaagacgccgaagcactgagccaacggctcgaagaaaaagccttagcttacgataaactggagaaaaccaaaaaccggctccagcaggagctcgatgatcttacagttgacttagaccatcaaaggcaagtggcctccaatctcgaaaaaaaacagaagaagttcgaccagctgctcgccgaggaaaagagcatctcagcacgttacgccgaggagcgggatagagccgaggctgaagcccgcgaaaaagagacgaaagctctgtccctcgctagggctctggaagaagccctggaagctaaagaggagtttgaacgacagaacaagcagctgagggcggacatggaagatctgatgagcagtaaggatgatgtcggaaagaacgtacacgaactcgagaaaagtaaacgggccctggagcagcaggtcgaagagatgagaactcagctggaagaactcgaggacgagctgcaagcaacggaagatgccaaactgaggctggaggttaacatgcaggctatgaaagcacagttcgaaagagacctccagaccagggacgaacagaacgaggagaagaaacgcctgctcatcaaacaggtgcgcgagttagaggcagagctggaagatgagaggaaacaacgagcactcgcagtggcctccaagaaaaagatggaaatcgacctcaaggatctggaggcacagatcgaagcggctaacaaggcaagggacgaggtcatcaagcagctgcgaaagctgcaggcccaaatgaaggactaccagagggaactagaggaagcaagagcaagtcgggacgagatctttgctcagtctaaagaaagcgagaaaaagctgaagtctctggaggccgagatcttgcaattacaggaggaactggcttcaagtgagcgagcccgaagacatgcagagcaggagcgggacgagctggcggatgagatcactaacagtgcctctgggaaatcagccctgttagacgagaaacgtcgtctagaggcaagaatagcccagctcgaagaagaactggaggaggaacaatccaatatggaattattaaacgatcgttttagaaagactaccttgcaggtcgatacattaaatgctgagctcgccgctgaaagatcggctgcgcagaagtctgacaatgcccggcagcagctggagcgacagaataaagaactcaaggccaaacttcaggagctggagggtgcagtaaagtccaaatttaaggccacaataagcgccctggaggctaaaatcggtcagctcgaagagcagcttgagcaggaggcaaaagagcgtgccgcagctaacaagcttgttcgacggaccgagaagaagctgaaagagatatttatgcaggtggaagatgagagacgtcacgctgaccagtataaggagcagatggagaaagcaaatgctcgtatgaagcagcttaaacgccagctggaggaggcggaggaagaggctacaagagccaatgcttcccgtcgcaaactacagcgggagttggatgatgccactgaagcaaacgagggcttgagccgcgaagtgtctaccctgaagaataggctgagaaggggcggacccattagctttagctcgtctaggagcgggcgtcgacaactgcacctggagggcgcctccctggagcttagcgacgacgatacagagtccaagacatccgacgtaaacgaaacgcagccccctcagtccgagtag

SEQ ID NO: 316786 - DNA, 5979 bp, Artificial Sequence
  derived and/or modified sequence
atggcccagaggacaggcctggaggaccctgagcgctacctgtttgtggacagagctgtgatctacaacccagccacccaggccgactggacagccaagaagctggtgtggatccccagcgagagacatggctttgaagctgccagcatcaaggaggagagaggagatgaggtgatggtggagctggccgagaatggcaagaaggccatggtgaacaaggatgacatccagaagatgaacccccccaagttcagcaaggtggaggacatggccgagctgacctgcctgaatgaggcctctgtgctgcacaacctgaaggaccgctactacagcggcctcatctacacctacagcggcctcttctgtgtggtgatcaacccctacaagaacctgcccatctacagcgagaacatcatcgagatgtaccggggcaagaagagacatgagatgccaccccacatctatgccatcagcgagagcgcctaccgctgcatgctgcaggaccgggaggaccagagcatcctgtgcacaggagagagcggggccggcaagacagagaacaccaagaaggtgatccagtacctggcccacgtggccagcagccacaagggcaggaaggaccacaacatcccccaggagagccccaagcctgtgaagcaccaggccagcgccctgctgtatggagagctggagcggcagctgctgcaggccaaccccatcctggagagctttggaaatgccaagacagtgaagaatgacaacagcagcagatttgggaagttcatccgcatcaactttgatgtgacaggctacatcgtgggcgccaacatcgagacctacctgctggagaagagcagagctgtgcggcaggccaaggatgagaggaccttccacatcttctaccagctgctgtctggagctggggagcacctgaagagtgacctgctgctggagggcttcaacaactaccgcttcctgagcaatggctacatccccatccctggccagcaggacaaggacaacttccaggagaccatggaggccatgcacatcatgggcttcagccatgaggagatcctgtccatgctgaaggtggtgtcctctgtgctgcagtttggaaacatctccttcaagaaggagaggaacacagaccaggcctccatgcctgagaacacagtggcccagaagctgtgccacctgctgggcatgaatgtgatggagttcacccgggccatcctgaccccccgcatcaaggtgggccgggactatgtgcagaaggcccagaccaaggagcaggccgactttgctgtggaggccctggccaaggccacctatgagcggctcttccgctggctggtgcaccgcatcaacaaggccctggacaggaccaagaggcagggcgccagcttcatcggcatcctggacattgctggctttgagatctttgagctgaacagctttgagcagctgtgcatcaactacaccaatgagaagctgcagcagctgttcaaccacaccatgttcatcctggagcaggaggagtaccagcgggagggcatcgagtggaacttcatcgactttggcctggacctgcagccctgcatcgacctgattgaaagacctgccaaccccccaggagtgctggccctgctggatgaggagtgctggttccccaaggccacagacaagacctttgtggagaagctggtgcaggagcagggcagccacagcaagttccagaagccccggcagctgaaggacaaggctgacttctgcatcatccactacgccggcaaggtggactacaaggcagatgagtggctgatgaagaacatggaccccctgaatgacaacgtggccaccctgctgcaccagagcagtgacagatttgtggccgagctgtggaaggatgtggacagaattgtgggcctggaccaggtgacaggcatgacagaaacagcctttggaagtgcctacaagaccaagaagggcatgttcagaacagtgggccagctgtacaaggagagcctgaccaagctgatggccaccctgaggaacaccaaccccaactttgtgcgctgcatcatccccaaccacgagaagagagctgggaagctggacccccacctggtgctggaccagctgcgctgcaatggagtgctggagggcatccgcatctgccggcagggcttccccaacagaattgtgttccaggagttccggcagagatatgagatcctgaccccaaatgccatccccaagggcttcatggatggcaagcaggcctgtgagaggatgatccgggccctggagctggaccccaacctgtacagaattggccagagcaagatcttcttccgggccggcgtgctggcccacctggaggaggagcgggacctgaagatcacagacatcatcatcttcttccaggccgtgtgccggggctacctggccaggaaggcctttgccaagaagcagcagcagctgagcgccctgaaggtgctgcagaggaactgtgccgcctacctgaagctgcggcactggcagtggtggagggtcttcaccaaggtgaagcccctgctgcaggtgacccggcaggaggaggagctgcaggccaaggatgaggagctgctgaaggtgaaggagaagcagaccaaggtggagggggagctggaggagatggagaggaagcaccagcagctgctggaggagaagaacatcctggccgagcagctgcaggccgagacagagctgtttgctgaggccgaggagatgagggcccggctggccgccaagaagcaggagctggaggagatcctgcatgacctggagagccgggtggaggaggaggaggagaggaaccagatcctgcagaatgagaagaagaagatgcaggcccacatccaggacctggaggagcagctggatgaggaggagggcgcccggcagaagctgcagctggagaaggtgacagctgaggccaagatcaagaagatggaggaggagatcctgctgctggaggaccagaacagcaagttcatcaaggagaagaagctgatggaggacagaattgctgagtgcagcagccagctggccgaggaggaggagaaggccaagaacctggccaagatccggaacaagcaggaggtgatgatcagtgacctggaggagcggctgaagaaggaggagaagacccggcaggagctggagaaggccaagaggaagctggatggagagaccacagacctgcaggaccagattgctgagctgcaggcccagattgatgagctgaagctgcagctggccaagaaggaggaggagctgcagggcgccctggcccggggagatgatgagaccctgcacaagaacaatgccctgaaggtggtgcgggagctgcaggcccagattgctgagctgcaggaggactttgaaagtgagaaggccagcaggaacaaggccgagaagcagaagagggacctgtctgaggagctggaggccctgaagacagagctggaggacaccctggacaccacagctgcccagcaggagctgcggaccaagcgggagcaggaggtggccgagctgaagaaggccctggaggaggagaccaagaaccacgaggcccagatccaggacatgaggcagagacatgccacagccctggaggagctgtctgagcagctggagcaggccaagcgcttcaaggccaacctggagaagaacaagcagggcctggagacagacaacaaggagctggcctgtgaggtgaaggtgctgcagcaggtgaaggccgagagcgagcacaagaggaagaagctggatgcccaggtgcaggagctgcacgccaaggtgtctgagggggaccggctgcgggtggagctggccgagaaggccagcaagctgcagaatgagctggacaacgtgtccaccctgctggaggaggccgagaagaagggcatcaagtttgccaaggatgctgccagcctggagagccagctgcaggacacccaggagctgctgcaggaggagacccggcagaagctgaacctgagcagccgcatccggcagctggaggaggagaagaacagcctgcaggagcagcaggaggaggaggaggaggccaggaagaacctggagaagcaggtgctggccctgcagagccagctggccgacaccaagaagaaggtggatgatgacctgggcaccatcgagagcctggaggaggccaagaagaagctgctgaaggatgctgaggccctgagccagaggctggaggagaaggccctggcctatgacaagctggagaagaccaagaaccggctgcagcaggagctggatgacctgactgtggacctggaccaccagaggcaggtggccagcaacctggagaagaagcagaagaagtttgaccagctgctggccgaggagaagagcatcagcgcccgctatgcagaggagcgggacagagctgaggccgaggcccgggagaaggagaccaaggccctgagcctggcccgggccctggaggaggccctggaggccaaggaggagtttgagcggcagaacaagcagctgcgggctgacatggaggacctgatgagcagcaaggatgatgtgggcaagaatgtgcatgagctggagaagagcaagagggccctggagcagcaggtggaggagatgaggacccagctggaggagctggaggatgagctgcaggccacagaagatgccaagctgcggctggaggtgaacatgcaggccatgaaggcccagtttgagcgggacctgcagaccagagatgagcagaatgaggagaagaagaggctgctgatcaagcaggtgcgggagctggaggccgagctggaggatgagaggaagcagagggccctggccgtggccagcaagaagaagatggagattgacctgaaggacctggaggcccagattgaagctgccaacaaggccagagatgaagtcatcaagcagctgaggaagctgcaggcccagatgaaggactaccagcgggagctggaggaggcccgggccagcagagatgagatctttgcccagagcaaggagagcgagaagaagctgaagagcctggaggccgagatcctgcagctgcaggaggagctggccagcagcgagcgggccaggagacatgctgagcaggagagagatgagctggctgatgagatcaccaacagcgccagcggcaagagcgccctgctggatgagaagaggcggctggaggcccgcatcgcccagctggaggaggagctggaggaggagcagagcaacatggagctgctgaatgaccgcttcaggaagaccaccctgcaggtggacaccctgaatgctgagctggccgctgagaggtctgctgcccagaagagtgacaatgcccggcagcagctggagcggcagaacaaggagctgaaggccaagctgcaggagctggagggcgctgtgaagagcaagttcaaggccaccatcagcgccctggaggccaagattggccagctggaggagcagctggagcaggaggccaaggagagagctgctgccaacaagctggtgagaagaacagagaagaagctgaaggagatcttcatgcaggtggaggatgagaggagacatgctgaccagtacaaggagcagatggagaaggccaatgccaggatgaagcagctgaagaggcagctggaggaggccgaggaggaggccacccgggccaatgccagcaggaggaagctgcagcgggagctggatgatgccacagaggccaatgaaggcctgagccgggaggtgtccaccctgaagaaccggctgcggcggggcggccccatctccttcagcagcagccgctctggaagacggcagctgcacctggagggcgccagcctggagctgagtgatgatgacacagagagcaagaccagtgatgtgaatgagacccagcccccccagagcgagtag

SEQ ID NO: 316787 - DNA, 5979 bp, Artificial Sequence
  derived and/or modified sequence
atggcccagcggaccggcctggaggaccccgagcggtacctgttcgttgatagagccgtgatttataatccagcaacgcaggcagattggaccgcaaaaaaactggtctggatcccctcggagcgccacggattcgaagcagcttcaattaaagaagagcggggggacgaagtaatggttgagctcgccgagaacggaaagaaggccatggtcaacaaggatgatattcagaagatgaaccctccaaagttctccaaggtggaagacatggcagaacttacatgtctcaatgaagcttccgtactgcacaatctcaaagacaggtactatagcggcttgatttatacttatagtggactgttttgtgtagtcataaatccttataaaaatctacccatctacagtgaaaatattatcgaaatgtaccgcggaaagaaaagacacgagatgccaccacacatatacgcgatcagcgaatctgcatacagatgcatgcttcaagacagagaggatcaaagcatcctttgcactggcgagtccggagccggtaagaccgagaatacaaaaaaggtcattcagtatttggctcatgtggcatcttcccacaaggggcgaaaggatcataatattccccaagaaagccccaagccggtgaagcaccaggcctcagcgttattatacggagaactggaacggcaactgctacaggcaaaccccattttggagagctttggaaatgccaaaaccgttaagaatgacaacagttcccgcttcgggaagttcattcgaatcaatttcgatgtcacaggttatatcgtgggtgcaaacattgagacctatctgctggagaaatcacgagccgtacggcaagccaaagacgaacgaacgttccacattttttaccagctgctgtccggggcaggagaacaccttaaatcagatctattgctggaggggtttaataactacaggtttctctctaacgggtatattccgatcccaggtcagcaggataaagacaactttcaggagaccatggaagctatgcatatcatgggcttttcccatgaagagatcctaagtatgttaaaagttgtgtctagcgtgctacagtttggaaatatctcctttaagaaagaaaggaacaccgaccaggccagcatgccggagaacacagtcgcgcagaaattatgccatctgctcggcatgaatgtgatggaatttacgcgtgcaatccttacgccgcgtatcaaggtgggacgggattacgtgcaaaaagcccaaacgaaggaacaggcagacttcgctgtcgaggccttggccaaggctacttacgagagattgttcagatggttagtgcaccggatcaacaaggcccttgatcgtacaaaaagacagggcgctagcttcatcgggatattggatatcgccggctttgaaatattcgaattgaactcgttcgagcaactctgtatcaattacacaaatgaaaagctgcaacaactttttaaccatacgatgttcattctggaacaggaagagtaccagagggagggtattgaatggaattttattgattttggacttgatctgcaaccatgtatcgatctcattgagaggcctgccaatccccctggagtgctggccttgctggatgaagaatgctggtttcctaaggctactgataagacattcgtggagaaactggtgcaggagcagggatcccactctaagtttcagaaaccgcgccagctcaaggacaaggccgatttttgtattatacactacgccgggaaagtcgattacaaggccgacgaatggctgatgaaaaatatggaccccctgaacgacaacgtagccacactgctgcaccaaagctccgatagattcgtggccgagctgtggaaagacgtggataggatcgtggggttggaccaagtgaccggcatgaccgagacggcattcggatccgcctacaagactaaaaaaggcatgtttagaacagtgggacagctctataaagagtccctcacaaagttaatggccacattgcgaaataccaaccctaactttgtgcgctgtattataccaaatcacgagaaacgagcggggaagttggaccctcatctggtgttggaccagcttcggtgtaatggggtgctcgagggcatcagaatttgcagacagggattcccaaatcgcattgtatttcaagagttcaggcagagatatgagattctgacgccgaacgcaatccccaagggattcatggacggtaaacaggcctgtgaacgaatgatcagggccctggagctcgatcccaatctttaccggattggtcagagcaaaatattctttcgtgctggtgtgcttgcccatttggaggaagagagggaccttaagataacagatatcataatattctttcaggcggtgtgcagggggtacttggctcggaaagcctttgcaaagaaacagcaacaactgtcagccctgaaagttctgcagcggaactgcgcagcttatctgaaattgcgccattggcagtggtggcgcgtgtttacaaaggtgaaaccactgctgcaggtaacaagacaggaagaggaacttcaggcgaaggacgaagagttgctgaaggtgaaggagaaacagaccaaagtggaaggtgagttggaagagatggaaaggaaacaccaacagctgcttgaagagaagaacattcttgctgagcagctccaggcagagacggagctgttcgctgaggctgaagagatgcgtgcaagactcgctgccaaaaagcaggagttggaagaaatcttgcacgatctcgaaagccgtgttgaggaggaagaggagaggaaccaaattcttcagaacgaaaagaagaaaatgcaagcccacattcaggacctggaggagcagctcgacgaagaagagggcgccagacaaaagcttcagctggagaaagtgacagctgaagccaagataaagaagatggaggaagagattttgctgttggaggaccagaactcaaagtttatcaaggagaagaaactaatggaagaccgcatcgccgagtgttccagtcagctggctgaggaggaggagaaggccaagaacctggcaaaaatccgcaacaagcaagaggtcatgatcagcgacttggaggaacggctcaagaaggaggaaaagacaaggcaggaactggaaaaagctaagcggaaattggatggagagacaacggacttacaggatcagatagcggagctccaggcccaaattgacgagctgaagctgcagctggcaaaaaaggaggaagagctgcagggtgctctcgcaagaggcgatgatgaaactctgcacaagaataatgctctcaaagtggtgagagagctccaggcccagatcgccgaactgcaggaggatttcgagtcggagaaagccagccggaacaaagctgaaaagcagaagcgtgacctctctgaagagcttgaggccttgaagacagagctggaagacacccttgataccacggcggcacagcaagagctccgcaccaagagggaacaggaagtggcagaacttaaaaaggccctggaggaggagaccaagaatcacgaggcgcaaattcaggacatgaggcagcggcatgcaactgcactggaagagctcagtgagcagctggaacaggccaaacgcttcaaagctaatctcgagaaaaataagcagggtcttgagaccgacaataaagaactcgcttgtgaggtaaaggtgctgcagcaagtgaaagctgagagcgagcacaagcgcaaaaagctcgatgcgcaggtgcaggaacttcacgccaaagtgtcagaaggcgaccggctgcgcgttgagctcgctgaaaaagcttccaagctccaaaatgagctggacaatgtctctacactgctggaagaagcagagaaaaaggggatcaaatttgctaaagatgccgcgagcctggagtcccagctacaggacacacaggagctcttgcaggaagagacccggcagaaattgaacttatccagcaggatcagacaactggaggaggaaaagaatagcctgcaggagcaacaagaggaagaggaagaggctagaaaaaaccttgagaagcaggtgctggcactccagagccaactggctgataccaagaaaaaggtcgacgacgacctgggtaccattgaaagtctcgaggaggctaagaaaaagctcctgaaggacgctgaagccctgagccagcgcctggaagagaaagccctggcatacgataagctggagaaaacaaagaatcggctgcaacaagagttagacgacttaactgttgatttagaccaccagcggcaggtagcaagtaatcttgaaaaaaagcaaaagaaatttgatcagctgttggcagaagagaagagtatatctgcgcgatacgccgaggagcgtgatagagccgaagcagaagcgagggagaaggagactaaagccctatcactcgccagggccctggaggaggcgttggaagctaaagaggagtttgaaaggcagaataaacagctccgggctgatatggaagatctcatgtctagcaaggatgacgtcgggaaaaatgtacacgagcttgaaaagagcaagcgcgccctcgagcagcaagtggaagagatgcggacccagttggaagagctggaggacgagttacaggccacggaagacgctaagctcagactcgaagtgaacatgcaagccatgaaggcacagtttgaaagagacttgcagactcgcgatgagcagaatgaggagaaaaagcgcctgctcatcaaacaggtgcgggagctagaagctgagctcgaggatgagcggaaacagcgtgcgcttgcagtggcaagcaaaaagaagatggaaattgatctgaaggatctcgaggcccaaattgaggctgcaaataaagcacgcgatgaggtaattaagcagctgagaaagttgcaggcacagatgaaagactaccaaagggagctggaggaagctcgggcaagccgcgatgaaatctttgcccagtcaaaagaaagtgagaaaaaactgaagtctcttgaggctgaaatcttacagctgcaggaggagctcgcgtccagtgaacgggctaggcggcacgcagagcaagagagggatgagctggcggacgaaatcactaacagcgcttccggaaaatctgcattactggacgagaagcgaagactggaggctaggattgcccaactggaggaggagctggaggaggagcagtccaacatggagctgctgaatgatcggtttcggaaaaccacgctacaggtggacaccctcaatgccgaactggctgcagagaggagcgcagcccagaaaagcgataacgcccggcaacagctcgagcgacaaaacaaagaactgaaagcgaagctccaggaattagagggggccgtgaaaagtaagtttaaggcgacaataagcgctctagaggcgaaaattggccaactggaagagcagctggaacaggaggcaaaagaacgggctgccgctaacaagctggtccgtcggacggagaagaaattgaaggagatttttatgcaggttgaagacgaaagacgccacgcggaccagtataaggagcagatggagaaggccaacgcgcgaatgaaacagcttaagcgacaacttgaggaggcagaagaggaagcgactagagctaatgcttcccggaggaagttgcagagggaactcgatgatgccaccgaggcaaacgaggggctatctcgcgaagtctccacccttaaaaacagactgcgcagaggcggtccaatctctttcagctccagtcgtagtggcaggcgccaattgcacctggagggagcatctctggagctgtctgacgacgatacggaatctaaaacctctgatgtcaacgaaacacagccgcctcagagtgaatag

SEQ ID NO: 316788 - DNA, 7667 bp, Artificial Sequence
  derived and/or modified sequence
actgaggcgctggatctgtggtcgcggctggggacgtgcgcccgcgccaccatcttcggctgaagaggcaattgcttttggatcgttccatttacaatggcgcagagaactggactcgaggatccagagaggtatctctttgtggacagggctgtcatctacaaccctgccactcaagctgattggacagctaaaaagctagtgtggattccatcagaacgccatggttttgaggcagctagtatcaaagaagaacggggagatgaagttatggtggagttggcagagaatggaaagaaagcaatggtcaacaaagatgatattcagaagatgaacccacctaagttttccaaggtggaggatatggcagaattgacatgcttgaatgaagcttccgttttacataatctgaaggatcgctactattcaggactaatctatacttattctggactcttctgtgtagttataaacccttacaagaatcttccaatttactctgagaatattattgaaatgtacagagggaagaagcgtcatgagatgcctccacacatctatgctatatctgaatctgcttacagatgcatgcttcaagatcgtgaggaccagtcaattctttgcacgggtgagtcaggtgctgggaagacagaaaatacaaagaaagttattcagtaccttgcccatgttgcttcttcacataaaggaagaaaggaccataatattcctcaggaatcgcctaaaccagtgaaacaccaggcaagtgctcttctttatggggaacttgaacggcagcttttgcaagcaaatccaattctggaatcatttggaaatgcgaagactgtgaaaaatgataactcatctcgttttggcaaatttattcggatcaactttgatgtaactggctatatcgttggggccaacattgaaacataccttctggaaaagtctcgtgctgttcgtcaagcaaaagatgaacgtacttttcatatcttttaccagttgttatctggagcaggagaacacctaaagtctgatttgcttcttgaaggatttaataactacaggtttctctccaatggctatattcctattccgggacagcaagacaaagataatttccaggagaccatggaagcaatgcacataatgggcttctcccatgaagagattctgtcaatgcttaaagtagtatcttcagtgctacagtttggaaatatttctttcaaaaaggagagaaatactgatcaagcttccatgccagaaaatacagttgcgcagaagctctgccatcttcttgggatgaatgtgatggagtttactcgggccatcctgactccccggatcaaggtcggccgagactatgtgcaaaaagcccagaccaaagaacaggcagattttgcagtagaagcattggcaaaagctacctatgagcggctctttcgctggctcgttcatcgcatcaataaagctctggataggaccaaacgtcagggagcatctttcattggaatcctggatattgctggatttgaaatttttgagctgaactcctttgaacaactttgcatcaactacaccaatgagaagctgcagcagctgttcaaccacaccatgtttatcctagaacaagaggaataccagcgcgaaggcatcgagtggaacttcatcgatttcgggctggatctgcagccatgcatcgacctaatagagagacctgcgaaccctcctggtgtactggcccttttggatgaagaatgctggttccctaaagccacagataaaacctttgttgaaaaactggttcaagagcaaggttcccactccaagtttcagaaacctcgacaattaaaagacaaagctgatttttgcattatacattatgcagggaaggtggactataaggcagatgagtggctgatgaagaatatggaccccctgaatgacaacgtggccacccttttgcaccagtcatcagacagatttgtggcagagctttggaaagatgtggaccgtatcgtgggtctggatcaagtcactggtatgactgagacagcttttggctccgcatataaaaccaagaagggcatgtttcgtaccgttgggcaactctacaaagaatctctcaccaagctgatggcaactctccgaaacaccaaccctaactttgttcgttgtatcattccaaatcacgagaagagggctggaaaattggatccacacctagtcctagatcagcttcgctgtaacggtgtcctggaagggatccgaatctgtcgccagggcttccctaaccgaatagttttccaggaattcagacagagatatgagatcctaactccaaatgctattcctaaaggttttatggatggtaaacaggcctgtgaacgaatgatccgggctttagaattggacccaaacttgtacagaattggacagagcaagatatttttcagagctggagttctggcacacttagaggaagaaagagatttaaaaatcaccgatatcattatcttcttccaggccgtttgcagaggttacctggccagaaaggcctttgccaagaagcagcagcaactaagtgccttaaaggtcttgcagcggaactgtgccgcgtacctgaaattacggcactggcagtggtggcgagtcttcacaaaggtgaagccgcttctacaagtgactcgccaggaggaagaacttcaggccaaagatgaagagctgttgaaggtgaaggagaagcagacgaaggtggaaggagagctggaggagatggagcggaagcaccagcagcttttagaagagaagaatatccttgcagaacaactacaagcagagactgagctctttgctgaagcagaagagatgagggcaagacttgctgctaaaaagcaggaattagaagagattctacatgacttggagtctagggttgaagaagaagaagaaagaaaccaaatcctccaaaatgaaaagaaaaaaatgcaagcacatattcaggacctggaagaacagctagacgaggaggaaggggctcggcaaaagctgcagctggaaaaggtgacagcagaggccaagatcaagaagatggaagaggagattctgcttctcgaggaccaaaattccaagttcatcaaagaaaagaaactcatggaagatcgcattgctgagtgttcctctcagctggctgaagaggaagaaaaggcgaaaaacttggccaaaatcaggaataagcaagaagtgatgatctcagatttagaagaacgcttaaagaaggaagaaaagactcgtcaggaactggaaaaggccaaaagaaaactcgacggggagacgaccgacctgcaggaccagatcgcagagctgcaggcgcagattgatgagctcaagctgcagctggccaagaaggaggaggagctgcagggcgcactggccagaggtgatgatgaaacactccataagaacaatgcccttaaagttgtgcgagagctacaagcccaaattgctgaacttcaggaagactttgaatccgagaaggcttcacggaacaaggccgaaaagcagaaaagggacttgagtgaggaactggaagctctgaaaacagagctggaggacacgctggacaccacggcagcccagcaggaactacgtacaaaacgtgaacaagaagtggcagagctgaagaaagctcttgaggaggaaactaagaaccatgaagctcaaatccaggacatgagacaaagacacgcaacagccctggaggagctctcagagcagctggaacaggccaagcggttcaaagcaaatctagagaagaacaagcagggcctggagacagataacaaggagctggcgtgtgaggtgaaggtcctgcagcaggtcaaggctgagtctgagcacaagaggaagaagctcgacgcgcaggtccaggagctccatgccaaggtctctgaaggcgacaggctcagggtggagctggcggagaaagcaagtaagctgcagaatgagctagataatgtctccacccttctggaagaagcagagaagaagggtattaaatttgctaaggatgcagctagtcttgagtctcaactacaggatacacaggagcttcttcaggaggagacacgccagaaactaaacctgagcagtcggatccggcagctggaagaggagaagaacagtcttcaggagcagcaggaggaggaggaggaggccaggaagaacctggagaagcaagtgctggccctgcagtcccagttggctgataccaagaagaaagtagatgacgacctgggaacaattgaaagtctggaagaagccaagaagaagcttctgaaggacgcggaggccctgagccagcgcctggaggagaaggcactggcgtatgacaaactggagaagaccaagaaccgcctgcagcaggagctggacgacctcacggtggacctggaccaccagcgccaggtcgcctccaacttggagaagaagcagaagaagtttgaccagctgttagcagaagagaagagcatctctgctcgctatgccgaagagcgggaccgggccgaagccgaggccagagagaaagaaaccaaagccctgtcactggcccgggccctcgaggaagccctggaggccaaggaggagtttgagaggcagaacaagcagctccgagcagacatggaagacctcatgagctccaaagatgatgtgggaaaaaacgttcacgaacttgaaaaatccaaacgggccctagagcagcaggtggaggaaatgaggacccagctggaggagctggaagacgaactccaggccacggaagatgccaagcttcgtctggaggtcaacatgcaggccatgaaggcgcagttcgagagagacctgcaaaccagggatgagcagaatgaagagaagaagcggctgctgatcaaacaggtgcgggagctcgaggcggagctggaggatgagaggaaacagcgggcgcttgctgtagcttcaaagaaaaagatggagatagacctgaaggacctcgaagcccaaatcgaggctgcgaacaaagctcgggatgaggtgattaagcagctccgcaagctccaggctcagatgaaggattaccaacgtgaattagaagaagctcgtgcatccagagatgagatttttgctcaatccaaagagagtgaaaagaaattgaagagtctggaagcagaaatccttcaattgcaggaggaacttgcctcatctgagcgagcccgccgacacgccgagcaggagagagatgagctggcggacgagatcaccaacagcgcctctggcaagtccgcgctgctggatgagaagcggcgtctggaagctcggatcgcacagctggaggaggagctggaagaggagcagagcaacatggagctgctcaacgaccgcttccgcaagaccactctacaggtggacacactgaacgccgagctagcagccgagcgcagcgccgcccagaagagtgacaatgcacgccagcaactggagcggcagaacaaggagctgaaggccaagctgcaggaactcgagggtgctgtcaagtctaagttcaaggccaccatctcagccctggaggccaagattgggcagctggaggagcagcttgagcaggaagccaaggaacgagcagccgccaacaaattagtccgtcgcactgagaagaagctgaaagaaatcttcatgcaggttgaggatgagcgtcgacacgcggaccagtataaagagcagatggagaaggccaacgctcggatgaagcagcttaaacgccagctggaggaagcagaagaagaagcgacgcgtgccaacgcatctcggcgtaaactccagcgggaactggatgatgccaccgaggccaacgagggcctgagccgcgaggtcagcaccctgaagaaccggctgaggcggggtggccccatcagcttctcttccagccgatctggccggcgccagctgcaccttgaaggagcttccctggagctctccgacgatgacacagaaagtaagaccagtgatgtcaacgagacgcagccaccccagtcagagtaaagttgcaggaagccagaggaggcaatacagtgggacagttaggaatgcacccggggcctcctgcagatttcggaaattggcaagctacgggattccttcctgaaagatcaactgtgtcttaaggctctccagcctatgcatactgtatcctgcttcagacttaggtacaattgctcccctttttatatatagacacacacaggacacatatattaaacagattgtttcatcattgcatctattttccatatagtcatcaagagaccattttataaaacatggtaagaccctttttaaaacaaactccaggcccttggttgcgggtcgctgggttattggggcagcgccgtggtcgtcactcagtcgctctgcatgctctctgtcatacagacaggtaacctagttctgtgttcacgtggcccccgactcctcagccacatcaagtctcctagaccactgtggactctaaactgcacttgtctctctcatttccttcaaataatgatcaatgctatttcagtgagcaaactgtgaaaggggctttggaaagagtaggaggggtgggctggatcggaagcaacacccatttggggttaccatgtccatcccccaaggggggccctgcccctcgagtcgatggtgtcccgcatctactcatgtgaactggccttggcgagggctggtctgtgcatagaagggatagtggccacactgcagctgaggccccaggtggcagccatggatcatgtagacttccagatggtctcccgaaccgcctggctctgccggcgccctcctcacgtcaggagcaagcagccgtggacccctaagccgagctggtggaaggcccctccccatcgccagccgggccctcatgctgaccttgcaaattcagccgctgctttgagcccaaaatgggaatattggttttgtgtccgaggcttgttccaagtttgtcaatgaggtttatggagcctccagaacagatgccatcttcctgaatgttgacatgccagtgggtgtgactccttcatttttccttctcccttccctttggacagtgttacagtgaacacttagcatcctgtttttggttggtagttaagcaaactgacattacggaaagtgccttagacactacagtactaagacaatgttgaatatatcattcgcctctataacaatttaatgtattcagttttgactgtgcttcatatcatgtacctctctagtcaaagtggtattacagacattcagtgacaatgaatcagtgttaattctaaatccttgatcctctgcaatgtgcttgaaaacacaaaccttttgggttaaaagctttaacatctattaggaagaatttgtcctgtgggtttggaatcttggattttccccctttatgaactgtactggctgttgaccaccagacacctgaccgcaaatatcttttcttgtattcccatatttctagacaatgatttttgtaagacaataaatttattcattatagatatttgcgcctgctctgtttacttgaagaaaaaagcacccgtggagaataaagagacctcaataaacaagaataatcatgtgaa

SEQ ID NO: 316789 - DNA, 5978 bp, Artificial Sequence
  derived and/or modified sequence
atggctcagcgcacaggcctggaggatccagaacgttatctgttcgtagaccgcgcagtgatctacaacccagctacacaggctgattggaccgccaaaaagcttgtgtggattcccagcgagcgtcatggcttcgaagctgcaagtataaaagaggagcggggagatgaggttatggtggagcttgcggagaacggcaaaaaggcaatggtcaataaagatgacatacaaaagatgaacccaccaaaattctctaaagtggaagatatggcggagttgacatgtctcaatgaagcgagtgtgttgcacaacttgaaggataggtattactccggcttaatttatacttactcagggttattttgcgtggtcattaacccttacaaaaatctcccaatctattctgaaaacatcattgaaatgtacagagggaagaaacggcacgaaatgcctccccacatttatgccatatccgaatccgcttacagatgtatgctgcaagatagggaggaccagagcatcttgtgcacaggcgagtctggggctggaaaaacggagaacacaaagaaagtgatacagtatctggcccacgtggcctcttcccacaaggggagaaaagatcataacattccacaggaatcaccgaagcctgtcaagcaccaggcatccgccctgttgtacggagaactagaacgccaactgctgcaggccaacccgatcctggaatcctttgggaatgctaaaaccgtgaagaatgataattcctccaggttcggtaagttcataagaataaacttcgacgtcacagggtatatcgtcggggctaatatcgaaacgtaccttctcgaaaaatctagagccgtcaggcaggccaaagacgaaagaaccttccacatattttatcagctgctgtctggagccggagagcacctgaaatcagatctgttactggaagggtttaataactatcggtttttgtccaacgggtacattcctatccctgggcagcaagataaggacaattttcaggaaaccatggaagcgatgcatatcatggggttcagccatgaggaaatactgagtatgctgaaggtggtctcttccgttttgcagtttggaaatatctccttcaaaaaggagagaaatacggatcaggcctctatgccagaaaacactgtggcacagaaactgtgtcatctactaggcatgaacgttatggagttcacacgcgcaatccttacaccgcgtatcaaggtcggcagggactatgtacagaaagcccagaccaaggaacaggcagattttgcagttgaagctctggccaaagctacctacgagaggttgtttcggtggctagtgcatcgcataaataaggcacttgacagaaccaagcggcagggggctagcttcattggaattctggacatagccggattcgaaatctttgaattgaactctttcgagcaattatgtataaactatactaacgagaagcttcaacagctgtttaatcatacgatgttcattctggagcaagaagagtaccagagggagggaatagagtggaacttcattgatttcggactcgacttacagccttgcatcgacctgattgagaggcctgcgaatccgcctggtgtccttgcccttttagacgaagaatgttggtttcctaaagccacagataagacttttgtggagaagctggtgcaagagcaaggaagtcactcaaagttccagaagccaagacagctgaaggataaagcagacttttgcatcatccactatgcgggaaaagtagattataaggccgacgagtggctgatgaaaaacatggatcctctgaacgacaacgtcgcaactcttctgcatcaatctagcgatcggtttgtcgccgagctgtggaaagatgtggaccgcatcgtcggcttggatcaggtgactggcatgaccgagacagcctttggatctgcctacaaaacgaagaaggggatgttccgcaccgtggggcaactgtacaaggagagcctaacgaaactcatggctaccctccggaacaccaacccgaatttcgtgagatgtatcatccctaaccacgagaagcgagcagggaagcttgacccccacctcgtccttgatcagctcagatgcaacggggttctcgaaggcatcagaatctgtaggcaggggttccctaatcgaattgtgtttcaagaatttaggcaacggtatgaaatactgacccccaatgctatacccaaaggatttatggacgggaagcaggcttgcgaaagaatgattcgcgctctggagcttgatcccaacctgtataggattgggcagagtaagatatttttccgggcaggggttctggctcatctcgaagaagaacgggatctgaaaataactgacatcataattttctttcaagccgtctgtcgagggtacctggcaaggaaagcttttgcaaaaaaacagcagcagctgagcgccctgaaagtgctgcaaaggaactgtgcagcttatttgaagctccgtcactggcaatggtggcgagtgttcaccaaggtgaaaccactcctgcaggtgactaggcaggaggaagaacttcaggcaaaagatgaagagctcttgaaagtcaaagagaagcagaccaaggtggaaggagaattagaggaaatggaaaggaagcatcaacagctgcttgaggaaaaaaacatccttgccgagcagctgcaggccgaaacagaactctttgccgaagcggaagaaatgcgcgctcgattggcagccaagaaacaggaactggaggagatcctccacgatctcgagtcccgggtcgaagaggaggaggaacggaaccagatcttgcagaatgagaaaaagaaaatgcaagctcatatccaggatttggaggaacagctggacgaggaggaaggggctagacaaaagctgcagcttgagaaggtgactgccgaagcaaagattaaaaagatggaagaagagatcttgttactggaggaccagaattcaaagttcattaaggaaaagaaattgatggaggatcggatcgctgagtgctcctctcaactggcggaagaagaagagaaggcgaagaatctggccaagattcggaataaacaggaggtgatgatttccgacctggaggagcgtctcaagaaggaagagaaaacacgccaagagctcgagaaagccaagcgcaaacttgatggggagactactgacctccaagatcagattgcggaactgcaggcccagatagacgagctcaagctgcaactcgccaagaaagaggaagagctgcagggggcactggctcgtggggatgatgagacgctgcataaaaacaatgccttaaaagtagttagagagttacaggcccaaatcgccgagctgcaggaagatttcgagtctgagaaggcctccaggaataaagccgagaaacaaaaacgcgatctaagcgaagagctggaggctctgaagacagagttggaagacacactggatacaacggcagcacaacaggaactgagaacaaaacgcgagcaggaagttgctgagcttaaaaaagctctggaagaggagaccaaaaatcacgaggctcagattcaggatatgcggcagcggcacgcgactgcactggaagaactcagcgaacagctcgagcaggccaagcgcttcaaggcaaacctggagaaaaacaagcaggggctcgagacagataacaaggaactggcatgtgaagtgaaggtgctacagcaggttaaagccgagtctgaacacaaaagaaaaaagctggatgctcaggttcaggagctccacgcaaaagttagcgaaggtgatcgtttgcgcgtcgaacttgccgagaaggcctcaaaattgcagaacgagttggacaatgtgagcacactcttggaggaagcagagaagaagggcattaaatttgcgaaagacgcagcgtctttggaaagtcagctgcaggacacgcaggagctccttcaggaagagacccggcagaagctgaacctgagcagtcgaatcagacagttagaggaggagaaaaactctctccaggaacagcaggaagaggaggaggaagccaggaaaaacctggagaagcaagttttggctctgcaatctcaattggcggacaccaagaagaaagtggacgatgacctcggcacaatagagtccttggaggaggctaaaaaaaagctcttgaaggacgctgaagccctaagtcagaggttggaagaaaaggccttggcctatgacaagctcgagaaaaccaaaaaccgactacagcaggaactggacgacctgaccgtggaccttgaccaccagaggcaggttgccagcaacttggaaaaaaagcagaagaagtttgatcaattgttggctgaggaaaagagcatttctgctcggtacgcggaggagcgggaccgcgctgaggccgaggcacgggaaaaggagactaaagccctctccttggccagggccctcgaggaagcactggaagccaaggaggagttcgagagacagaataaacagctgcgggcagacatggaagatctgatgtcctccaaggatgatgtcggaaaaaatgtacacgagctcgaaaagtccaagagggctttagaacaacaggtggaggagatgagaacccagctggaagaattggaagacgagctgcaggctactgaggacgcaaaattgaggcttgaagtcaacatgcaggccatgaaggcacaattcgagagggacctacagacccgagatgaacaaaacgaagaaaaaaagagattgctgataaagcaggttcgagagctggaggccgagctggaagatgagaggaagcaacgagctctggccgtggccagcaagaagaagatggagatcgatctcaaagacctggaggcccaaatagaggccgctaacaaggcacgggatgaggtgatcaagcagcttcgcaagctgcaagcccagatgaaggattaccaacgggagctggaggaagcgcgagcttctcgcgatgagatcttcgcccaatcgaaggagagcgagaaaaaactcaagtccctggaagcagagattcttcagctgcaggaagagttggcctcgtcagaacgagccagacgccacgcagagcaggaacgcgacgagctggccgacgagatcactaactcggcttccggcaaaagcgctctgttggacgaaaagaggcggctcgaggctaggatcgctcaactggaagaggagctcgaggaggagcagtctaatatggagctgctcaacgatcgctttcggaagaccacactgcaggtcgatacgttaaacgccgagttagccgctgagcggtccgctgcccagaagagcgataacgccaggcagcaattagaaaggcagaataaggagctgaaagccaagctccaagagctggagggggcagtgaaaagtaaattcaaggccactatctcagcattggaagccaagattgggcagctcgaggaacaactggagcaagaggctaaggaacgggcagcagctaacaaactggtgcgcagaaccgagaagaagctgaaagagatctttatgcaggttgaggacgaaaggcgccatgcagaccagtacaaggaacagatggaaaaagccaatgctagaatgaagcagcttaagcggcagcttgaggaagcagaggaggaggctacacgcgctaatgccagtcgacgcaagttgcaaagggagctggacgatgccaccgaggcaaacgaaggtttatcccgcgaagtaagcacactaaaaaatcgcctcagacgcggaggtcctatctcattttccagcagtagatcaggaaggcggcaattacatctggaaggcgctagcttagaactctccgatgatgacacagaatctaagacctctgatgtcaacgagacacaacctccccagtccgaata

SEQ ID NO: 316790 - DNA, 7669 bp, Artificial Sequence
  derived and/or modified sequence
agcagtgctaaaggagcccggcggaggcagcggtgggtttgggactgaggcgctggatctgtggtcgcggctggggacgtgcgcccgcgccaccatcttcggctgaagaggcaattgcttttggatcgttccatttacaatggcgcagagaactggactcgaggatccagagaggtatctctttgtggacagggctgtcatctacaaccctgccactcaagctgattggacagctaaaaagctagtgtggattccatcagaacgccatggttttgaggcagctagtatcaaagaagaacggggagatgaagttatggtggagttggcagagaatggaaagaaagcaatggtcaacaaagatgatattcagaagatgaacccacctaagttttccaaggtggaggatatggcagaattgacatgcttgaatgaagcttccgttttacataatctgaaggatcgctactattcaggactaatctatacttattctggactcttctgtgtagttataaacccttacaagaatcttccaatttactctgagaatattattgaaatgtacagagggaagaagcgtcatgagatgcctccacacatctatgctatatctgaatctgcttacagatgcatgcttcaagatcgtgaggaccagtcaattctttgcacgggtgagtcaggtgctgggaagacagaaaatacaaagaaagttattcagtaccttgcccatgttgcttcttcacataaaggaagaaaggaccataatattcctggggaacttgaacggcagcttttgcaagcaaatccaattctggaatcatttggaaatgcgaagactgtgaaaaatgataactcatctcgttttggcaaatttattcggatcaactttgatgtaactggctatatcgttggggccaacattgaaacataccttctggaaaagtctcgtgctgttcgtcaagcaaaagatgaacgtacttttcatatcttttaccagttgttatctggagcaggagaacacctaaagtctgatttgcttcttgaaggatttaataactacaggtttctctccaatggctatattcctattccgggacagcaagacaaagataatttccaggagaccatggaagcaatgcacataatgggcttctcccatgaagagattctgtcaatgcttaaagtagtatcttcagtgctacagtttggaaatatttctttcaaaaaggagagaaatactgatcaagcttccatgccagaaaatacagttgcgcagaagctctgccatcttcttgggatgaatgtgatggagtttactcgggccatcctgactccccggatcaaggtcggccgagactatgtgcaaaaagcccagaccaaagaacaggcagattttgcagtagaagcattggcaaaagctacctatgagcggctctttcgctggctcgttcatcgcatcaataaagctctggataggaccaaacgtcagggagcatctttcattggaatcctggatattgctggatttgaaatttttgagctgaactcctttgaacaactttgcatcaactacaccaatgagaagctgcagcagctgttcaaccacaccatgtttatcctagaacaagaggaataccagcgcgaaggcatcgagtggaacttcatcgatttcgggctggatctgcagccatgcatcgacctaatagagagacctgcgaaccctcctggtgtactggcccttttggatgaagaatgctggttccctaaagccacagataaaacctttgttgaaaaactggttcaagagcaaggttcccactccaagtttcagaaacctcgacaattaaaagacaaagctgatttttgcattatacattatgcagggaaggtggactataaggcagatgagtggctgatgaagaatatggaccccctgaatgacaacgtggccacccttttgcaccagtcatcagacagatttgtggcagagctttggaaagatgtggaccgtatcgtgggtctggatcaagtcactggtatgactgagacagcttttggctccgcatataaaaccaagaagggcatgtttcgtaccgttgggcaactctacaaagaatctctcaccaagctgatggcaactctccgaaacaccaaccctaactttgttcgttgtatcattccaaatcacgagaagagggctggaaaattggatccacacctagtcctagatcagcttcgctgtaacggtgtcctggaagggatccgaatctgtcgccagggcttccctaaccgaatagttttccaggaattcagacagagatatgagatcctaactccaaatgctattcctaaaggttttatggatggtaaacaggcctgtgaacgaatgatccgggctttagaattggacccaaacttgtacagaattggacagagcaagatatttttcagagctggagttctggcacacttagaggaagaaagagatttaaaaatcaccgatatcattatcttcttccaggccgtttgcagaggttacctggccagaaaggcctttgccaagaagcagcagcaactaagtgccttaaaggtcttgcagcggaactgtgccgcgtacctgaaattacggcactggcagtggtggcgagtcttcacaaaggtgaagccgcttctacaagtgactcgccaggaggaagaacttcaggccaaagatgaagagctgttgaaggtgaaggagaagcagacgaaggtggaaggagagctggaggagatggagcggaagcaccagcagcttttagaagagaagaatatccttgcagaacaactacaagcagagactgagctctttgctgaagcagaagagatgagggcaagacttgctgctaaaaagcaggaattagaagagattctacatgacttggagtctagggttgaagaagaagaagaaagaaaccaaatcctccaaaatgaaaagaaaaaaatgcaagcacatattcaggacctggaagaacagctagacgaggaggaaggggctcggcaaaagctgcagctggaaaaggtgacagcagaggccaagatcaagaagatggaagaggagattctgcttctcgaggaccaaaattccaagttcatcaaagaaaagaaactcatggaagatcgcattgctgagtgttcctctcagctggctgaagaggaagaaaaggcgaaaaacttggccaaaatcaggaataagcaagaagtgatgatctcagatttagaagaacgcttaaagaaggaagaaaagactcgtcaggaactggaaaaggccaaaagaaaactcgacggggagacgaccgacctgcaggaccagatcgcagagctgcaggcgcagattgatgagctcaagctgcagctggccaagaaggaggaggagctgcagggcgcactggccagaggtgatgatgaaacactccataagaacaatgcccttaaagttgtgcgagagctacaagcccaaattgctgaacttcaggaagactttgaatccgagaaggcttcacggaacaaggccgaaaagcagaaaagggacttgagtgaggaactggaagctctgaaaacagagctggaggacacgctggacaccacggcagcccagcaggaactacgtacaaaacgtgaacaagaagtggcagagctgaagaaagctcttgaggaggaaactaagaaccatgaagctcaaatccaggacatgagacaaagacacgcaacagccctggaggagctctcagagcagctggaacaggccaagcggttcaaagcaaatctagagaagaacaagcagggcctggagacagataacaaggagctggcgtgtgaggtgaaggtcctgcagcaggtcaaggctgagtctgagcacaagaggaagaagctcgacgcgcaggtccaggagctccatgccaaggtctctgaaggcgacaggctcagggtggagctggcggagaaagcaagtaagctgcagaatgagctagataatgtctccacccttctggaagaagcagagaagaagggtattaaatttgctaaggatgcagctagtcttgagtctcaactacaggatacacaggagcttcttcaggaggagacacgccagaaactaaacctgagcagtcggatccggcagctggaagaggagaagaacagtcttcaggagcagcaggaggaggaggaggaggccaggaagaacctggagaagcaagtgctggccctgcagtcccagttggctgataccaagaagaaagtagatgacgacctgggaacaattgaaagtctggaagaagccaagaagaagcttctgaaggacgcggaggccctgagccagcgcctggaggagaaggcactggcgtatgacaaactggagaagaccaagaaccgcctgcagcaggagctggacgacctcacggtggacctggaccaccagcgccaggtcgcctccaacttggagaagaagcagaagaagtttgaccagctgttagcagaagagaagagcatctctgctcgctatgccgaagagcgggaccgggccgaagccgaggccagagagaaagaaaccaaagccctgtcactggcccgggccctcgaggaagccctggaggccaaggaggagtttgagaggcagaacaagcagctccgagcagacatggaagacctcatgagctccaaagatgatgtgggaaaaaacgttcacgaacttgaaaaatccaaacgggccctagagcagcaggtggaggaaatgaggacccagctggaggagctggaagacgaactccaggccacggaagatgccaagcttcgtctggaggtcaacatgcaggccatgaaggcgcagttcgagagagacctgcaaaccagggatgagcagaatgaagagaagaagcggctgctgatcaaacaggtgcgggagctcgaggcggagctggaggatgagaggaaacagcgggcgcttgctgtagcttcaaagaaaaagatggagatagacctgaaggacctcgaagcccaaatcgaggctgcgaacaaagctcgggatgaggtgattaagcagctccgcaagctccaggctcagatgaaggattaccaacgtgaattagaagaagctcgtgcatccagagatgagatttttgctcaatccaaagagagtgaaaagaaattgaagagtctggaagcagaaatccttcaattgcaggaggaacttgcctcatctgagcgagcccgccgacacgccgagcaggagagagatgagctggcggacgagatcaccaacagcgcctctggcaagtccgcgctgctggatgagaagcggcgtctggaagctcggatcgcacagctggaggaggagctggaagaggagcagagcaacatggagctgctcaacgaccgcttccgcaagaccactctacaggtggacacactgaacgccgagctagcagccgagcgcagcgccgcccagaagagtgacaatgcacgccagcaactggagcggcagaacaaggagctgaaggccaagctgcaggaactcgagggtgctgtcaagtctaagttcaaggccaccatctcagccctggaggccaagattgggcagctggaggagcagcttgagcaggaagccaaggaacgagcagccgccaacaaattagtccgtcgcactgagaagaagctgaaagaaatcttcatgcaggttgaggatgagcgtcgacacgcggaccagtataaagagcagatggagaaggccaacgctcggatgaagcagcttaaacgccagctggaggaagcagaagaagaagcgacgcgtgccaacgcatctcggcgtaaactccagcgggaactggatgatgccaccgaggccaacgagggcctgagccgcgaggtcagcaccctgaagaaccggctgaggcggggtggccccatcagcttctcttccagccgatctggccggcgccagctgcaccttgaaggagcttccctggagctctccgacgatgacacagaaagtaagaccagtgatgtcaacgagacgcagccaccccagtcagagtaaagttgcaggaagccagaggaggcaatacagtgggacagttaggaatgcacccggggcctcctgcagatttcggaaattggcaagctacgggattccttcctgaaagatcaactgtgtcttaaggctctccagcctatgcatactgtatcctgcttcagacttaggtacaattgctcccctttttatatatagacacacacaggacacatatattaaacagattgtttcatcattgcatctattttccatatagtcatcaagagaccattttataaaacatggtaagaccctttttaaaacaaactccaggcccttggttgcgggtcgctgggttattggggcagcgccgtggtcgtcactcagtcgctctgcatgctctctgtcatacagacaggtaacctagttctgtgttcacgtggcccccgactcctcagccacatcaagtctcctagaccactgtggactctaaactgcacttgtctctctcatttccttcaaataatgatcaatgctatttcagtgagcaaactgtgaaaggggctttggaaagagtaggaggggtgggctggatcggaagcaacacccatttggggttaccatgtccatcccccaaggggggccctgcccctcgagtcgatggtgtcccgcatctactcatgtgaactggccttggcgagggctggtctgtgcatagaagggatagtggccacactgcagctgaggccccaggtggcagccatggatcatgtagacttccagatggtctcccgaaccgcctggctctgccggcgccctcctcacgtcaggagcaagcagccgtggacccctaagccgagctggtggaaggcccctccccatcgccagccgggccctcatgctgaccttgcaaattcagccgctgctttgagcccaaaatgggaatattggttttgtgtccgaggcttgttccaagtttgtcaatgaggtttatggagcctccagaacagatgccatcttcctgaatgttgacatgccagtgggtgtgactccttcatttttccttctcccttccctttggacagtgttacagtgaacacttagcatcctgtttttggttggtagttaagcaaactgacattacggaaagtgccttagacactacagtactaagacaatgttgaatatatcattcgcctctataacaatttaatgtattcagttttgactgtgcttcatatcatgtacctctctagtcaaagtggtattacagacattcagtgacaatgaatcagtgttaattctaaatccttgatcctctgcaatgtgcttgaaaacacaaaccttttgggttaaaagctttaacatctattaggaagaatttgtcctgtgggtttggaatcttggattttccccctttatgaactgtactggctgttgaccaccagacacctgaccgcaaatatcttttcttgtattcccatatttctagacaatgatttttgtaagacaataaatttattcattatagatatttgcgcctgctctgtttacttgaagaaaaaagcacccgtggagaataaagagacctcaataaacaagaataatcatgtgaacgtggaa

SEQ ID NO: 316791 - DNA, 732 bp, Artificial Sequence
  derived and/or modified sequence
ctgaggcgctggatctgtggtcgcggctggggacgtgcgcccgcgccaccatcttcggctgaagtaactgagggcaaacccatcagacaaccagagccataatttgtggtcaccgctgaaatttaccttggaaactcgaggcaattgcttttggatcgttccatttacaatggcgcagagaactggactcgaggatccagagaggtatctctttgtggacagggctgtcatctacaaccctgccactcaagctgattggacagctaaaaagctagtgtggattccatcagaacgccatggttttgaggcagctagtatcaaagaagaacggggagatgaagttatggtggagttggcagagaatggaaagaaagcaatggtcaacaaagatgatattcagaagatgaacccacctaagttttccaaggtggaggatatggcagaattgacatgcttgaatgaagcttccgttttacataatctgaaggatcgctactattcaggactaatctatacttattctggactcttctgtgtagttataaacccttacaagaatcttccaatttactctgagaatattattgaaatgtacagagggaagaagcgtcatgagatgcctccacacatctatgctatatctgaatctgcttacagatgcatgcttcaagatcgtgaggaccagtcaattctttgcacgggtgagtcaggtgctgggaagacagaaaatac

SEQ ID NO: 316792 - protein, 216 aa, Artificial Sequence
  derived and/or modified sequence
MEKLPRSPREALISGWLFFRYLAIGVYVGLATVAAATWWFVYDAEGPHINFYQLRNFLKCSEDNPLFAGIDCEVFESRFPTTMALSVLVTIEMCNALNSVSENQSLLRMPPWMNPWLLVAVAMSMALHFLILLVPPLPLIFQVTPLSGRQWVVVLQISLPVILLDEALKYLSRNHMHGPGTQHRLAVRAAQRGRKQGRNEPEVSAGNRVESPGPGG

SEQ ID NO: 316793 - DNA, 651 bp, Artificial Sequence
  derived and/or modified sequence
atggagaagctacctaggtcaccgagagaggcattaattagtggatggcttttcttcaggtacttagccattggagtgtatgttgggctcgccactgttgcagctgctacatggtggttcgtttatgatgccgagggtcctcacattaatttttatcagctgaggaattttttaaagtgttccgaggacaacccactctttgcaggcatcgactgcgaagtgttcgagagcaggttccctacaacaatggcgctgagcgtcctggtcaccatcgagatgtgcaatgcactgaacagcgtcagcgagaatcagtctcttctacggatgccgccatggatgaacccttggcttctggtagcagttgcaatgtccatggctttgcacttcttaattctcttggtgccacccctgcctctcatctttcaggtcaccccactcagtgggcgtcaatgggtggtggtcctgcagattagcttgcctgtgattcttctggacgaggccctgaaatatctctcaagaaatcacatgcatggcccagggacacagcatagactcgccgtgcgagccgcccagcgcgggcgcaagcagggccggaatgagcctgaagttagtgccggcaatagggtcgagtcccctggcccaggaggatag

SEQ ID NO: 316794 - DNA, 651 bp, Artificial Sequence
  derived and/or modified sequence
atggagaagctgcccaggagcccccgggaggccctgatcagcggctggctgttcttccgctacctggccatcggcgtgtatgtgggcctggccaccgtggccgccgccacctggtggtttgtgtatgatgctgagggcccccacatcaacttctaccagctgaggaacttcctgaagtgcagcgaggacaaccccctgtttgctggcatcgactgtgaggtgtttgagagccgcttccccaccaccatggccctgtctgtgctggtgaccatcgagatgtgcaatgccctgaacagcgtgtctgagaaccagagcctgctgaggatgccaccctggatgaacccctggctgctggtggccgtggccatgtccatggccctgcacttcctgatcctgctggtgccccccctgcccctcatcttccaggtgacccccctgagcggccggcagtgggtggtggtgctgcagatcagcctgcccgtcatcctgctggatgaggccctgaagtacctgagcaggaaccacatgcacggccctggcacccagcaccggctggccgtgcgggccgcccagaggggcaggaagcagggcagaaatgaacctgaggtgtctgctggcaacagagtggagagccctggccctgggggctag

SEQ ID NO: 316795 - DNA, 651 bp, Artificial Sequence
  derived and/or modified sequence
atggagaagctgccccggagcccccgggaggccctgatcagcggctggcttttctttcgatacttggccatcggtgtctatgtgggactggctaccgtagccgccgctacctggtggtttgtctatgatgccgagggccctcatattaacttctaccagttacgaaatttcctcaaatgctctgaagacaatcccttatttgccggaatcgattgcgaggtcttcgagtcacggttccccaccacaatggccctctccgttctggtgactattgaaatgtgtaacgcactgaactctgtctccgagaatcaatctttgttgagaatgcctccctggatgaatccgtggctgctggtggctgtagcgatgagcatggcattgcattttctgatactgctggtgcccccccttcccttaatctttcaggtgacccctctgtcgggtaggcagtgggtagtggtgctgcagatcagtttgccggtgattttgctggacgaggcgcttaaatatctctctcggaaccacatgcatggaccaggaacacagcatcggctcgcggtcagagctgctcaacggggtcgcaagcaggggcgaaatgagcccgaggtatcggcagggaatcgagtcgaatctcccggccccggcgggtag

SEQ ID NO: 316796 - DNA, 651 bp, Artificial Sequence
  derived and/or modified sequence
atggagaaattgccgagatcgcctcgtgaggccctgattagtgggtggctattttttaggtatctggcaatcggagtgtacgtcggtctagccacagtggcagctgcaacgtggtggttcgtgtatgatgctgaggggccacacatcaatttctatcagctgcgtaactttctgaagtgcagtgaggataatcccctatttgctggtatcgactgcgaagtgttcgaatcccggttccctacaacaatggctctgtctgtcttggtgaccatcgagatgtgtaatgcacttaacagcgtaagcgagaatcaatcgctgcttagaatgcctccctggatgaacccttggctgctggtcgcagtagccatgtctatggcactgcatttcctcattctccttgtgccgcctctgccccttattttccaggttacacccttgtcgggacgtcagtgggttgtcgttctgcagatcagtttacccgtgatcctgctggacgaggcattaaaatatctgagtcggaatcatatgcatgggcctggaactcagcatcgattagccgtccgcgctgcccagaggggcaggaagcaaggcaggaacgagcccgaggtcagcgccggtaatcgggtggaatcacccggtcctggcggttag

SEQ ID NO: 316797 - DNA, 4162 bp, Artificial Sequence
  derived and/or modified sequence
ccgccgccactgccgtcgggtaaggtcccagcacggacatggcctcgcgcggcgcccgcccgggcccgagtcccccgcgccccgctttgtagccccccggcggagaggcggcctcgacggtgcggacggcgcagacggccgggcgggcggcatggaggcggcgcatctgctcccggccgccgacgtgctgcgccacttctcggtgacagccgagggcggcctgagcccggcgcaggtgaccggcgcgcgggagcgctacggccccaacgagctcccgagtgaggaagggaagtccctgtgggagctggtgctggaacagtttgaggacctcctggtgcgcatcctgctgctggctgcccttgtctcctttgtcctggcctggttcgaggagggcgaggagaccacgaccgccttcgtggagcccctggtcatcatgctgatcctcgtggccaacgccattgtgggcgtgtggcaggaacgcaacgccgagagtgccatcgaggccctgaaggagtatgagcctgagatgggcaaggtgatccgctcggaccgcaagggcgtgcagaggatccgtgcccgggacatcgtcccaggggacattgtagaagtggcagtgggggacaaagtgcctgctgacctccgcctcatcgagatcaagtccaccacgctgcgagtggaccagtccatcctgacgggtgaatctgtgtccgtgaccaagcacacagaggccatcccagaccccagagctgtgaaccaggacaagaagaacatgctgttttctggcaccaatatcacatcgggcaaagcggtgggtgtggccgtggccaccggcctgcacacggagctgggcaagatccggagccagatggcggcagtcgagcccgagcggacgccgctgcagcgcaagctggacgagtttggacggcagctgtcccacgccatctctgtgatctgcgtggccgtgtgggtcatcaacatcggccacttcgccgacccggcccacggtggctcctggctgcgtggcgctgtctactacttcaagatcgccgtggccctggcggtggcggccatccccgagggcctcccggctgtcatcactacatgcctggcactgggcacgcggcgcatggcacgcaagaacgccatcgtgcgaagcctgccgtccgtggagaccctgggctgcacctcagtcatctgctccgacaagacgggcacgctcaccaccaatcagatgtctgtctgccggatgttcgtggtagccgaggccgatgcgggctcctgccttttgcacgagttcaccatctcgggtaccacgtatacccccgagggcgaagtgcggcagggggatcagcctgtgcgctgcggccagttcgacgggctggtggagctggcgaccatctgcgccctgtgcaacgactcggctctggactacaacgaggccaagggtgtgtatgagaaggtgggagaggccacggagacagctctgacttgcctggtggagaagatgaacgtgttcgacaccgacctgcaggctctgtcccgggtggagcgagctggcgcctgtaacacggtcatcaagcagctgatgcggaaggagttcaccctggagttctcccgagaccggaaatccatgtccgtgtactgcacgcccacccgccctcaccctactggccagggcagcaagatgtttgtgaagggggctcctgagagtgtgatcgagcgctgtagctcagtccgcgtggggagccgcacagcacccctgacccccacctccagggagcagatcctggcaaagatccgggattggggctcaggctcagacacgctgcgctgcctggcactggccacccgggacgcgcccccaaggaaggaggacatggagctggacgactgcagcaagtttgtgcagtacgagacggacctgaccttcgtgggctgcgtaggcatgctggacccgccgcgacctgaggtggctgcctgcatcacacgctgctaccaggcgggcatccgcgtggtcatgatcacgggggataacaaaggcactgccgtggccatctgccgcaggcttggcatctttggggacacggaagacgtggcgggcaaggcctacacgggccgcgagtttgatgacctcagccccgagcagcagcgccaggcctgccgcaccgcccgctgcttcgcccgcgtggagcccgcacacaagtcccgcatcgtggagaacctgcagtcctttaacgagatcactgctatgactggcgatggagtgaacgacgcaccagccctgaagaaagcagagatcggcatcgccatgggctcaggcacggccgtggccaagtcggcggcagagatggtgctgtcagatgacaactttgcctccatcgtggctgcggtggaggagggccgggccatctacagcaacatgaagcaattcatccgctacctcatctcctccaatgttggcgaggtcgtctgcatcttcctcacggcaattctgggcctgcccgaagccctgatccctgtgcagctgctctgggtgaacctggtgacagacggcctacctgccacggctctgggcttcaacccgccagacctggacatcatggagaagctgccccggagcccccgagaagccctcatcagtggctggctcttcttccgatacctggctatcggagtgtacgtaggcctggccacagtggctgccgccacctggtggtttgtgtatgacgccgagggacctcacatcaacttctaccagctgaggaacttcctgaagtgctccgaagacaacccgctctttgccggcatcgactgtgaggtgttcgagtcacgcttccccaccaccatggccttgtccgtgctcgtgaccattgaaatgtgcaatgccctcaacagcgtctcggagaaccagtcgctgctgcggatgccgccctggatgaacccctggctgctggtggctgtggccatgtccatggccctgcacttcctcatcctgctcgtgccgcccctgcctctcattttccaggtgaccccactgagcgggcgccagtgggtggtggtgctccagatatctctgcctgtcatcctgctggatgaggccctcaagtacctgtcccggaaccacatgcacgggccagggacacagcatcgtctcgctgtcagagctgctcagagagggaggaagcagggaagaaatgagccagaagtgagcgctgggaacagagtggagtctccgggcccgggcgggtgaagggtcagagagacggacacaaggagccggcaggagggcggagcgaggatgtcctttcccgggagacaagtcgggaaagcctggctggactgcctcagccccgcgcgcctcctggactcagggttccccgtcctgagctcgggagatgttcagagtcacactgccgcccggtctgccacgcagaggtccaacttgccacccgcgtccctggtacctgagaccaccgacatcctcaggttcctgaccgtggcgcccttctacccagcccagtgtgcggccgccgcgctgtctgcacagctgggggcctctgagcctggtgggcttcctggactcttggcctcactccttgccccctccccacgacacccatgagccgaaaggatgtcactaaggatggctgattccccaagggcacccgctctccctccctccctgctggaggaacacgtcatatcagatgagaggaagatggcctctgatggacagaatttttctcttaactcagcttttgctactttggcaaaaactagcgaggggtagcagaaacctgcaccaaggattgtccctatgtcttggccactcctagagcgtgtgcagactgatgattttatatgtaaatcaagactcacatccctttcctagtcccccacatccaaagcccctcagcctgccttgcagaccaatgggctccatgttctgtagccccctcccctacgcctcacccctcctccctctcacaggttctgggcggccagtgagagaaacgcagtgggggaggcagggagtctggtgcctgcagagattctctgcttctttcctggggggaggtggggaggtcttagcaggagcgggccctgtacccacctgctgacctgctgtttggtagagaaataaaggttgtgtgactggggg

SEQ ID NO: 316798 - DNA, 651 bp, Artificial Sequence
  derived and/or modified sequence
atggagaagctgcccagaagccccagagaggccctgatcagcggctggctgttcttcagatacctggccatcggcgtgtacgtgggcctggccaccgtggccgccgccacctggtggttcgtgtacgacgccgagggcccccacatcaacttctaccagctgagaaacttcctgaagtgcagcgaggacaaccccctgttcgccggcatcgactgcgaggtgttcgagagcagattccccaccaccatggccctgagcgtgctggtgaccatcgagatgtgcaacgccctgaacagcgtgagcgagaaccagagcctgctgagaatgcccccctggatgaacccctggctgctggtggccgtggccatgagcatggccctgcacttcctgatcctgctggtgccccccctgcccctgatcttccaggtgacccccctgagcggcagacagtgggtggtggtgctgcagatcagcctgcccgtgatcctgctggacgaggccctgaagtacctgagcagaaaccacatgcacggccccggcacccagcacagactggccgtgagagccgcccagagaggcagaaagcagggcagaaacgagcccgaggtgagcgccggcaacagagtggagagccccggccccggcggctag

SEQ ID NO: 316799 - protein, 999 aa, Artificial Sequence
  derived and/or modified sequence
MEAAHLLPAADVLRHFSVTAEGGLSPAQVTGARERYGPNELPSEEGKSLWELVLEQFEDLLVRILLLAALVSFVLAWFEEGEETTTAFVEPLVIMLILVANAIVGVWQERNAESAIEALKEYEPEMGKVIRSDRKGVQRIRARDIVPGDIVEVAVGDKVPADLRLIEIKSTTLRVDQSILTGESVSVTKHTEAIPDPRAVNQDKKNMLFSGTNITSGKAVGVAVATGLHTELGKIRSQMAAVEPERTPLQRKLDEFGRQLSHAISVICVAVWVINIGHFADPAHGGSWLRGAVYYFKIAVALAVAAIPEGLPAVITTCLALGTRRMARKNAIVRSLPSVETLGCTSVICSDKTGTLTTNQMSVCRMFVVAEADAGSCLLHEFTISGTTYTPEGEVRQGDQPVRCGQFDGLVELATICALCNDSALDYNEAKGVYEKVGEATETALTCLVEKMNVFDTDLQALSRVERAGACNTVIKQLMRKEFTLEFSRDRKSMSVYCTPTRPHPTGQGSKMFVKGAPESVIERCSSVRVGSRTAPLTPTSREQILAKIRDWGSGSDTLRCLALATRDAPPRKEDMELDDCSKFVQYETDLTFVGCVGMLDPPRPEVAACITRCYQAGIRVVMITGDNKGTAVAICRRLGIFGDTEDVAGKAYTGREFDDLSPEQQRQACRTARCFARVEPAHKSRIVENLQSFNEITAMTGDGVNDAPALKKAEIGIAMGSGTAVAKSAAEMVLSDDNFASIVAAVEEGRAIYSNMKQFIRYLISSNVGEVVCIFLTAILGLPEALIPVQLLWVNLVTDGLPATALGFNPPDLDIMEKLPRSPREALISGWLFFRYLAIGVYVGLATVAAATWWFVYDAEGPHINFYQLRNFLKCSEDNPLFAGIDCEVFESRFPTTMALSVLVTIEMCNALNSVSENQSLLRMPPWMNPWLLVAVAMSMALHFLILLVPPLPLIFQVTPLSGRQWVVVLQISLPVILLDEALKYLSRNHMHEEMSQK

SEQ ID NO: 316800 - DNA, 3000 bp, Artificial Sequence
  derived and/or modified sequence
atggaggctgctcacctgttacctgctgccgatgtgctgaggcacttctctgtcaccgcagaaggagggctctctccggctcaagtgacgggagcacgggagcggtatgggcctaacgaactgccatctgaggaggggaaaagtctttgggagcttgtcctggagcagttcgaggacttgctagtcaggattctgctgttagctgcactggtgagcttcgtcctcgcctggtttgaggaaggtgaggaaactaccacggccttcgtcgagcctctagtaattatgctgatcctggttgcaaatgctatcgtaggcgtttggcaggagcggaacgccgaatccgcgatagaggctctcaaggagtatgagccagagatgggaaaagtgatacgatctgaccggaagggcgtgcagcgaataagggctagggacattgtcccgggcgacattgtcgaggttgcagtgggagacaaggtgcccgctgacttgaggcttattgagatcaagtccaccaccttgagagtggatcagtccatcctgacaggcgaatctgtttcagtgaccaagcatacagaagctattccggatccaagagctgtgaaccaggacaagaagaacatgctattctccgggactaacattacgtcaggaaaggctgtgggggtggcagtggccaccggtctacacaccgagcttggaaagattcgtagccaaatggccgccgtggagcccgagcggacccccctgcagaggaagctcgacgaatttggacggcaactcagccacgcaatctctgtgatctgcgtggcggtctgggtcataaatattggacacttcgccgatcctgctcatggtggttcatggttacgaggggctgtgtactatttcaagatcgctgtcgccctggctgtggcagccatcccggagggcctgcccgccgttatcaccacatgcctggctctgggtacacgaagaatggcgagaaagaatgccattgtgaggagccttccgtccgtggaaaccctgggatgcacatctgtgatctgtagcgacaaaaccggtacactcaccaccaatcagatgtccgtttgcaggatgtttgtggtcgccgaggcagacgccggctcttgtctcctgcacgaattcactatttcgggcacaacatacaccccagaaggagaggtccggcagggcgatcagcctgtacgatgcgggcagtttgacggtctcgtcgaactagcaacaatttgcgctttgtgtaatgattcggccctggattataatgaagctaaaggggtctatgagaaggtgggcgaggctaccgaaactgcattgacttgtctggtcgagaagatgaacgtgtttgacacagacttgcaagccctcagccgggtcgaacgagcgggtgcctgtaacacagtgatcaagcagctgatgcggaaagagtttacgctggagttttcacgggatcgcaagtccatgtctgtttattgcaccccaactaggcctcatcccaccggacagggcagtaagatgttcgtcaaaggcgcgcctgagagcgtgatcgaacggtgcagctccgtgagagttggatctcgcacggcaccactgaccccgacgtcccgcgagcagatcctggcaaagatccgcgactgggggtccggaagtgacaccctgagatgtttggccctggctaccagagacgctccccctagaaaggaagacatggaattagacgattgctcgaagttcgtacagtacgagactgatctgacatttgtgggatgtgttggaatgcttgacccaccacgtcctgaggtggccgcgtgtatcacgagatgttatcaggctgggattcgcgtcgtcatgattacaggcgataataagggtactgcggtggccatctgcagacgactgggcattttcggcgatacagaggatgtggctggcaaggcctataccggccgtgaattcgacgacctgtcgcctgagcagcaacggcaagcctgtcggaccgcccgttgtttcgcaagagttgaacccgctcacaagagcaggatcgtcgagaacctccagtccttcaatgagatcacagccatgacgggcgacggggtaaatgacgcccccgctctgaagaaggccgagattggcatcgccatgggctcagggactgccgtggctaagagcgctgcagagatggttctatccgatgataattttgcctccatcgtggcagcagtggaggaggggcgagccatttattctaacatgaaacagtttattcgatacctgatcagttctaatgttggggaggtggtgtgcatttttctaacagctattctggggctgccagaggccctcatcccggtgcagctgctctgggttaacttggtgaccgatggtctgcccgccacagcacttggcttcaatccacctgacttggatatcatggaaaagctgccgcgctcgccccgcgaggccctgattagtgggtggttgttcttccgctatctggcaattggtgtctacgtgggcctggccaccgtggccgccgcgacatggtggtttgtctatgatgctgaagggccgcacattaatttctatcagctccggaattttctcaaatgctctgaggacaaccccttgtttgcgggcattgattgtgaggtgtttgagagccggtttcctacaaccatggccctgtccgtcctcgtaacaatcgagatgtgcaatgccttgaactcagtgtccgagaaccaatctttgttgaggatgccaccctggatgaatccctggctccttgtggccgtggccatgtcgatggcactgcatttcctgatcctcctagttccacctctgcccctgattttccaagtgactcctctgtccggacgtcagtgggtcgtggtcttacagatctcactgccagtaattttacttgatgaggccctgaaatatctgtccagaaaccatatgcatgaggaaatgagtcagaagtag

SEQ ID NO: 316801 - DNA, 3000 bp, Artificial Sequence
  derived and/or modified sequence
atggaggccgcccacctgctgcctgctgctgatgtgctgcggcacttctctgtgacagctgagggcggcctgagccctgcccaggtgactggagcccgggagagatatggccccaatgagctgcccagcgaggagggcaagagcctgtgggagctggtgctggagcagtttgaggacctgctggtgcgcatcctgctgctggccgccctggtgtcctttgtgctggcctggtttgaggagggggaggagaccaccacagcctttgtggagcccctggtgatcatgctgatcctggtggccaatgccatcgtgggcgtgtggcaggagagaaatgctgagagcgccatcgaggccctgaaggagtatgagcctgagatgggcaaggtgatccgcagtgacagaaaaggagtgcagaggatccgggcccgggacatcgtgcctggggacatcgtggaggtggccgtgggggacaaggtgcctgctgacctgcggctcatcgagatcaagagcaccaccctgcgggtggaccagagcatcctgactggagagagcgtgtctgtgaccaagcacacagaggccatcccagaccccagggctgtgaaccaggacaagaagaacatgctgttcagcggcaccaacatcaccagcggcaaggctgtgggcgtggccgtggccaccggcctgcacacagagctgggcaagatccgcagccagatggctgctgtggagcctgagaggacccccctgcagaggaagctggatgaatttggccggcagctgagccacgccatcagcgtcatctgtgtggccgtgtgggtgatcaacatcggccactttgctgaccctgcccacggcggctcctggctgcggggagctgtgtactacttcaagattgctgtggccctggccgtggccgccatccctgagggcctgcctgctgtgatcaccacctgcctggccctgggcaccaggaggatggccaggaagaatgccatcgtgcgcagcctgcccagcgtggagaccctgggctgcaccagcgtcatctgcagcgacaagacaggcaccctgaccaccaaccagatgtctgtgtgcaggatgtttgtggtggccgaggctgatgctggcagctgcctgctgcacgagttcaccatcagcggcaccacctacaccccagagggggaggtgcggcagggcgaccagcctgtgcgctgtggccagtttgatggcctggtggagctggccaccatctgtgccctgtgcaatgattctgccctggactacaatgaggccaagggcgtgtatgagaaggtgggggaggccacagaaacagccctgacctgcctggtggagaagatgaatgtgtttgacacagacctgcaggccctgagccgggtggagcgggccggggcctgcaacacagtcatcaagcagctgatgaggaaggagttcaccctggagttcagccgggacaggaagtccatgtctgtgtactgcacccccacccggccccaccccaccggccagggcagcaagatgtttgtgaagggggcccctgagagcgtcatcgagcgctgcagctctgtgcgggtgggcagcaggacagcccccctgacccccaccagccgggagcagatcctggccaagatccgggactggggcagcggcagtgacaccctgcgctgcctggccctggccaccagagatgccccacccaggaaggaggacatggagctggatgactgcagcaagtttgtgcagtatgaaacagacctgacctttgtgggctgtgtgggcatgctggacccccccaggcctgaggtggccgcctgcatcacccgctgctaccaggccggcatccgggtggtgatgatcactggagacaacaagggcacagctgtggccatctgccggcggctgggcatctttggagacacagaagatgtggccggcaaggcctacacaggccgggagtttgatgacctgagccctgagcagcagaggcaggcctgcaggacagcccgctgctttgcccgggtggagcccgcccacaagagcagaattgtggagaacctgcagagcttcaatgagatcacagccatgactggagatggagtgaatgatgccccagccctgaagaaggccgagatcggcatcgccatgggcagcggcacagctgtggccaagtctgctgctgagatggtgctgagtgatgacaactttgccagcatcgtggccgctgtggaggagggccgggccatctacagcaacatgaagcagttcatccgctacctgatcagcagcaatgtgggggaggtggtgtgcatcttcctgacagccatcctgggcctgcctgaggccctgatccctgtgcagctgctgtgggtgaacctggtgacagatggcctgcctgccacagccctgggcttcaaccccccagacctggacatcatggagaagctgcccaggagcccccgggaggccctgatcagcggctggctgttcttccgctacctggccatcggcgtgtatgtgggcctggccaccgtggccgccgccacctggtggtttgtgtatgatgctgagggcccccacatcaacttctaccagctgaggaacttcctgaagtgcagcgaggacaaccccctgtttgctggcatcgactgtgaggtgtttgagagccgcttccccaccaccatggccctgtctgtgctggtgaccatcgagatgtgcaatgccctgaacagcgtgtctgagaaccagagcctgctgaggatgccaccctggatgaacccctggctgctggtggccgtggccatgtccatggccctgcacttcctgatcctgctggtgccccccctgcccctcatcttccaggtgacccccctgagcggccggcagtgggtggtggtgctgcagatcagcctgcccgtcatcctgctggatgaggccctgaagtacctgagcaggaaccacatgcatgaggagatgagccagaagtag

SEQ ID NO: 316802 - DNA, 3000 bp, Artificial Sequence
  derived and/or modified sequence
atggaggccgcccacctgctgcccgccgccgacgtgctgcggcacttttccgtcaccgcggaggggggcttgagccctgcccaggtcactggtgcgcgggaaaggtacgggcccaatgagttaccctctgaagaagggaagagcttgtgggagctagtacttgaacagtttgaagatctgttggtgcggatcttgctcctagctgcgcttgttagctttgtgctcgcctggttcgaggaaggcgaggagacaaccacagcttttgttgaaccactagtgataatgctgattctggtggccaatgctattgttggtgtctggcaggaacgcaacgctgaatcagcaattgaagctctgaaagagtacgagcctgaaatggggaaggtcatccgctcagacaggaagggcgtacaacgcattagagcccgagatatagttcccggagatatcgtcgaggtcgctgtaggcgacaaggtacccgccgatctgagactgattgagattaagagcacaactctccgcgtcgatcagtcaatcttaacaggggagtccgtcagcgtgactaagcacacggaggcaatccccgatcctagggctgtgaatcaggataagaagaatatgctgtttagcggcacaaacattacgtctggcaaggctgtcggagtcgccgtagctacaggcttacacacggagttggggaaaattcggagtcagatggctgccgttgaacctgaacgcacccccctgcagcggaaattggacgagttcggccggcagctttcccacgccatcagtgtcatatgtgtggccgtttgggtcatcaatattgggcatttcgccgacccagcccatggaggaagctggctgaggggcgcagtgtactattttaaaattgctgtggctctggctgttgcagctatccccgagggcctgcctgcagtgatcaccacgtgtctcgctctgggtacacggcgcatggcaaggaaaaatgccatcgttaggtcactccctagtgtcgagaccctcggatgtacctctgttatttgcagcgacaaaaccggcactttaaccaccaatcaaatgagcgtctgtcgcatgtttgtggtcgccgaggccgacgctgggagctgcctgttgcacgaatttactatatccggtacaacgtacacgcctgaaggagaggttcgccagggcgaccagccggtcaggtgcggacagttcgatgggttagttgagctggccaccatctgtgctctttgcaatgatagtgccttagactataacgaggctaagggcgtgtacgagaaggtgggagaggctacggaaacggcactgacttgtctggtggagaagatgaatgtctttgacacagacctccaagcactttcgagggtggaacgggcaggggcctgtaatacagtgatcaaacagctgatgcgcaaggaatttacacttgagttcagccgagataggaagtctatgtccgtttattgcacccctactaggccacacccgactggccagggaagcaagatgtttgtgaagggcgcgcccgaatctgtgattgagcggtgctctagcgttagagtaggcagtcgtaccgctccgctgaccccgacttctagggaacagatccttgcaaagattagagactgggggagtgggagcgatacgctccgatgcctggcgttagctacccgggatgcacctcctcgaaaggaagacatggagctagatgactgctccaaattcgtccaatacgaaaccgaccttacttttgtcgggtgtgttgggatgctcgacccacccaggcccgaagttgctgcctgtataacccgctgctaccaggcaggcattcgggtagtgatgatcactggagataataaaggcacagcggtggccatctgccgcagactgggaatttttggcgacactgaagatgtggccgggaaagcttacaccgggcgagaatttgatgacctaagccctgaacaacagcggcaggcttgtaggactgccagatgttttgcgcgcgtggagccggctcataagtcgcgcattgtagaaaatctgcagtcttttaatgaaataaccgctatgacaggcgacggcgtgaacgatgcacctgctctcaagaaagcagaaatcggtatcgccatgggctccggcactgccgttgctaaaagcgccgcggagatggtccttagcgatgacaactttgcctccatcgttgcagctgtcgaggagggacgggctatctacagcaacatgaagcaattcattcgctacctcattagtagcaacgtcggagaagtcgtatgcatcttcctaacagcaattctggggctccccgaagcgttaatccccgtgcaactactttgggtgaatctggttaccgacggattaccagctactgccctggggttcaacccacctgatctggacattatggaaaaactgccaaggtcaccacgggaggccctcatcagcggatggctgtttttccgctacttggctataggggtgtatgtgggccttgccacagtcgctgccgccacgtggtggtttgtctatgatgcagagggccctcacattaacttctatcaactgaggaattttctgaagtgcagcgaggacaacccactgttcgcaggtatcgattgcgaagtgttcgagtcacgttttcctaccacaatggccctgtcagtcctcgtgaccatcgagatgtgcaacgctctgaacagtgtctctgaaaaccagtctctgcttagaatgcccccctggatgaacccatggctgttggtggctgtggctatgtccatggccctgcacttcctcatccttctcgttccaccgctgcccctgatattccaagtgacaccactcagcggtcggcaatgggtggtggtcctgcagattagcctaccagtcatcctgctcgatgaggctctcaagtatctgtcgcgcaaccatatgcatgaggaaatgtcacaaaaatag

SEQ ID NO: 316803 - DNA, 3000 bp, Artificial Sequence
  derived and/or modified sequence
atggaagctgctcacctcctgcccgcagccgacgtgctccgccattttagcgtgacggctgaagggggactgtccccagcccaggtaaccggagctagagagcggtatggcccaaatgagctgccttctgaagagggaaagtcgttgtgggaactcgtcctggaacagtttgaggacttgctcgtcagaattctgctccttgccgcattggtgtcgtttgtgctggcctggttcgaggaaggggaagagacaaccaccgcattcgtggaacccctggtcattatgcttatcctggtggccaacgcaatcgttggagtctggcaggaaagaaacgcagagagcgccattgaagccctcaaagagtacgagccggaaatgggtaaagttatacgctcagataggaaaggcgtccaaaggattcgcgcaagagacatcgtgcccggagatattgtggaggtggccgtcggtgataaggtacccgcagatctccgccttatagaaatcaagagcaccacactgagagtggaccaaagcattctgacgggggaaagtgtaagtgtaaccaagcacactgaggctattcctgaccctagggccgtgaatcaggacaaaaaaaatatgctcttttctggaaccaacatcacctctggaaaagcggttggagtcgcggtggccacgggcctgcacaccgagttagggaaaataaggtcacaaatggcagcagttgagcccgagagaactcccttgcaacggaagctcgatgaatttgggagacagctgtctcatgctattagcgtgatctgcgtcgctgtctgggtaatcaatatcggccactttgccgatccggcacatggcggatcttggctccgcggtgcagtctactattttaaaatagccgtcgctctggccgtggccgctatccctgagggcctacctgccgttattacgacctgccttgctctgggcactcggaggatggctagaaaaaatgcaattgtgaggtcactaccttcggttgagaccctgggctgtactagcgtgatctgtagcgataagactgggacactgaccacaaatcagatgtccgtttgcaggatgtttgtcgtggctgaggctgatgctggatcctgcctgctgcacgagttcaccatatctggaactacctacacaccggagggcgaggtacggcagggagaccaacctgtcagatgtggacaatttgatggtctcgtggagctggccaccatctgcgcgctgtgcaacgacagcgcgcttgactataatgaggccaaaggagtttacgaaaaagttggcgaggctacggaaacagcactcacatgccttgtggagaaaatgaatgtttttgacacagacctccaagcattgagtagagttgaacgtgcgggtgcctgcaacacagtgattaaacagcttatgagaaaagagtttaccctggaattctctagggatcggaaatccatgtcggtttactgcaccccaaccagacctcatccaactggacagggaagtaagatgtttgttaagggcgctccagaaagcgtaattgagcgttgctcctctgttagagtaggctcacgcaccgcacccctgactcctaccagccgagagcaaattctcgccaaaatccgcgattgggggtcagggagcgacacacttcgatgcctcgccctcgcgacccgggacgctcccccaagaaaagaggacatggagttagacgactgcagtaagttcgtgcagtacgagacggacctgacatttgtcggatgcgtagggatgttggatccacctaggcccgaggttgccgcatgtatcactagatgttaccaggctggcattcgcgtggtcatgatcaccggcgacaataagggaaccgccgttgccatttgccggcgactcggaatctttggcgatactgaggacgtcgccggtaaagcctatacaggtcgcgaattcgacgatctgtcgcctgagcagcaacgccaagcctgccggaccgctagatgttttgcgagggtagagcccgctcacaagtctagaatcgtggaaaatttgcagagcttcaacgaaatcacggccatgacaggtgatggcgttaatgatgcccctgcactgaagaaggccgaaatagggatcgcaatgggttcggggacagccgtggccaaatctgccgcagagatggtgttgtcagacgataatttcgccagtatcgtggcagccgtcgaagaaggtcgagctatttacagcaacatgaagcagtttatcaggtatctgatcagctccaatgtcggagaggtggtctgcatttttttaaccgctatcctgggccttcccgaggccctaattcctgtccagctgctgtgggtcaatctcgtcactgacggcctgccggcaaccgccctcggttttaacccccctgaccttgacatcatggaaaagctgccgcgaagcccacgtgaggctctaatatccgggtggctgttttttcgctatctagctattggtgtttacgtgggactagccacggtcgccgctgctacttggtggttcgtgtatgacgctgagggacctcatatcaatttttatcaattgcgcaatttccttaaatgctcggaagacaaccccctgtttgccggaatcgattgtgaggtgtttgaatccagattccccacaacgatggcccttagcgtgctggtcaccattgagatgtgtaacgctctgaatagcgtgtcagaaaaccagtcattattaaggatgccgccttggatgaacccctggctgctggttgctgtggccatgagtatggctctgcattttctcatattactggtgcccccactccctttaatctttcaggtaactccattatccggcaggcaatgggtagtcgtcctgcagatcagccttcctgttatcctactggacgaggcactgaagtacctaagcaggaaccacatgcacgaagaaatgtcacagaagtag

SEQ ID NO: 316804 - DNA, 4698 bp, Artificial Sequence
  derived and/or modified sequence
ccgccgccactgccgtcgggtaaggtcccagcacggacatggcctcgcgcggcgcccgcccgggcccgagtcccccgcgccccgctttgtagccccccggcggagaggcggcctcgacggtgcggacggcgcagacggccgggcgggcggcatggaggcggcgcatctgctcccggccgccgacgtgctgcgccacttctcggtgacagccgagggcggcctgagcccggcgcaggtgaccggcgcgcgggagcgctacggccccaacgagctcccgagtgaggaagggaagtccctgtgggagctggtgctggaacagtttgaggacctcctggtgcgcatcctgctgctggctgcccttgtctcctttgtcctggcctggttcgaggagggcgaggagaccacgaccgccttcgtggagcccctggtcatcatgctgatcctcgtggccaacgccattgtgggcgtgtggcaggaacgcaacgccgagagtgccatcgaggccctgaaggagtatgagcctgagatgggcaaggtgatccgctcggaccgcaagggcgtgcagaggatccgtgcccgggacatcgtcccaggggacattgtagaagtggcagtgggggacaaagtgcctgctgacctccgcctcatcgagatcaagtccaccacgctgcgagtggaccagtccatcctgacgggtgaatctgtgtccgtgaccaagcacacagaggccatcccagaccccagagctgtgaaccaggacaagaagaacatgctgttttctggcaccaatatcacatcgggcaaagcggtgggtgtggccgtggccaccggcctgcacacggagctgggcaagatccggagccagatggcggcagtcgagcccgagcggacgccgctgcagcgcaagctggacgagtttggacggcagctgtcccacgccatctctgtgatctgcgtggccgtgtgggtcatcaacatcggccacttcgccgacccggcccacggtggctcctggctgcgtggcgctgtctactacttcaagatcgccgtggccctggcggtggcggccatccccgagggcctcccggctgtcatcactacatgcctggcactgggcacgcggcgcatggcacgcaagaacgccatcgtgcgaagcctgccgtccgtggagaccctgggctgcacctcagtcatctgctccgacaagacgggcacgctcaccaccaatcagatgtctgtctgccggatgttcgtggtagccgaggccgatgcgggctcctgccttttgcacgagttcaccatctcgggtaccacgtatacccccgagggcgaagtgcggcagggggatcagcctgtgcgctgcggccagttcgacgggctggtggagctggcgaccatctgcgccctgtgcaacgactcggctctggactacaacgaggccaagggtgtgtatgagaaggtgggagaggccacggagacagctctgacttgcctggtggagaagatgaacgtgttcgacaccgacctgcaggctctgtcccgggtggagcgagctggcgcctgtaacacggtcatcaagcagctgatgcggaaggagttcaccctggagttctcccgagaccggaaatccatgtccgtgtactgcacgcccacccgccctcaccctactggccagggcagcaagatgtttgtgaagggggctcctgagagtgtgatcgagcgctgtagctcagtccgcgtggggagccgcacagcacccctgacccccacctccagggagcagatcctggcaaagatccgggattggggctcaggctcagacacgctgcgctgcctggcactggccacccgggacgcgcccccaaggaaggaggacatggagctggacgactgcagcaagtttgtgcagtacgagacggacctgaccttcgtgggctgcgtaggcatgctggacccgccgcgacctgaggtggctgcctgcatcacacgctgctaccaggcgggcatccgcgtggtcatgatcacgggggataacaaaggcactgccgtggccatctgccgcaggcttggcatctttggggacacggaagacgtggcgggcaaggcctacacgggccgcgagtttgatgacctcagccccgagcagcagcgccaggcctgccgcaccgcccgctgcttcgcccgcgtggagcccgcacacaagtcccgcatcgtggagaacctgcagtcctttaacgagatcactgctatgactggcgatggagtgaacgacgcaccagccctgaagaaagcagagatcggcatcgccatgggctcaggcacggccgtggccaagtcggcggcagagatggtgctgtcagatgacaactttgcctccatcgtggctgcggtggaggagggccgggccatctacagcaacatgaagcaattcatccgctacctcatctcctccaatgttggcgaggtcgtctgcatcttcctcacggcaattctgggcctgcccgaagccctgatccctgtgcagctgctctgggtgaacctggtgacagacggcctacctgccacggctctgggcttcaacccgccagacctggacatcatggagaagctgccccggagcccccgagaagccctcatcagtggctggctcttcttccgatacctggctatcggagtgtacgtaggcctggccacagtggctgccgccacctggtggtttgtgtatgacgccgagggacctcacatcaacttctaccagctgaggaacttcctgaagtgctccgaagacaacccgctctttgccggcatcgactgtgaggtgttcgagtcacgcttccccaccaccatggccttgtccgtgctcgtgaccattgaaatgtgcaatgccctcaacagcgtctcggagaaccagtcgctgctgcggatgccgccctggatgaacccctggctgctggtggctgtggccatgtccatggccctgcacttcctcatcctgctcgtgccgcccctgcctctcattttccaggtgaccccactgagcgggcgccagtgggtggtggtgctccagatatctctgcctgtcatcctgctggatgaggccctcaagtacctgtcccggaaccacatgcacgaagaaatgagccagaagtgagcgctgggaacagagtggagtctccggtgtgtacctcagactgatggtgcccatgtgttcgcctccgccccccacccttgccaccacactcgcccacttgcccaccgggtcccgccggataaatgacaggcccgaggtcagaatggccatccccgggccccgtcctggggtctctgtccccacttccttctggcctgggaggtctgtaattcctgtctcctggactctcctgggaagttccctgctctgcagctctggcccaggagctgcaggctgggagggggcagccaagaagccggagctggcagcatacccagagatccggggcccccccacccccaaatcacgagtgcagctggagcttgctcccccttgttcggaagctggacgttcacttggtgactggtgcctctgcactgacggaggactctgggggtccttcttaccggctctgacctctctcttcgtgcctggtctgggactgggtcagccctgggggatcagaaggggccatctgggcccagctgtgtacagcgagggtgggcagccccctccactccactctgcttccacaaagtcggctcccgagagctcgaggctgcttctgtttatatgtgcagggcccgggcgggtgaagggtcagagagacggacacaaggagccggcaggagggcggagcgaggatgtcctttcccgggagacaagtcgggaaagcctggctggactgcctcagccccgcgcgcctcctggactcagggttccccgtcctgagctcgggagatgttcagagtcacactgccgcccggtctgccacgcagaggtccaacttgccacccgcgtccctggtacctgagaccaccgacatcctcaggttcctgaccgtggcgcccttctacccagcccagtgtgcggccgccgcgctgtctgcacagctgggggcctctgagcctggtgggcttcctggactcttggcctcactccttgccccctccccacgacacccatgagccgaaaggatgtcactaaggatggctgattccccaagggcacccgctctccctccctccctgctggaggaacacgtcatatcagatgagaggaagatggcctctgatggacagaatttttctcttaactcagcttttgctactttggcaaaaactagcgaggggtagcagaaacctgcaccaaggattgtccctatgtcttggccactcctagagcgtgtgcagactgatgattttatatgtaaatcaagactcacatccctttcctagtcccccacatccaaagcccctcagcctgccttgcagaccaatgggctccatgttctgtagccccctcccctacgcctcacccctcctccctctcacaggttctgggcggccagtgagagaaacgcagtgggggaggcagggagtctggtgcctgcagagattctctgcttctttcctggggggaggtggggaggtcttagcaggagcgggccctgtacccacctgctgacctgctgtttggtagagaaataaaggttgtgtgactggggg

SEQ ID NO: 316805 - DNA, 3000 bp, Artificial Sequence
  derived and/or modified sequence
atggaggccgcccacctgctgcccgccgccgacgtgctgagacacttcagcgtgaccgccgagggcggcctgagccccgcccaggtgaccggcgccagagagagatacggccccaacgagctgcccagcgaggagggcaagagcctgtgggagctggtgctggagcagttcgaggacctgctggtgagaatcctgctgctggccgccctggtgagcttcgtgctggcctggttcgaggagggcgaggagaccaccaccgccttcgtggagcccctggtgatcatgctgatcctggtggccaacgccatcgtgggcgtgtggcaggagagaaacgccgagagcgccatcgaggccctgaaggagtacgagcccgagatgggcaaggtgatcagaagcgacagaaagggcgtgcagagaatcagagccagagacatcgtgcccggcgacatcgtggaggtggccgtgggcgacaaggtgcccgccgacctgagactgatcgagatcaagagcaccaccctgagagtggaccagagcatcctgaccggcgagagcgtgagcgtgaccaagcacaccgaggccatccccgaccccagagccgtgaaccaggacaagaagaacatgctgttcagcggcaccaacatcaccagcggcaaggccgtgggcgtggccgtggccaccggcctgcacaccgagctgggcaagatcagaagccagatggccgccgtggagcccgagagaacccccctgcagagaaagctggacgagttcggcagacagctgagccacgccatcagcgtgatctgcgtggccgtgtgggtgatcaacatcggccacttcgccgaccccgcccacggcggcagctggctgagaggcgccgtgtactacttcaagatcgccgtggccctggccgtggccgccatccccgagggcctgcccgccgtgatcaccacctgcctggccctgggcaccagaagaatggccagaaagaacgccatcgtgagaagcctgcccagcgtggagaccctgggctgcaccagcgtgatctgcagcgacaagaccggcaccctgaccaccaaccagatgagcgtgtgcagaatgttcgtggtggccgaggccgacgccggcagctgcctgctgcacgagttcaccatcagcggcaccacctacacccccgagggcgaggtgagacagggcgaccagcccgtgagatgcggccagttcgacggcctggtggagctggccaccatctgcgccctgtgcaacgacagcgccctggactacaacgaggccaagggcgtgtacgagaaggtgggcgaggccaccgagaccgccctgacctgcctggtggagaagatgaacgtgttcgacaccgacctgcaggccctgagcagagtggagagagccggcgcctgcaacaccgtgatcaagcagctgatgagaaaggagttcaccctggagttcagcagagacagaaagagcatgagcgtgtactgcacccccaccagaccccaccccaccggccagggcagcaagatgttcgtgaagggcgcccccgagagcgtgatcgagagatgcagcagcgtgagagtgggcagcagaaccgcccccctgacccccaccagcagagagcagatcctggccaagatcagagactggggcagcggcagcgacaccctgagatgcctggccctggccaccagagacgccccccccagaaaggaggacatggagctggacgactgcagcaagttcgtgcagtacgagaccgacctgaccttcgtgggctgcgtgggcatgctggacccccccagacccgaggtggccgcctgcatcaccagatgctaccaggccggcatcagagtggtgatgatcaccggcgacaacaagggcaccgccgtggccatctgcagaagactgggcatcttcggcgacaccgaggacgtggccggcaaggcctacaccggcagagagttcgacgacctgagccccgagcagcagagacaggcctgcagaaccgccagatgcttcgccagagtggagcccgcccacaagagcagaatcgtggagaacctgcagagcttcaacgagatcaccgccatgaccggcgacggcgtgaacgacgcccccgccctgaagaaggccgagatcggcatcgccatgggcagcggcaccgccgtggccaagagcgccgccgagatggtgctgagcgacgacaacttcgccagcatcgtggccgccgtggaggagggcagagccatctacagcaacatgaagcagttcatcagatacctgatcagcagcaacgtgggcgaggtggtgtgcatcttcctgaccgccatcctgggcctgcccgaggccctgatccccgtgcagctgctgtgggtgaacctggtgaccgacggcctgcccgccaccgccctgggcttcaacccccccgacctggacatcatggagaagctgcccagaagccccagagaggccctgatcagcggctggctgttcttcagatacctggccatcggcgtgtacgtgggcctggccaccgtggccgccgccacctggtggttcgtgtacgacgccgagggcccccacatcaacttctaccagctgagaaacttcctgaagtgcagcgaggacaaccccctgttcgccggcatcgactgcgaggtgttcgagagcagattccccaccaccatggccctgagcgtgctggtgaccatcgagatgtgcaacgccctgaacagcgtgagcgagaaccagagcctgctgagaatgcccccctggatgaacccctggctgctggtggccgtggccatgagcatggccctgcacttcctgatcctgctggtgccccccctgcccctgatcttccaggtgacccccctgagcggcagacagtgggtggtggtgctgcagatcagcctgcccgtgatcctgctggacgaggccctgaagtacctgagcagaaaccacatgcacgaggagatgagccagaagtag

SEQ ID NO: 316806 - protein, 998 aa, Artificial Sequence
  derived and/or modified sequence
MEAAHLLPAADVLRHFSVTAEGGLSPAQVTGARERYGPNELPSEEGKSLWELVLEQFEDLLVRILLLAALVSFVLAWFEEGEETTTAFVEPLVIMLILVANAIVGVWQERNAESAIEALKEYEPEMGKVIRSDRKGVQRIRARDIVPGDIVEVAVGDKVPADLRLIEIKSTTLRVDQSILTGESVSVTKHTEAIPDPRAVNQDKKNMLFSGTNITSGKAVGVAVATGLHTELGKIRSQMAAVEPERTPLQRKLDEFGRQLSHAISVICVAVWVINIGHFADPAHGGSWLRGAVYYFKIAVALAVAAIPEGLPAVITTCLALGTRRMARKNAIVRSLPSVETLGCTSVICSDKTGTLTTNQMSVCRMFVVAEADAGSCLLHEFTISGTTYTPEGEVRQGDQPVRCGQFDGLVELATICALCNDSALDYNEAKGVYEKVGEATETALTCLVEKMNVFDTDLQALSRVERAGACNTVIKQLMRKEFTLEFSRDRKSMSVYCTPTRPHPTGQGSKMFVKGAPESVIERCSSVRVGSRTAPLTPTSREQILAKIRDWGSGSDTLRCLALATRDAPPRKEDMELDDCSKFVQYETDLTFVGCVGMLDPPRPEVAACITRCYQAGIRVVMITGDNKGTAVAICRRLGIFGDTEDVAGKAYTGREFDDLSPEQQRQACRTARCFARVEPAHKSRIVENLQSFNEITAMTGDGVNDAPALKKAEIGIAMGSGTAVAKSAAEMVLSDDNFASIVAAVEEGRAIYSNMKQFIRYLISSNVGEVVCIFLTAILGLPEALIPVQLLWVNLVTDGLPATALGFNPPDLDIMEKLPRSPREALISGWLFFRYLAIGVYVGLATVAAATWWFVYDAEGPHINFYQLRNFLKCSEDNPLFAGIDCEVFESRFPTTMALSVLVTIEMCNALNSVSENQSLLRMPPWMNPWLLVAVAMSMALHFLILLVPPLPLIFQVTPLSGRQWVVVLQISLPVILLDEALKYLSRNHMHEMSQK

SEQ ID NO: 316807 - DNA, 2997 bp, Artificial Sequence
  derived and/or modified sequence
atggaagccgcgcatctgctcccggctgctgacgtgcttcggcacttttcagtgacggccgagggaggcctgagtccagcccaggtcaccggcgctagggagcggtacgggcccaatgagctgccatcagaggaagggaagtccctgtgggaactggtgcttgagcagttcgaggatctgctggtccgcatcctgttgctcgccgcacttgtatctttcgtgctggcctggtttgaagagggcgaggagactaccacagcctttgtggaacctctcgtgattatgctcatactagtagccaacgcaattgtgggagtgtggcaggagcgcaatgccgaaagtgccattgaagccctgaaggagtatgagccagagatgggaaaggtcattagatcggatcgaaagggcgtgcaacgcattcgggcacgagacatcgttcctggagatattgtagaggtggctgtgggagacaaggtgcctgccgacctacggctcatcgagattaagagcacgactctgcgggtagaccagtcgatcctgacaggggaaagcgtgagtgtcaccaagcatacagaggccatccccgatcctcgagcagtgaaccaggataagaaaaacatgttattctctggtactaatattacctctggcaaggctgtcggtgtcgctgttgcaactggcctgcatacagaactgggtaagattcgaagccaaatggctgccgtggagcctgaaaggacgccattacaaagaaagttagatgaattcgggaggcaactttcgcatgccatttcagtgatctgcgttgctgtatgggttatcaacatcggacacttcgctgatcctgcccacggtggttcctggctgagaggagccgtctattactttaagattgccgttgctttagcggtcgcggccattcccgagggattacccgcagtgataacaacctgtctcgctctcgggactaggcggatggctcggaagaacgcaatagtgcgctccttgcctagtgtcgaaacccttggatgcaccagcgtgatctgctcggacaaaactgggaccctcacaaccaaccagatgtcagtgtgtcgaatgttcgtggtggcggaggcggacgcagggtcctgtcttctccatgagttcacaattagcggtaccacctacactccggagggcgaagtacggcaaggcgaccaacccgtgcgctgtggacagtttgacggcttggtggagctggcaaccatctgcgccctgtgtaatgactccgctctggactataatgaggctaagggagtttatgagaaggttggggaagcaaccgaaacagctctcacatgtctggttgagaagatgaacgtgttcgacacggacctgcaagcactgagtcgcgttgagcgagcaggcgcctgcaacaccgtgatcaaacagctgatgagaaaagagttcacacttgagttctctcgtgacagaaagtctatgtccgtgtactgtactcctactcgaccccaccctaccgggcaaggctctaaaatgtttgtgaaaggagcccccgaatcagtcatcgaacggtgctcatcagtaagagtcgggagccgaacagcgccgctgacacccaccagcagggagcagatattagctaagattagggattggggttctggcagtgacacgctgcgatgcctggccctagcaaccagggatgcgcccccgaggaaagaagatatggaactggacgattgctctaagttcgtgcagtatgaaaccgacctgacattcgtgggttgcgtcggcatgctcgacccacccagacccgaagtagccgcttgtattacaaggtgctaccaggccggcattagggtggtgatgatcacaggagataataaaggcaccgctgttgccatatgcagacgcctgggcatattcggagacacagaagatgtggccgggaaggcatacactgggcgcgagttcgatgacctgtcacccgagcagcagcggcaagcgtgccggacggctagatgcttcgcccgcgttgagcccgcacacaaatcacgtatcgtggagaatctacagtccttcaacgagattacagcaatgacaggagacggggtgaatgatgcccccgcactcaagaaggccgaaatcggcatagccatgggatccgggaccgcagtcgctaagagtgcagcagagatggtcctgtcggacgataattttgcaagcatcgttgccgcggtcgaggagggtagggctatctattcaaacatgaaacaattcatccgttatctcatcagctccaatgttggcgaggtcgtctgtatcttcctgaccgcaatcctgggtctgcccgaggccctgatcccagtccagctgctgtgggtgaacttagtgaccgatggtttgcccgccaccgctttaggttttaatccacctgatctggatatcatggaaaagctgccaagaagccccagggaggccctgatctcgggctggcttttctttcggtacctcgctatcggggtctatgtcggactcgcaacggttgcggcagccacatggtggttcgtttatgacgctgaaggtccacacattaacttttaccaactccgcaatttcttgaagtgtagcgaagataatccacttttcgcaggcatcgactgcgaggtctttgaaagccggttcccaactactatggccctgtccgtgttggttaccatcgagatgtgcaacgctttgaacagcgtgagtgaaaatcagagtctgctccggatgcctccttggatgaacccgtggctcctggtagccgttgcaatgtctatggccctacacttccttattttgttagtgccgcccctgccgctcatattccaggtgacaccactaagcggaaggcagtgggttgtggtccttcagataagtttacctgttatattactcgacgaggcgttaaagtatctgagtaggaatcatatgcatgggcatacccagagctag

SEQ ID NO: 316808 - DNA, 2997 bp, Artificial Sequence
  derived and/or modified sequence
atggaagcggcacacctgctgccagcagccgatgtgctgcgccatttctccgttactgctgaaggaggccttagccctgcacaggtgacgggggcccgcgagcggtatgggccgaacgagctccctagcgaagaggggaaaagtctttgggaattagtattggaacagtttgaagacctgttagtccgcatcctgctgctcgcagcgctggtgtctttcgttctggcctggttcgaggagggcgaggaaactactaccgcattcgtggaacctcttgtcatcatgctgatcttagtggccaacgctatagtcggcgtgtggcaagagcgtaacgccgaatctgccatcgaagctctaaaagaatatgagcctgagatgggcaaagtaattaggagcgatcgaaaaggcgtgcagaggattcgggccagagatatcgttcccggcgacatcgtcgaggtggctgtgggcgacaaagtgcctgctgatctccgcctgatcgagattaagtcaacaacactccgggtggaccagtctatcttgacgggagagtccgtctcggtgactaagcacacagaggctatcccggacccgagagcagtaaaccaggataaaaaaaatatgctgtttagcggtacaaacataacgagcggcaaggccgtgggagttgctgtcgcaactggcctccacaccgagttggggaaaattcgctcccagatggcagccgtcgaacccgagagaaccccgctgcaaagaaagcttgatgaatttggtaggcaactgtcgcatgccataagcgtgatctgtgtcgctgtgtgggttatcaacattggccactttgctgatccagcgcatggggggtcttggctaagaggagctgtttactactttaaaattgcggtagccctagctgttgcagcgatccccgaaggtcttccagccgtcattacaacttgtctggcactcggaactcggagaatggctagaaaaaacgcaatcgtccggagcctgccatcagtggagacactggggtgtacttctgtgatttgttccgataagactggaactctcacgaccaaccagatgagcgtttgtaggatgttcgtcgtcgcagaggctgacgcagggtcatgcctgctgcatgagtttactattagtggcactacatatacccctgagggagaagtcagacaaggagaccaaccggtcaggtgtggccagtttgatggtcttgtggagttggccaccatctgtgccttgtgcaatgactcagccctcgactacaacgaagccaagggggtctatgagaaagtcggcgaagcgactgaaacggccctgacgtgcctggtggagaagatgaacgtgttcgacacagatctgcaggcgctctcccgcgtggagagggctggcgcctgcaatacagtgatcaaacagttgatgcgtaaggaatttactctggaattcagccgggatcggaagtctatgtcagtctattgcactcccactaggcctcacccaaccggccaggggagcaaaatgttcgtcaagggagcccccgaatccgtcatagagcggtgctcctctgtgcgggttgggtcccggactgcccctcttacgcccacctcaagagagcagatattggcaaaaattcgggattggggttcgggcagcgacaccctgcgctgcctggctctcgcaacaagagacgctccacctcggaaggaagacatggagctagatgattgtagcaagttcgtccagtatgaaaccgatctcactttcgtgggctgcgttggaatgctcgatcccccacgcccggaagtggccgcgtgcattacacgctgctaccaggccggtataagggtagttatgataacaggagacaacaagggtaccgccgtggctatctgtcggaggttgggaatatttggggatactgaagacgtggccggcaaagcctatacaggacgagaatttgatgatctttcccctgaacagcaaagacaggcctgcagaacagctcgttgttttgctagagttgagcccgcccataaaagtcgcatcgttgagaacctccaatcattcaatgagatcacagcaatgaccggtgacggggtgaacgatgcccccgccctcaagaaagctgaaattggtatcgccatggggagcggaacagcagttgccaagtctgctgccgagatggttctgtccgatgacaatttcgctagtatcgtagcggccgttgaagaggggagggccatctacagtaatatgaaacagtttatacggtacctgatttcgtccaatgtgggggaggtggtgtgcatcttcttaaccgcgattctgggactcccagaagctctcattccagtgcagctgctgtgggtcaacttggtaactgatggcctgcccgccaccgctcttgggttcaaccccccagatctcgatatcatggagaaactgcccaggagccctagagaggcactgattagcggctggctgttctttcggtatctggctataggggtgtacgtaggcttagctaccgtcgccgcggcaacatggtggtttgtatacgatgcggagggccctcacataaatttttaccaattacgcaattttttgaagtgctcagaggataacccactatttgctggcattgactgtgaagtctttgagtccaggttcccaacaacgatggctctttcagtgctggtgaccatcgaaatgtgcaatgccctcaactcagtgtcagagaatcagtccctgctcaggatgccaccatggatgaacccatggctcctagtagccgtagccatgagcatggccctccacttcttaattctattggttccaccgctgcccctgatatttcaggtaacccccctctctgggagacagtgggtggtggtactgcagatctcactaccggtgatcttgctggacgaggcactgaaatatctttccagaaatcatatgcatgagatgagccagaaatag

SEQ ID NO: 316809 - DNA, 2997 bp, Artificial Sequence
  derived and/or modified sequence
atggaggccgcccacctgctgcctgctgctgatgtgctgcggcacttctctgtgacagctgagggcggcctgagccctgcccaggtgactggagcccgggagagatatggccccaatgagctgcccagcgaggagggcaagagcctgtgggagctggtgctggagcagtttgaggacctgctggtgcgcatcctgctgctggccgccctggtgtcctttgtgctggcctggtttgaggagggggaggagaccaccacagcctttgtggagcccctggtgatcatgctgatcctggtggccaatgccatcgtgggcgtgtggcaggagagaaatgctgagagcgccatcgaggccctgaaggagtatgagcctgagatgggcaaggtgatccgcagtgacagaaaaggagtgcagaggatccgggcccgggacatcgtgcctggggacatcgtggaggtggccgtgggggacaaggtgcctgctgacctgcggctcatcgagatcaagagcaccaccctgcgggtggaccagagcatcctgactggagagagcgtgtctgtgaccaagcacacagaggccatcccagaccccagggctgtgaaccaggacaagaagaacatgctgttcagcggcaccaacatcaccagcggcaaggctgtgggcgtggccgtggccaccggcctgcacacagagctgggcaagatccgcagccagatggctgctgtggagcctgagaggacccccctgcagaggaagctggatgaatttggccggcagctgagccacgccatcagcgtcatctgtgtggccgtgtgggtgatcaacatcggccactttgctgaccctgcccacggcggctcctggctgcggggagctgtgtactacttcaagattgctgtggccctggccgtggccgccatccctgagggcctgcctgctgtgatcaccacctgcctggccctgggcaccaggaggatggccaggaagaatgccatcgtgcgcagcctgcccagcgtggagaccctgggctgcaccagcgtcatctgcagcgacaagacaggcaccctgaccaccaaccagatgtctgtgtgcaggatgtttgtggtggccgaggctgatgctggcagctgcctgctgcacgagttcaccatcagcggcaccacctacaccccagagggggaggtgcggcagggcgaccagcctgtgcgctgtggccagtttgatggcctggtggagctggccaccatctgtgccctgtgcaatgattctgccctggactacaatgaggccaagggcgtgtatgagaaggtgggggaggccacagaaacagccctgacctgcctggtggagaagatgaatgtgtttgacacagacctgcaggccctgagccgggtggagcgggccggggcctgcaacacagtcatcaagcagctgatgaggaaggagttcaccctggagttcagccgggacaggaagtccatgtctgtgtactgcacccccacccggccccaccccaccggccagggcagcaagatgtttgtgaagggggcccctgagagcgtcatcgagcgctgcagctctgtgcgggtgggcagcaggacagcccccctgacccccaccagccgggagcagatcctggccaagatccgggactggggcagcggcagtgacaccctgcgctgcctggccctggccaccagagatgccccacccaggaaggaggacatggagctggatgactgcagcaagtttgtgcagtatgaaacagacctgacctttgtgggctgtgtgggcatgctggacccccccaggcctgaggtggccgcctgcatcacccgctgctaccaggccggcatccgggtggtgatgatcactggagacaacaagggcacagctgtggccatctgccggcggctgggcatctttggagacacagaagatgtggccggcaaggcctacacaggccgggagtttgatgacctgagccctgagcagcagaggcaggcctgcaggacagcccgctgctttgcccgggtggagcccgcccacaagagcagaattgtggagaacctgcagagcttcaatgagatcacagccatgactggagatggagtgaatgatgccccagccctgaagaaggccgagatcggcatcgccatgggcagcggcacagctgtggccaagtctgctgctgagatggtgctgagtgatgacaactttgccagcatcgtggccgctgtggaggagggccgggccatctacagcaacatgaagcagttcatccgctacctgatcagcagcaatgtgggggaggtggtgtgcatcttcctgacagccatcctgggcctgcctgaggccctgatccctgtgcagctgctgtgggtgaacctggtgacagatggcctgcctgccacagccctgggcttcaaccccccagacctggacatcatggagaagctgcccaggagcccccgggaggccctgatcagcggctggctgttcttccgctacctggccatcggcgtgtatgtgggcctggccaccgtggccgccgccacctggtggtttgtgtatgatgctgagggcccccacatcaacttctaccagctgaggaacttcctgaagtgcagcgaggacaaccccctgtttgctggcatcgactgtgaggtgtttgagagccgcttccccaccaccatggccctgtctgtgctggtgaccatcgagatgtgcaatgccctgaacagcgtgtctgagaaccagagcctgctgaggatgccaccctggatgaacccctggctgctggtggccgtggccatgtccatggccctgcacttcctgatcctgctggtgccccccctgcccctcatcttccaggtgacccccctgagcggccggcagtgggtggtggtgctgcagatcagcctgcccgtcatcctgctggatgaggccctgaagtacctgagcaggaaccacatgcacggccacacccagagctag

SEQ ID NO: 316810 - DNA, 2997 bp, Artificial Sequence
  derived and/or modified sequence
atggaggccgcccacctgctgcctgctgctgatgtgctgcggcacttctctgtgacagctgagggcggcctgagccctgcccaggtgactggagcccgggagagatatggccccaatgagctgcccagcgaggagggcaagagcctgtgggagctggtgctggagcagtttgaggacctgctggtgcgcatcctgctgctggccgccctggtgtcctttgtgctggcctggtttgaggagggggaggagaccaccacagcctttgtggagcccctggtgatcatgctgatcctggtggccaatgccatcgtgggcgtgtggcaggagagaaatgctgagagcgccatcgaggccctgaaggagtatgagcctgagatgggcaaggtgatccgcagtgacagaaaaggagtgcagaggatccgggcccgggacatcgtgcctggggacatcgtggaggtggccgtgggggacaaggtgcctgctgacctgcggctcatcgagatcaagagcaccaccctgcgggtggaccagagcatcctgactggagagagcgtgtctgtgaccaagcacacagaggccatcccagaccccagggctgtgaaccaggacaagaagaacatgctgttcagcggcaccaacatcaccagcggcaaggctgtgggcgtggccgtggccaccggcctgcacacagagctgggcaagatccgcagccagatggctgctgtggagcctgagaggacccccctgcagaggaagctggatgaatttggccggcagctgagccacgccatcagcgtcatctgtgtggccgtgtgggtgatcaacatcggccactttgctgaccctgcccacggcggctcctggctgcggggagctgtgtactacttcaagattgctgtggccctggccgtggccgccatccctgagggcctgcctgctgtgatcaccacctgcctggccctgggcaccaggaggatggccaggaagaatgccatcgtgcgcagcctgcccagcgtggagaccctgggctgcaccagcgtcatctgcagcgacaagacaggcaccctgaccaccaaccagatgtctgtgtgcaggatgtttgtggtggccgaggctgatgctggcagctgcctgctgcacgagttcaccatcagcggcaccacctacaccccagagggggaggtgcggcagggcgaccagcctgtgcgctgtggccagtttgatggcctggtggagctggccaccatctgtgccctgtgcaatgattctgccctggactacaatgaggccaagggcgtgtatgagaaggtgggggaggccacagaaacagccctgacctgcctggtggagaagatgaatgtgtttgacacagacctgcaggccctgagccgggtggagcgggccggggcctgcaacacagtcatcaagcagctgatgaggaaggagttcaccctggagttcagccgggacaggaagtccatgtctgtgtactgcacccccacccggccccaccccaccggccagggcagcaagatgtttgtgaagggggcccctgagagcgtcatcgagcgctgcagctctgtgcgggtgggcagcaggacagcccccctgacccccaccagccgggagcagatcctggccaagatccgggactggggcagcggcagtgacaccctgcgctgcctggccctggccaccagagatgccccacccaggaaggaggacatggagctggatgactgcagcaagtttgtgcagtatgaaacagacctgacctttgtgggctgtgtgggcatgctggacccccccaggcctgaggtggccgcctgcatcacccgctgctaccaggccggcatccgggtggtgatgatcactggagacaacaagggcacagctgtggccatctgccggcggctgggcatctttggagacacagaagatgtggccggcaaggcctacacaggccgggagtttgatgacctgagccctgagcagcagaggcaggcctgcaggacagcccgctgctttgcccgggtggagcccgcccacaagagcagaattgtggagaacctgcagagcttcaatgagatcacagccatgactggagatggagtgaatgatgccccagccctgaagaaggccgagatcggcatcgccatgggcagcggcacagctgtggccaagtctgctgctgagatggtgctgagtgatgacaactttgccagcatcgtggccgctgtggaggagggccgggccatctacagcaacatgaagcagttcatccgctacctgatcagcagcaatgtgggggaggtggtgtgcatcttcctgacagccatcctgggcctgcctgaggccctgatccctgtgcagctgctgtgggtgaacctggtgacagatggcctgcctgccacagccctgggcttcaaccccccagacctggacatcatggagaagctgcccaggagcccccgggaggccctgatcagcggctggctgttcttccgctacctggccatcggcgtgtatgtgggcctggccaccgtggccgccgccacctggtggtttgtgtatgatgctgagggcccccacatcaacttctaccagctgaggaacttcctgaagtgcagcgaggacaaccccctgtttgctggcatcgactgtgaggtgtttgagagccgcttccccaccaccatggccctgtctgtgctggtgaccatcgagatgtgcaatgccctgaacagcgtgtctgagaaccagagcctgctgaggatgccaccctggatgaacccctggctgctggtggccgtggccatgtccatggccctgcacttcctgatcctgctggtgccccccctgcccctcatcttccaggtgacccccctgagcggccggcagtgggtggtggtgctgcagatcagcctgcccgtcatcctgctggatgaggccctgaagtacctgagcaggaaccacatgcatgagatgagccagaagtag

SEQ ID NO: 316811 - DNA, 2997 bp, Artificial Sequence
  derived and/or modified sequence
atggaggccgcccacctgctgcccgccgccgacgtgctgcggcactttagtgtgactgccgaaggggggctgtctcccgcccaggtgacgggagcaagagaacgatatggaccgaatgagttgccatcagaagaggggaaaagcctgtgggaactcgttttggaacagtttgaagatcttctcgttcggattttgctccttgccgccctggtaagctttgtgctggcatggttcgaagagggcgaggaaacaacaaccgctttcgtggaacctttggtcatcatgctcatcctggtggccaatgcaattgtaggagtctggcaggagcgtaacgcagagagcgctattgaagctctgaaagagtatgaacccgaaatgggcaaggtcatcaggagcgaccgaaagggagttcaacgaattcgcgcaagagatatcgttcctggagacattgtggaggtcgccgtcggtgataaggtacccgcggacctccggctgatcgagatcaaatcgaccaccctgcgggtggatcaatctatcctgactggggagagcgtgtctgttactaagcatacagaggctattcccgacccaagggccgtgaaccaagataagaaaaatatgctattctcgggtaccaatataacctctggcaaggcagtcggcgtggctgtagccactggtttgcataccgagctgggtaaaatccgcagccagatggccgctgtagaaccagagcggacacccctacagagaaagttggatgaattcggcagacagctgtctcatgccatttcggtcatctgcgtagcagtctgggtcatcaacatcggtcattttgctgatcctgcccacggaggaagctggcttagaggggcagtgtactattttaaaatcgccgtcgccctggccgtcgccgcaattccagaaggcctccctgcagtgataactacatgcctagccttaggcacaaggagaatggcacggaaaaatgccatcgtccggagcctccccagcgtcgagacccttggttgcaccagcgtgatctgttctgacaaaaccggcaccctcaccaccaatcagatgtcagtctgccgaatgttcgtggtcgccgaagcagacgccggctcatgtttgctccacgaatttaccattagtggtactacatatacccccgagggggaggtcagacagggcgatcaaccagttagatgtggacagttcgacggacttgtcgagcttgccaccatctgtgctctgtgtaatgattctgcactggactacaacgaggctaaaggagtttacgagaaggtaggcgaagcgacagaaaccgccttaacctgcctagtggagaagatgaatgtgttcgacaccgatctgcaggcgctgagtcgcgtcgaaagggccggagcctgtaatactgttattaaacagctgatgcgaaaggagtttaccttggagttttcaagagatagaaagtcgatgagtgtgtattgtacaccaactcggccccacccaacaggccagggaagtaagatgtttgtcaaaggcgcccctgaatcagtgatcgaacgctgtagcagcgtgcgggtcggtagcagaactgcaccactgacacccacaagcagagaacaaatactggcaaagattcgggattgggggtcaggtagcgatacattacggtgtcttgccctcgcaacacgcgacgcaccaccgcgcaaggaagatatggagctcgatgactgctccaaatttgttcaatacgaaacagatctaacctttgtggggtgtgttggaatgttggaccctcccagacctgaggtggctgcctgtatcacacggtgctatcaggccgggattcgagtggttatgatcactggagataataagggtaccgccgtcgccatctgccgcaggctggggatctttggtgatactgaggacgtagctggaaaggcctacacaggaagggaattcgatgacctctctcccgagcagcagcgccaggcctgcagaacggctcgatgcttcgccagagtggaacctgcccacaagtcccggatcgtggagaacttgcagtcctttaacgagattacagccatgactggggacggtgtgaacgatgctccggccctgaagaaggccgaaatcggaattgctatgggatcaggaacggccgtagccaagtctgcagccgagatggttttatcggatgataatttcgctagcattgttgccgctgtcgaggaagggagagcaatctattccaatatgaagcagttcatcaggtacctgatctcaagcaacgtaggggaggttgtttgtatattcttgaccgccattctgggcctgcctgaggcacttatccctgtacaacttctgtgggtgaatttggttactgatggtctgcctgccactgcattaggatttaatccaccagacctagacattatggaaaaactaccaaggagtcctagagaagccctcatatctggctggctctttttcagatacctcgctattggagtgtacgtggggctggccacagtagccgctgcaacatggtggtttgtgtacgacgccgaaggcccacacattaatttctatcagttgagaaacttcctgaagtgttcagaggacaatcctttattcgctggtatagactgcgaagtcttcgagtctcgctttccaacaaccatggcactgagcgtcctagtgacaattgagatgtgcaacgcccttaatagcgtaagtgagaaccagtcacttttacgaatgccaccctggatgaatccgtggctcctcgtagctgttgcgatgagtatggccctgcattttctgattctgctggtgcccccccttccactcatcttccaagttacgccattgagcggaagacagtgggttgtcgtgctacagatctccctgccagtgatcctgttagatgaggccttgaagtacctgagtagaaatcacatgcacggccatacccagtcctag

SEQ ID NO: 316812 - DNA, 2997 bp, Artificial Sequence
  derived and/or modified sequence
atggaggccgcccacctgctgcccgccgccgacgtgctgcggcactttagtgtgacagcggaaggcggactcagtcctgcgcaggtgacgggagcacgagaacggtatggccctaacgagctcccctccgaagagggcaagtccctgtgggagctggtactagaacaattcgaagatctgttggtcagaatactcttactagcagccctggtgagtttcgtccttgcatggttcgaagagggcgaggagacgacgactgcattcgtggagccgctggtcattatgcttattttggtggctaatgcgatcgtgggagtctggcaggagcggaatgctgagtctgctatcgaagctctcaaagagtacgaacccgaaatgggtaaagtgattcggagcgaccgcaagggagtgcagaggatacgcgccagggatatcgttcctggcgatatcgtcgaggtggctgtcggagacaaggtgcccgccgacctcagactaattgaaattaagagcaccaccctgagagtcgatcagtcaatcctcaccggggagtcagtaagcgtgaccaagcataccgaggctattccggacccacgcgcagttaatcaggataagaagaacatgctctttagcggcacaaatatcaccagcggtaaagctgtcggtgtagccgtggccacaggcctacacacagaattagggaagatcaggtcacagatggctgccgtggagcccgagaggacacctctccagaggaagctcgacgaattcggccgccaacttagtcatgctatctccgttatttgtgtggccgtgtgggtgatcaacattggccactttgcagatcccgcccatggcggaagttggctgcgcggtgcggtttactactttaagatcgccgtggctctggctgttgcggctattcctgaaggacttcccgcagtcattactacatgtctcgctttggggacccgccgtatggctagaaagaatgccatcgtgcggtctttgccttccgttgaaactctcgggtgtacttctgttatttgttccgataaaacaggcacgttgaccaccaaccagatgtctgtgtgtcgcatgtttgtagtcgctgaagccgatgctggctcctgtttactacacgagtttacgatcagcggcactacttatacaccagagggagaggttcgacagggcgatcagccagtccgatgcgggcagttcgacgggctggtggagctcgctactatttgtgccctgtgcaacgactctgctctggactacaacgaagctaagggagtgtacgagaaggttggcgaagcaacagagaccgcactgacatgccttgtggaaaagatgaacgtgttcgacacagacctgcaggctctgtcccgcgtggagcgggccggagcttgtaacacagttattaaacagttaatgaggaaagagttcacactggagttttctagggaccgcaagagcatgagtgtctattgcactccaactaggccccaccctaccggccaggggtcgaagatgttcgttaagggggcccccgagagcgtgatcgagaggtgtagtagtgtccgcgtgggcagccggacagctcccctgactccaacttctcgggagcaaattctcgcgaagataagagattggggctctgggagtgataccctgcgatgtctggctctggcaaccagagatgctcctccacgtaaagaggacatggaacttgatgactgttccaagtttgtgcaatatgagaccgaccttacttttgttggctgtgtcggaatgttggatcccccccgaccggaagtcgccgcctgtattaccagatgttaccaggcgggcattagagttgtgatgattactggcgacaataagggaaccgccgtcgccatctgtcgacggcttggtatctttggcgacaccgaggatgtagcggggaaagcatacaccgggcgggagttcgacgatctctctcctgaacagcaaaggcaagcctgtcgtaccgcgcgctgctttgcccgcgtggaacctgcccacaaatctcgaatcgtggagaatctgcaatcctttaacgagatcacagcaatgacaggtgacggcgtcaacgacgcccccgctctcaagaaggcggaaattggtatcgccatgggaagcggcacagcagtagctaagagtgctgccgaaatggtgctctctgatgataatttcgcatccatcgtcgcagccgtagaggaaggacgcgcaatatacagtaacatgaaacagttcataagatacctcatcagctccaatgtcggcgaagttgtatgtatctttctgactgctatcctgggactcccagaggcactgatcccggtgcagcttctgtgggtgaacttggttaccgacggtctgcctgcgactgccctcggttttaaccctcccgacttagacattatggagaagctgccgagaagcccaagagaggctctcatcagtggctggctcttcttccgctacttggccatcggggtctatgtgggactggccacagtagctgctgcaacttggtggttcgtgtacgacgcagagggcccacatatcaacttttaccagcttcggaactttctgaaatgtagcgaggacaatccgttattcgctggaatcgattgcgaggttttcgaatcaaggtttcctacaaccatggctctgtctgtcctggttacaatcgagatgtgcaacgccctgaactcggtgagcgagaaccagtctctcctccggatgcccccctggatgaatccttggctgttggtcgcagtggcaatgagtatggccttacatttccttattctgcttgtgccccctctacctctgattttccaagtgacaccgctttccggccgacagtgggtggttgtgctgcagatcagcctcccggtgattctcctggatgaagctttgaagtatctgtcccgcaatcacatgcatgagatgtcccaaaagtag

SEQ ID NO: 316813 - DNA, 2997 bp, Artificial Sequence
  derived and/or modified sequence
atggaggcagctcatctgctgcctgcagcagacgttctccgacacttctctgtaaccgcagaggggggattatctccagcacaagtgacaggagcacgcgagagatatgggccaaatgaattgccttccgaagaaggaaaatccctttgggaactggtgctcgagcaatttgaagatctgctggtgcgcatcttgctcctcgcagcacttgtctcatttgtcctggcatggtttgaagagggggaagagacaacaacagccttcgtggagcctctggtgattatgttaattctcgtggcaaatgccattgtgggagtgtggcaggagcgcaatgccgaaagcgccatcgaggccctgaaagaatatgagccagagatgggtaaggtcatccgctcagaccgcaaaggagtgcaacgtatacgagcgagggacatcgtcccaggagacatcgtagaggtcgctgtgggtgacaaagtgcccgctgacttgcggctgattgagatcaagtctaccacactgcgagtcgaccagtccatcttgacgggggaatccgtatctgttaccaagcatactgaggccattcccgacccccgagcagtgaaccaggataagaaaaacatgctgttctcggggaccaatatcacgtctggaaaagccgttggcgttgctgtcgcgactggcctgcacacggaactcggaaagatcagatctcagatggccgctgtggaacccgaacggacgcccctgcagaggaagctggacgagttcggtcgacaactgagccatgccatctccgtgatttgtgtggccgtctgggtgattaatattggacattttgccgatccagcacacggcggatcttggttgcggggagctgtgtattacttcaagatcgcagtcgcacttgcggtcgcagcgatccctgagggcttgcccgcagtgatcacaacctgcttagccctggggaccagacgcatggcacgcaagaatgctatcgtgcgaagccttccatcagtggagactctgggctgtacatccgtgatttgttccgataagacagggactctgacgacaaatcagatgtcggtgtgtaggatgttcgtagtggcagaagccgatgccggatcctgcttgttgcacgagtttacgatatctggcaccacctacacccccgaaggggaggttagacagggtgatcagccggtccgctgtggacagttcgacgggctggtggagcttgccacaatttgtgccctgtgtaatgactcagctctggattacaacgaggccaagggggtctatgagaaggtcggcgaggccaccgaaaccgctcttacttgcctcgtcgaaaaaatgaacgtcttcgacactgatctgcaagccctgagtcgcgtagaacgagccggtgcctgcaatactgtgattaagcagcttatgagaaaggaattcactctggaattcagcagagaccgcaagtccatgtccgtgtactgcaccccaaccaggcctcatcctactgggcaggggagcaaaatgtttgtgaaaggagcaccagagtcagtgatcgaacggtgctcttccgtaagagtcggatctcgtacagcaccccttacccccacctcacgcgaacagatccttgccaagattagagactggggtagcggcagtgacacactgagatgcttggctctcgccaccagagatgcaccccctcgaaaggaagatatggagctcgatgattgctcgaaatttgtccaatatgaaactgacctcacattcgtgggctgtgtgggaatgctggaccctccacggcctgaggtggcggcttgtatcacccggtgctaccaggccggaattcgcgtggtgatgatcacaggtgacaataagggaactgcagtggcgatctgccgaaggctggggatcttcggcgatactgaggatgtcgctggaaaggcgtacaccggcagggagtttgacgacctttctcccgagcagcaacgccaggcctgcagaacagccagatgtttcgctagagtcgagccagctcacaaaagcagaatcgtcgagaatctccagagttttaacgagatcactgccatgactggcgatggggtgaatgacgctcccgctttgaaaaaggctgagattgggattgccatgggatccggcacagccgttgcaaaatccgcggctgagatggtgttatcagacgacaacttcgcgtccatcgtggcagctgttgaggagggacgtgctatctactccaatatgaagcagtttattaggtacctgatttcaagcaacgtcggcgaagtggtctgtatcttcctgactgctatacttggcctgccagaggctttgattcctgtgcagctcttgtgggttaacctagtgacagacggtcttcctgccaccgccctcgggttcaacccgccagacctcgatattatggagaagcttcccagaagtccacgagaagcactgatatctggatggctgttctttcgatatttagccattggagtgtatgtgggtcttgctacagtagcggcagcaacctggtggttcgtgtatgacgctgaaggcccacatatcaacttttaccagcttcggaactttcttaagtgtagtgaggacaatcccctcttcgcaggtattgattgtgaagttttcgaaagccggttccctactaccatggccctttctgtgttggtcaccatcgaaatgtgcaacgccttgaacagcgtgtccgagaaccaaagcctgctccggatgcccccttggatgaacccctggcttcttgtcgcggtggctatgtccatggcgcttcactttctgattctgctagtgcctccactgccgctgattttccaggtgactcctctgagcggcaggcagtgggtggtggtcttacagatctcactgcccgtgatcttgttagacgaggctttgaaatacttgtctcggaatcatatgcatgggcatacccagtcctag

SEQ ID NO: 316814 - DNA, 2997 bp, Artificial Sequence
  derived and/or modified sequence
atggaggcggcacaccttttgcccgctgcggatgtcctcagacatttctctgttacagccgagggtgggctgagtccagcgcaggtgaccggagccagagagagatatggacccaatgagttgccatcggaggaaggcaaatcactgtgggagctggttctggagcagttcgaggacctgctggtaaggatactgcttctcgccgcactcgtctccttcgtcctagcgtggttcgaggagggcgaagagaccactaccgcgttcgttgaacccctcgtgatcatgctcattctggtggctaacgccatagtgggagtctggcaagaacgaaacgccgagagcgccattgaggcgctaaaggagtacgaacctgagatgggaaaggtcatcaggtctgacagaaaaggggttcagcgcattcgtgcacgcgatatagtgccaggagatatcgtggaggtggctgtgggagataaggtccctgcagacttacgcctgatcgaaatcaagtccaccacactgcgggtcgaccagtctatcttaacaggagaatcagtttcagtcaccaagcatactgaggctattcctgacccacgcgcagtgaaccaagacaaaaagaatatgctcttctccgggaccaacattacgtctggtaaggcagtgggcgtagccgtggccacagggctccatacagaactgggtaaaatcagatcgcagatggccgctgtggaacccgagcgcacgcccctgcagagaaagctggacgagttcggtaggcagttatcacacgcaatctctgtcatctgtgtggccgtatgggtcattaatatcgggcatttcgccgaccctgcccatggaggatcctggttgaggggggcagtatactactttaagatcgccgttgccctggctgttgccgcaatccccgaaggtcttccggcagtgatcaccacctgtctggccctcggaacaagacggatggcacgaaaaaatgccattgtaaggtcattacctagcgtggagacactaggatgtactagcgtaatttgctcggataagactggcaccctgacgactaaccagatgtctgtgtgtaggatgttcgtcgtggcggaggcagacgccggttcttgccttctgcacgaatttactatcagcggaaccacgtatactcccgagggtgaagtgcgtcaaggagatcagcccgttcgatgtgggcagtttgacggtttggtcgaactcgccaccatttgcgcactgtgtaatgattctgcgcttgactataacgaagcgaaaggggtttatgaaaaggtgggagaagccactgagacagccctcacttgcctggtagagaagatgaacgtgttcgatactgatctacaggcgctgtcacgcgtggaacgggcaggggcttgtaatacagttattaaacaactgatgcgaaaggaattcaccctggagttctcacgggatagaaagagcatgtcggtgtactgcacccccacacggccacaccctactggtcagggatccaaaatgttcgtcaagggagctcctgaatctgtgatcgagcgttgcagctccgttagagttggctccaggactgctccactcacccctacctcacgagaacagatcctcgccaagattcgggattggggctccggctctgatacactacggtgcctggcactggcaacccgagacgcaccccctcgcaaggaggatatggagctggacgattgctccaaatttgttcagtatgagacagatctaaccttcgtgggttgtgtaggcatgctggatcccccacgacccgaggtggccgcatgcatcacccgctgttaccaggctgggattagggtcgtaatgattaccggagataacaaggggaccgcagtggctatctgcagacgcctcgggatcttcggcgacacagaagacgttgcgggtaaggcttacaccggaagggaattcgacgatctttccccagagcagcagaggcaagcatgccgaacagccaggtgttttgctcgcgtggagcccgctcacaagtcacggattgttgagaatttgcagtcctttaatgagattaccgcaatgacgggcgacggcgtgaacgatgctccagccttgaagaaagccgagataggaatcgccatgggaagtgggaccgccgtggctaaatctgcagcggaaatggtcctctcagatgataacttcgcctctatcgtggccgctgttgaagagggtcgcgctatctattcaaatatgaaacagttcatcagatatctaatctcatctaatgtgggcgaggtggtgtgcatcttcctgaccgccatcctaggattgcccgaggcactgatcccagttcagctgctgtgggtcaaccttgtgactgacggcctccccgcaactgctttgggatttaacccacctgacctggacataatggagaaactaccacgctcacctcgcgaagccctgatctcggggtggcttttttttagatacctggctataggcgtttacgttggacttgccacagtggccgcagctacctggtggtttgtgtacgatgccgaaggtccccatatcaacttttaccaactgcggaactttttaaaatgctccgaagacaatccgctgttcgcaggaattgattgcgaagttttcgaaagtaggttccctaccaccatggcgctatcagtgctggtgacgatcgagatgtgcaatgccctcaactctgtctctgagaatcagtcactcctcaggatgcccccatggatgaatccatggcttcttgtagctgtggcaatgtcaatggctctccactttctgattctgctggtgcctcccctacccctcatctttcaagtcacaccgctatctggtagacagtgggtagttgtgctgcagatcagcctacccgtcattctgctagatgaggcccttaagtatctttcaagaaatcatatgcatgaaatgtcccagaaatag

SEQ ID NO: 316815 - DNA, 3145 bp, Artificial Sequence
  derived and/or modified sequence
ccgccgccactgccgtcgggtaaggtcccagcacggacatggcctcgcgcggcgcccgcccgggcccgagtcccccgcgccccgctttgtagccccccggcggagaggcggcctcgacggtgcggacggcgcagacggccgggcgggcggcatggaggcggcgcatctgctcccggccgccgacgtgctgcgccacttctcggtgacagccgagggcggcctgagcccggcgcaggtgaccggcgcgcgggagcgctacggccccaacgagctcccgagtgaggaagggaagtccctgtgggagctggtgctggaacagtttgaggacctcctggtgcgcatcctgctgctggctgcccttgtctcctttgtcctggcctggttcgaggagggcgaggagaccacgaccgccttcgtggagcccctggtcatcatgctgatcctcgtggccaacgccattgtgggcgtgtggcaggaacgcaacgccgagagtgccatcgaggccctgaaggagtatgagcctgagatgggcaaggtgatccgctcggaccgcaagggcgtgcagaggatccgtgcccgggacatcgtcccaggggacattgtagaagtggcagtgggggacaaagtgcctgctgacctccgcctcatcgagatcaagtccaccacgctgcgagtggaccagtccatcctgacgggtgaatctgtgtccgtgaccaagcacacagaggccatcccagaccccagagctgtgaaccaggacaagaagaacatgctgttttctggcaccaatatcacatcgggcaaagcggtgggtgtggccgtggccaccggcctgcacacggagctgggcaagatccggagccagatggcggcagtcgagcccgagcggacgccgctgcagcgcaagctggacgagtttggacggcagctgtcccacgccatctctgtgatctgcgtggccgtgtgggtcatcaacatcggccacttcgccgacccggcccacggtggctcctggctgcgtggcgctgtctactacttcaagatcgccgtggccctggcggtggcggccatccccgagggcctcccggctgtcatcactacatgcctggcactgggcacgcggcgcatggcacgcaagaacgccatcgtgcgaagcctgccgtccgtggagaccctgggctgcacctcagtcatctgctccgacaagacgggcacgctcaccaccaatcagatgtctgtctgccggatgttcgtggtagccgaggccgatgcgggctcctgccttttgcacgagttcaccatctcgggtaccacgtatacccccgagggcgaagtgcggcagggggatcagcctgtgcgctgcggccagttcgacgggctggtggagctggcgaccatctgcgccctgtgcaacgactcggctctggactacaacgaggccaagggtgtgtatgagaaggtgggagaggccacggagacagctctgacttgcctggtggagaagatgaacgtgttcgacaccgacctgcaggctctgtcccgggtggagcgagctggcgcctgtaacacggtcatcaagcagctgatgcggaaggagttcaccctggagttctcccgagaccggaaatccatgtccgtgtactgcacgcccacccgccctcaccctactggccagggcagcaagatgtttgtgaagggggctcctgagagtgtgatcgagcgctgtagctcagtccgcgtggggagccgcacagcacccctgacccccacctccagggagcagatcctggcaaagatccgggattggggctcaggctcagacacgctgcgctgcctggcactggccacccgggacgcgcccccaaggaaggaggacatggagctggacgactgcagcaagtttgtgcagtacgagacggacctgaccttcgtgggctgcgtaggcatgctggacccgccgcgacctgaggtggctgcctgcatcacacgctgctaccaggcgggcatccgcgtggtcatgatcacgggggataacaaaggcactgccgtggccatctgccgcaggcttggcatctttggggacacggaagacgtggcgggcaaggcctacacgggccgcgagtttgatgacctcagccccgagcagcagcgccaggcctgccgcaccgcccgctgcttcgcccgcgtggagcccgcacacaagtcccgcatcgtggagaacctgcagtcctttaacgagatcactgctatgactggcgatggagtgaacgacgcaccagccctgaagaaagcagagatcggcatcgccatgggctcaggcacggccgtggccaagtcggcggcagagatggtgctgtcagatgacaactttgcctccatcgtggctgcggtggaggagggccgggccatctacagcaacatgaagcaattcatccgctacctcatctcctccaatgttggcgaggtcgtctgcatcttcctcacggcaattctgggcctgcccgaagccctgatccctgtgcagctgctctgggtgaacctggtgacagacggcctacctgccacggctctgggcttcaacccgccagacctggacatcatggagaagctgccccggagcccccgagaagccctcatcagtggctggctcttcttccgatacctggctatcggagtgtacgtaggcctggccacagtggctgccgccacctggtggtttgtgtatgacgccgagggacctcacatcaacttctaccagctgaggaacttcctgaagtgctccgaagacaacccgctctttgccggcatcgactgtgaggtgttcgagtcacgcttccccaccaccatggccttgtccgtgctcgtgaccattgaaatgtgcaatgccctcaacagcgtctcggagaaccagtcgctgctgcggatgccgccctggatgaacccctggctgctggtggctgtggccatgtccatggccctgcacttcctcatcctgctcgtgccgcccctgcctctcattttccaggtgaccccactgagcgggcgccagtgggtggtggtgctccagatatctctgcctgtcatcctgctggatgaggccctcaagtacctgtcccggaaccacatgcacggtcacacccagagt

SEQ ID NO: 316816 - DNA, 4695 bp, Artificial Sequence
  derived and/or modified sequence
ccgccgccactgccgtcgggtaaggtcccagcacggacatggcctcgcgcggcgcccgcccgggcccgagtcccccgcgccccgctttgtagccccccggcggagaggcggcctcgacggtgcggacggcgcagacggccgggcgggcggcatggaggcggcgcatctgctcccggccgccgacgtgctgcgccacttctcggtgacagccgagggcggcctgagcccggcgcaggtgaccggcgcgcgggagcgctacggccccaacgagctcccgagtgaggaagggaagtccctgtgggagctggtgctggaacagtttgaggacctcctggtgcgcatcctgctgctggctgcccttgtctcctttgtcctggcctggttcgaggagggcgaggagaccacgaccgccttcgtggagcccctggtcatcatgctgatcctcgtggccaacgccattgtgggcgtgtggcaggaacgcaacgccgagagtgccatcgaggccctgaaggagtatgagcctgagatgggcaaggtgatccgctcggaccgcaagggcgtgcagaggatccgtgcccgggacatcgtcccaggggacattgtagaagtggcagtgggggacaaagtgcctgctgacctccgcctcatcgagatcaagtccaccacgctgcgagtggaccagtccatcctgacgggtgaatctgtgtccgtgaccaagcacacagaggccatcccagaccccagagctgtgaaccaggacaagaagaacatgctgttttctggcaccaatatcacatcgggcaaagcggtgggtgtggccgtggccaccggcctgcacacggagctgggcaagatccggagccagatggcggcagtcgagcccgagcggacgccgctgcagcgcaagctggacgagtttggacggcagctgtcccacgccatctctgtgatctgcgtggccgtgtgggtcatcaacatcggccacttcgccgacccggcccacggtggctcctggctgcgtggcgctgtctactacttcaagatcgccgtggccctggcggtggcggccatccccgagggcctcccggctgtcatcactacatgcctggcactgggcacgcggcgcatggcacgcaagaacgccatcgtgcgaagcctgccgtccgtggagaccctgggctgcacctcagtcatctgctccgacaagacgggcacgctcaccaccaatcagatgtctgtctgccggatgttcgtggtagccgaggccgatgcgggctcctgccttttgcacgagttcaccatctcgggtaccacgtatacccccgagggcgaagtgcggcagggggatcagcctgtgcgctgcggccagttcgacgggctggtggagctggcgaccatctgcgccctgtgcaacgactcggctctggactacaacgaggccaagggtgtgtatgagaaggtgggagaggccacggagacagctctgacttgcctggtggagaagatgaacgtgttcgacaccgacctgcaggctctgtcccgggtggagcgagctggcgcctgtaacacggtcatcaagcagctgatgcggaaggagttcaccctggagttctcccgagaccggaaatccatgtccgtgtactgcacgcccacccgccctcaccctactggccagggcagcaagatgtttgtgaagggggctcctgagagtgtgatcgagcgctgtagctcagtccgcgtggggagccgcacagcacccctgacccccacctccagggagcagatcctggcaaagatccgggattggggctcaggctcagacacgctgcgctgcctggcactggccacccgggacgcgcccccaaggaaggaggacatggagctggacgactgcagcaagtttgtgcagtacgagacggacctgaccttcgtgggctgcgtaggcatgctggacccgccgcgacctgaggtggctgcctgcatcacacgctgctaccaggcgggcatccgcgtggtcatgatcacgggggataacaaaggcactgccgtggccatctgccgcaggcttggcatctttggggacacggaagacgtggcgggcaaggcctacacgggccgcgagtttgatgacctcagccccgagcagcagcgccaggcctgccgcaccgcccgctgcttcgcccgcgtggagcccgcacacaagtcccgcatcgtggagaacctgcagtcctttaacgagatcactgctatgactggcgatggagtgaacgacgcaccagccctgaagaaagcagagatcggcatcgccatgggctcaggcacggccgtggccaagtcggcggcagagatggtgctgtcagatgacaactttgcctccatcgtggctgcggtggaggagggccgggccatctacagcaacatgaagcaattcatccgctacctcatctcctccaatgttggcgaggtcgtctgcatcttcctcacggcaattctgggcctgcccgaagccctgatccctgtgcagctgctctgggtgaacctggtgacagacggcctacctgccacggctctgggcttcaacccgccagacctggacatcatggagaagctgccccggagcccccgagaagccctcatcagtggctggctcttcttccgatacctggctatcggagtgtacgtaggcctggccacagtggctgccgccacctggtggtttgtgtatgacgccgagggacctcacatcaacttctaccagctgaggaacttcctgaagtgctccgaagacaacccgctctttgccggcatcgactgtgaggtgttcgagtcacgcttccccaccaccatggccttgtccgtgctcgtgaccattgaaatgtgcaatgccctcaacagcgtctcggagaaccagtcgctgctgcggatgccgccctggatgaacccctggctgctggtggctgtggccatgtccatggccctgcacttcctcatcctgctcgtgccgcccctgcctctcattttccaggtgaccccactgagcgggcgccagtgggtggtggtgctccagatatctctgcctgtcatcctgctggatgaggccctcaagtacctgtcccggaaccacatgcacgaaatgagccagaagtgagcgctgggaacagagtggagtctccggtgtgtacctcagactgatggtgcccatgtgttcgcctccgccccccacccttgccaccacactcgcccacttgcccaccgggtcccgccggataaatgacaggcccgaggtcagaatggccatccccgggccccgtcctggggtctctgtccccacttccttctggcctgggaggtctgtaattcctgtctcctggactctcctgggaagttccctgctctgcagctctggcccaggagctgcaggctgggagggggcagccaagaagccggagctggcagcatacccagagatccggggcccccccacccccaaatcacgagtgcagctggagcttgctcccccttgttcggaagctggacgttcacttggtgactggtgcctctgcactgacggaggactctgggggtccttcttaccggctctgacctctctcttcgtgcctggtctgggactgggtcagccctgggggatcagaaggggccatctgggcccagctgtgtacagcgagggtgggcagccccctccactccactctgcttccacaaagtcggctcccgagagctcgaggctgcttctgtttatatgtgcagggcccgggcgggtgaagggtcagagagacggacacaaggagccggcaggagggcggagcgaggatgtcctttcccgggagacaagtcgggaaagcctggctggactgcctcagccccgcgcgcctcctggactcagggttccccgtcctgagctcgggagatgttcagagtcacactgccgcccggtctgccacgcagaggtccaacttgccacccgcgtccctggtacctgagaccaccgacatcctcaggttcctgaccgtggcgcccttctacccagcccagtgtgcggccgccgcgctgtctgcacagctgggggcctctgagcctggtgggcttcctggactcttggcctcactccttgccccctccccacgacacccatgagccgaaaggatgtcactaaggatggctgattccccaagggcacccgctctccctccctccctgctggaggaacacgtcatatcagatgagaggaagatggcctctgatggacagaatttttctcttaactcagcttttgctactttggcaaaaactagcgaggggtagcagaaacctgcaccaaggattgtccctatgtcttggccactcctagagcgtgtgcagactgatgattttatatgtaaatcaagactcacatccctttcctagtcccccacatccaaagcccctcagcctgccttgcagaccaatgggctccatgttctgtagccccctcccctacgcctcacccctcctccctctcacaggttctgggcggccagtgagagaaacgcagtgggggaggcagggagtctggtgcctgcagagattctctgcttctttcctggggggaggtggggaggtcttagcaggagcgggccctgtacccacctgctgacctgctgtttggtagagaaataaaggttgtgtgactggggg

SEQ ID NO: 316817 - DNA, 2997 bp, Artificial Sequence
  derived and/or modified sequence
atggaggccgcccacctgctgcccgccgccgacgtgctgagacacttcagcgtgaccgccgagggcggcctgagccccgcccaggtgaccggcgccagagagagatacggccccaacgagctgcccagcgaggagggcaagagcctgtgggagctggtgctggagcagttcgaggacctgctggtgagaatcctgctgctggccgccctggtgagcttcgtgctggcctggttcgaggagggcgaggagaccaccaccgccttcgtggagcccctggtgatcatgctgatcctggtggccaacgccatcgtgggcgtgtggcaggagagaaacgccgagagcgccatcgaggccctgaaggagtacgagcccgagatgggcaaggtgatcagaagcgacagaaagggcgtgcagagaatcagagccagagacatcgtgcccggcgacatcgtggaggtggccgtgggcgacaaggtgcccgccgacctgagactgatcgagatcaagagcaccaccctgagagtggaccagagcatcctgaccggcgagagcgtgagcgtgaccaagcacaccgaggccatccccgaccccagagccgtgaaccaggacaagaagaacatgctgttcagcggcaccaacatcaccagcggcaaggccgtgggcgtggccgtggccaccggcctgcacaccgagctgggcaagatcagaagccagatggccgccgtggagcccgagagaacccccctgcagagaaagctggacgagttcggcagacagctgagccacgccatcagcgtgatctgcgtggccgtgtgggtgatcaacatcggccacttcgccgaccccgcccacggcggcagctggctgagaggcgccgtgtactacttcaagatcgccgtggccctggccgtggccgccatccccgagggcctgcccgccgtgatcaccacctgcctggccctgggcaccagaagaatggccagaaagaacgccatcgtgagaagcctgcccagcgtggagaccctgggctgcaccagcgtgatctgcagcgacaagaccggcaccctgaccaccaaccagatgagcgtgtgcagaatgttcgtggtggccgaggccgacgccggcagctgcctgctgcacgagttcaccatcagcggcaccacctacacccccgagggcgaggtgagacagggcgaccagcccgtgagatgcggccagttcgacggcctggtggagctggccaccatctgcgccctgtgcaacgacagcgccctggactacaacgaggccaagggcgtgtacgagaaggtgggcgaggccaccgagaccgccctgacctgcctggtggagaagatgaacgtgttcgacaccgacctgcaggccctgagcagagtggagagagccggcgcctgcaacaccgtgatcaagcagctgatgagaaaggagttcaccctggagttcagcagagacagaaagagcatgagcgtgtactgcacccccaccagaccccaccccaccggccagggcagcaagatgttcgtgaagggcgcccccgagagcgtgatcgagagatgcagcagcgtgagagtgggcagcagaaccgcccccctgacccccaccagcagagagcagatcctggccaagatcagagactggggcagcggcagcgacaccctgagatgcctggccctggccaccagagacgccccccccagaaaggaggacatggagctggacgactgcagcaagttcgtgcagtacgagaccgacctgaccttcgtgggctgcgtgggcatgctggacccccccagacccgaggtggccgcctgcatcaccagatgctaccaggccggcatcagagtggtgatgatcaccggcgacaacaagggcaccgccgtggccatctgcagaagactgggcatcttcggcgacaccgaggacgtggccggcaaggcctacaccggcagagagttcgacgacctgagccccgagcagcagagacaggcctgcagaaccgccagatgcttcgccagagtggagcccgcccacaagagcagaatcgtggagaacctgcagagcttcaacgagatcaccgccatgaccggcgacggcgtgaacgacgcccccgccctgaagaaggccgagatcggcatcgccatgggcagcggcaccgccgtggccaagagcgccgccgagatggtgctgagcgacgacaacttcgccagcatcgtggccgccgtggaggagggcagagccatctacagcaacatgaagcagttcatcagatacctgatcagcagcaacgtgggcgaggtggtgtgcatcttcctgaccgccatcctgggcctgcccgaggccctgatccccgtgcagctgctgtgggtgaacctggtgaccgacggcctgcccgccaccgccctgggcttcaacccccccgacctggacatcatggagaagctgcccagaagccccagagaggccctgatcagcggctggctgttcttcagatacctggccatcggcgtgtacgtgggcctggccaccgtggccgccgccacctggtggttcgtgtacgacgccgagggcccccacatcaacttctaccagctgagaaacttcctgaagtgcagcgaggacaaccccctgttcgccggcatcgactgcgaggtgttcgagagcagattccccaccaccatggccctgagcgtgctggtgaccatcgagatgtgcaacgccctgaacagcgtgagcgagaaccagagcctgctgagaatgcccccctggatgaacccctggctgctggtggccgtggccatgagcatggccctgcacttcctgatcctgctggtgccccccctgcccctgatcttccaggtgacccccctgagcggcagacagtgggtggtggtgctgcagatcagcctgcccgtgatcctgctggacgaggccctgaagtacctgagcagaaaccacatgcacggccacacccagagctag

SEQ ID NO: 316818 - DNA, 2997 bp, Artificial Sequence
  derived and/or modified sequence
atggaggccgcccacctgctgcccgccgccgacgtgctgagacacttcagcgtgaccgccgagggcggcctgagccccgcccaggtgaccggcgccagagagagatacggccccaacgagctgcccagcgaggagggcaagagcctgtgggagctggtgctggagcagttcgaggacctgctggtgagaatcctgctgctggccgccctggtgagcttcgtgctggcctggttcgaggagggcgaggagaccaccaccgccttcgtggagcccctggtgatcatgctgatcctggtggccaacgccatcgtgggcgtgtggcaggagagaaacgccgagagcgccatcgaggccctgaaggagtacgagcccgagatgggcaaggtgatcagaagcgacagaaagggcgtgcagagaatcagagccagagacatcgtgcccggcgacatcgtggaggtggccgtgggcgacaaggtgcccgccgacctgagactgatcgagatcaagagcaccaccctgagagtggaccagagcatcctgaccggcgagagcgtgagcgtgaccaagcacaccgaggccatccccgaccccagagccgtgaaccaggacaagaagaacatgctgttcagcggcaccaacatcaccagcggcaaggccgtgggcgtggccgtggccaccggcctgcacaccgagctgggcaagatcagaagccagatggccgccgtggagcccgagagaacccccctgcagagaaagctggacgagttcggcagacagctgagccacgccatcagcgtgatctgcgtggccgtgtgggtgatcaacatcggccacttcgccgaccccgcccacggcggcagctggctgagaggcgccgtgtactacttcaagatcgccgtggccctggccgtggccgccatccccgagggcctgcccgccgtgatcaccacctgcctggccctgggcaccagaagaatggccagaaagaacgccatcgtgagaagcctgcccagcgtggagaccctgggctgcaccagcgtgatctgcagcgacaagaccggcaccctgaccaccaaccagatgagcgtgtgcagaatgttcgtggtggccgaggccgacgccggcagctgcctgctgcacgagttcaccatcagcggcaccacctacacccccgagggcgaggtgagacagggcgaccagcccgtgagatgcggccagttcgacggcctggtggagctggccaccatctgcgccctgtgcaacgacagcgccctggactacaacgaggccaagggcgtgtacgagaaggtgggcgaggccaccgagaccgccctgacctgcctggtggagaagatgaacgtgttcgacaccgacctgcaggccctgagcagagtggagagagccggcgcctgcaacaccgtgatcaagcagctgatgagaaaggagttcaccctggagttcagcagagacagaaagagcatgagcgtgtactgcacccccaccagaccccaccccaccggccagggcagcaagatgttcgtgaagggcgcccccgagagcgtgatcgagagatgcagcagcgtgagagtgggcagcagaaccgcccccctgacccccaccagcagagagcagatcctggccaagatcagagactggggcagcggcagcgacaccctgagatgcctggccctggccaccagagacgccccccccagaaaggaggacatggagctggacgactgcagcaagttcgtgcagtacgagaccgacctgaccttcgtgggctgcgtgggcatgctggacccccccagacccgaggtggccgcctgcatcaccagatgctaccaggccggcatcagagtggtgatgatcaccggcgacaacaagggcaccgccgtggccatctgcagaagactgggcatcttcggcgacaccgaggacgtggccggcaaggcctacaccggcagagagttcgacgacctgagccccgagcagcagagacaggcctgcagaaccgccagatgcttcgccagagtggagcccgcccacaagagcagaatcgtggagaacctgcagagcttcaacgagatcaccgccatgaccggcgacggcgtgaacgacgcccccgccctgaagaaggccgagatcggcatcgccatgggcagcggcaccgccgtggccaagagcgccgccgagatggtgctgagcgacgacaacttcgccagcatcgtggccgccgtggaggagggcagagccatctacagcaacatgaagcagttcatcagatacctgatcagcagcaacgtgggcgaggtggtgtgcatcttcctgaccgccatcctgggcctgcccgaggccctgatccccgtgcagctgctgtgggtgaacctggtgaccgacggcctgcccgccaccgccctgggcttcaacccccccgacctggacatcatggagaagctgcccagaagccccagagaggccctgatcagcggctggctgttcttcagatacctggccatcggcgtgtacgtgggcctggccaccgtggccgccgccacctggtggttcgtgtacgacgccgagggcccccacatcaacttctaccagctgagaaacttcctgaagtgcagcgaggacaaccccctgttcgccggcatcgactgcgaggtgttcgagagcagattccccaccaccatggccctgagcgtgctggtgaccatcgagatgtgcaacgccctgaacagcgtgagcgagaaccagagcctgctgagaatgcccccctggatgaacccctggctgctggtggccgtggccatgagcatggccctgcacttcctgatcctgctggtgccccccctgcccctgatcttccaggtgacccccctgagcggcagacagtgggtggtggtgctgcagatcagcctgcccgtgatcctgctggacgaggccctgaagtacctgagcagaaaccacatgcacgagatgagccagaagtag

SEQ ID NO: 316819 - protein, 626 aa, Artificial Sequence
  derived and/or modified sequence
MVLELPKRWGKNSEFEGGKSTVNCSTTPVAERFFTSSTSLTLKHAAWYPSEILDPHVVLLTSDNVIRIYSLREPQTPTNVIILSEAEEESLVLNKGRAYTASLGETAVAFDFGPLAAVPKTLFGQNGKDEVVAYPLYILYENGETFLTYISLLHSPGNIGKLLGPLPMHPAAEDNYGYDACAVLCLPCVPNILVIATESGMLYHCVVLEGEEEDDHTSEKSWDSRIDLIPSLYVFECVELELALKLASGEDDPFDSDFSCPVKLHRDPKCPSRYHCTHEAGVHSVGLTWIHKLHKFLGSDEEDKDSLQELSTEQKCFVEHILCTKPLPCRQPAPIRGFWIVPDILGPTMICITSTYECLIWPLLSTVHPASPPLLCTREDVEVAESPLRVLAETPDSFEKHIRSILQRSVANPAFLNCFTQLRKIKVETLFLRASEKDIAPPPEECLQLLSRATQVFREQYILKQDLAKEEIQRRVKLLCDQKKKQLEDLSYCREERKSLREMAERLADKYEEAKEKQEDIMNRMKKLLHSFHSELPVLSDSERDMKKELQLIPDQLRHLGNAIKQVTMKKDYQQQKMEKVLSLPKPTIILSAYQRKCIQSILKEEGEHIREMVKQINDIRNHVNF

SEQ ID NO: 316820 - DNA, 1881 bp, Artificial Sequence
  derived and/or modified sequence
atggttctggaacttcctaaacgttggggcaaaaactcagagtttgaaggtggaaagagcaccgtaaactgtagtacaacccccgtggcggagcggtttttcacaagttctacaagcctcaccctcaagcacgcagcctggtatccttctgagatcctggacccgcacgtcgtgctcctgacttccgacaatgttattaggatctattctctacgcgagcctcagacccctactaacgttattattctgagcgaggccgaggaggagtctctggtgctgaacaaggggcgcgcgtataccgcgagtctgggcgaaactgcagtggcatttgactttggcccgctcgctgcagtgccaaaaaccctgttcggacagaatggcaaagacgaggtggttgcctatcctctctatatcctgtacgaaaatggcgaaacttttctgacctacatctccctgctacacagtccggggaacatcgggaagctgctcggacctttgcccatgcacccagctgccgaagataattacgggtatgacgcgtgtgccgtgttgtgcctaccatgcgtacctaacatcctggtgatagctacagagtctggaatgctgtaccactgtgtcgtcctagagggcgaagaagaggacgatcacacaagtgagaagagttgggattcaaggatagatttgatccctagcctgtacgtgtttgaatgtgtggaactggaattggccttaaaactggcctctggcgaggacgacccctttgactccgatttttcttgtccagtgaaacttcatagagaccccaagtgtccatctagatatcactgcacgcatgaagcgggcgtgcactccgtgggcctgacctggatccacaaactgcataaattcctgggaagcgacgaagaagacaaggacagtctgcaggagctgtccactgaacagaaatgttttgttgagcacatactgtgtactaagcctcttccctgccgccaacctgctcctatccgcggtttctggatcgtccctgacatcctggggccaacgatgatctgcattaccagcacctatgagtgtcttatatggcctctcctgtcaactgtacaccccgctagccccccgctactttgcaccagagaggatgtggaagtggcagagagccctttacgcgtactcgcggagactcctgatagttttgaaaaacatatccgaagcatactgcagcgaagcgtcgctaatcccgcattcctgaactgcttcacgcagttgcgtaagattaaagtggagaccctgtttctcagggcctcagaaaaagatatcgctccgcctcccgaggagtgtttacaactgctgtcccgagccacacaggtgtttagggagcaatacatattgaagcaggatctagccaaggaggaaattcagcgccgcgtgaagctactctgcgaccagaaaaaaaaacagctggaggacctgtcgtactgtcgggaggaaagaaagtcattgagggaaatggccgagcgactggccgacaagtacgaagaggctaaggaaaaacaggaagatattatgaacaggatgaaaaagctgttacatagcttccacagcgagctcccggtcctatcagattccgagcgggacatgaaaaaagagttacagcttataccggatcagcttagacatctgggaaacgcaattaaacaggtcacaatgaagaaagactaccagcaacagaaaatggaaaaagtgctgtctttgcccaagccaaccattatactgtctgcctatcagcggaagtgtatccagtcgattctcaaagaggaaggcgagcacattcgcgagatggtgaaacagatcaacgacatacgcaatcacgtcaacttctag

SEQ ID NO: 316821 - DNA, 1881 bp, Artificial Sequence
  derived and/or modified sequence
atggtgctggagctgcccaagcgctggggcaagaacagcgagtttgaaggaggcaagagcacagtgaactgcagcaccacccctgtggccgagcgcttcttcaccagcagcaccagcctgaccctgaagcatgctgcctggtaccccagcgagatcctggacccccacgtggtgctgctgaccagtgacaacgtcatccgcatctacagcctgcgggagccccagacccccaccaacgtcatcatcctgtctgaggccgaggaggagagcctggtgctgaacaagggccgggcctacacagccagcctgggggagacagctgtggcctttgattttggccccctggccgctgtgcccaagaccctgtttggccagaatggcaaggatgaggtggtggcctaccccctgtacatcctgtatgaaaatggagagaccttcctgacctacatcagcctgctgcacagccctggcaacatcggcaagctgctgggccccctgcccatgcaccctgctgctgaggacaactacggctatgatgcctgtgctgtgctgtgcctgccctgtgtgcccaacatcctggtgattgccacagaaagtggcatgctgtaccactgtgtggtgctggagggggaggaggaggatgaccacaccagcgagaagtcctgggacagcagaattgacctgatccccagcctgtatgtgtttgaatgtgtggagctggagctggccctgaagctggccagcggggaggatgacccctttgacagcgacttcagctgccctgtgaagctgcaccgggaccccaagtgccccagccgctaccactgcacccatgaggccggcgtgcacagcgtgggcctgacctggatccacaagctgcacaagttcctgggcagtgatgaggaggacaaggacagcctgcaggagctgagcacagagcagaagtgctttgtggagcacatcctgtgcaccaagcccctgccctgccggcagcctgcccccatccggggcttctggatcgtgcctgacatcctgggccccaccatgatctgcatcaccagcacctatgaatgtctcatctggcccctgctgagcacagtgcacccagccagcccccccctgctgtgcaccagagaagatgtggaggtggccgagagccccctgcgggtgctggccgagaccccagacagctttgagaagcacatccgcagcatcctgcagaggtctgtggccaacccagccttcctgaactgcttcacccagctgaggaagatcaaggtggagaccctcttcctgcgggccagcgagaaggacatcgcccctcctccagaagaatgtctgcagctgctgagccgggccacccaggtgttccgggagcagtacatcctgaagcaggacctggccaaggaggagatccagaggagagtgaagctgctgtgtgaccagaagaagaagcagctggaggacctgagctactgccgggaggagaggaagagcctgcgggagatggccgagcggctggccgacaagtatgaggaggccaaggagaagcaggaggacatcatgaacaggatgaagaagctgctgcacagcttccacagcgagctgcctgtgctgagtgacagcgagcgggacatgaagaaggagctgcagctgatcccagaccagctgcggcacctgggcaatgccatcaagcaggtgaccatgaagaaggactaccagcagcagaagatggagaaggtgctgagcctgcccaagcccaccatcatcctgagcgcctaccagaggaagtgcatccagagcatcctgaaggaggagggggagcacatccgggagatggtgaagcagatcaatgacatcagaaatcatgtgaacttctag

SEQ ID NO: 316822 - DNA, 1881 bp, Artificial Sequence
  derived and/or modified sequence
atggtgctggagctgcccaagcggtggggcaagaacagcgagttcgagggcggcaagagcacagtcaattgcagcacaacgcctgtggcggaacgcttttttacatcttccacctctttgactttaaaacatgctgcctggtatccatccgagatactggatccacatgttgtgctcctcacaagcgataatgtgatacggatttactctctccgcgagccgcagacacctaccaatgtgatcatcttatcagaagctgaagaagagtctcttgtgctcaataaggggcgagcatatacggctagtctgggtgagactgccgtcgcatttgattttggccccctggccgccgtgccaaagaccctttttggacagaatgggaaagacgaagtggtggcctacccactctacatactctatgaaaacggcgaaacattcctaacctatatttccctgctccactcacccggaaacatcggaaagttgctgggtcctttgccaatgcaccccgctgcagaggacaattacggatatgacgcctgcgctgttctgtgcctgccctgtgtgccaaatattctagtcatcgccaccgagtccggcatgttgtatcattgtgtcgttctggaaggcgaggaagaggacgaccacacttcggagaagtcctgggattcccgcatagatttgattccctccctgtacgtgtttgaatgtgtggagctggagctggcgcttaagctagctagcggcgaagacgatccatttgattccgacttcagttgccctgttaaactgcatcgggaccctaaatgcccttcacgatatcattgcacccacgaggccggcgtgcactcagtaggcctgacgtggatacataaactgcataaattcctggggagtgacgaggaagataaagacagcctccaagaattgagcaccgaacagaagtgttttgtggaacatatcctgtgtaccaaacccctgccttgccgtcaacccgcacctataaggggattttggatcgttcccgatatccttggacccacgatgatttgtatcacttctacatatgaatgtctgatttggccactcctgtcaacagtgcaccccgctagccccccactgttgtgcacgagggaagacgtcgaagtggccgagtcgcctctaagggtcttggctgagactcccgactcatttgaaaaacacatccggtcaattctgcagaggtccgtggctaacccagcatttctgaattgctttactcagctgcggaagatcaaggtggaaacactatttctcagagcaagtgagaaagacattgcccctcccccggaagaatgccttcagctgcttagcagagccacacaagtgttccgcgaacaatacatactgaaacaagacctggctaaagaagagatacagagacgagtgaagctactgtgcgatcagaagaagaagcagctggaggatctgtcttattgcagagaggagcgcaagagcctcagagagatggccgaacgactggctgacaagtacgaagaagctaaggaaaaacaagaagacattatgaataggatgaagaagctgcttcattcttttcatagcgagctgccagtgctttccgattccgaacgggatatgaaaaaggagctccagctgattcccgatcagcttcgacatctgggaaatgccataaagcaggtcacaatgaaaaaagattaccagcagcagaagatggagaaggttttgtccctccccaagccgacgatcatcctctccgcttaccaaaggaaatgtattcagagcatactgaaggaggagggggagcacattagagagatggttaaacagataaatgatataaggaaccatgtgaacttctag

SEQ ID NO: 316823 - DNA, 1881 bp, Artificial Sequence
  derived and/or modified sequence
atggttttggagctgccgaagcgttggggtaaaaattctgagtttgagggcggtaagtctacagttaactgctctaccaccccagtagcagaacgtttcttcaccagctcgacatcccttaccttaaagcacgccgcatggtatcccagcgagatcctcgaccctcacgtggtgctcctgacatctgataatgtgatcagaatctattcactcagggagccacagacaccaacaaacgtaatcattcttagcgaagctgaggaggagtctctggttcttaataagggaagggcctacaccgcctcactcggcgagactgcagttgcctttgattttggccctctcgcagccgtgcctaagacccttttcggtcagaatggtaaggatgaggtggtggcttaccctctttatatcttatatgaaaatggggagacctttcttacatacatatcactgctgcattcccccggaaacataggaaaactacttggcccactgccaatgcatcctgccgcagaggacaactatggctatgacgcatgcgctgttttgtgtctgccgtgtgttccaaacattctggtcattgccactgagagtggcatgctttaccattgtgtggtcctcgagggcgaagaggaagatgaccatacatcagagaagtcttgggatagtcgcatcgacctgattcctagcctttatgtcttcgaatgcgtggagctagagctggcactgaagctggcttcgggtgaagacgatcctttcgactcagacttttcttgccctgtaaagctgcacagagatccaaagtgcccaagccgctatcactgcacacatgaagcaggagtgcactcagtgggacttacctggatccataaattgcacaaattcctaggaagcgatgaggaggacaaggatagcctgcaggaactgtctaccgaacagaagtgcttcgttgagcacattctctgcacaaaacccctgccttgtcgtcagcccgcacctatccgtggcttctggattgtaccagacatcttaggaccaaccatgatctgcattaccagcacctatgagtgtctgatttggcccctactgagcaccgtccacccagccagtccccctctcctctgtacaagagaggatgtggaagttgcagagagtcctctgcgagttttggcagagacacctgattccttcgaaaaacacattcgttccatcctgcagagaagcgtggccaaccctgccttcctgaattgcttcacccaactccgaaagattaaggttgaaactctttttttgcgggcttctgaaaaggatatagcgcctccccctgaggaatgtcttcagctgctgagcagggccacccaggtgtttcgagaacagtacattcttaaacaggacttggcaaaggaagagatacagagaagagtcaagctcttgtgcgaccagaagaagaagcagctggaggatctaagctattgccgcgaggagcggaagagtctcagggaaatggccgagaggctcgccgataaatacgaagaggccaaagaaaagcaggaggacataatgaacagaatgaaaaagctgctgcactccttccactccgagctccccgtcctttccgattctgaaagggacatgaaaaaggaattgcagctgattccggaccagctgcgccacctcgggaacgccattaagcaggtgactatgaagaaggattaccagcagcagaagatggagaaggtgctcagcctgcctaaacctacaattattctgagtgcgtatcagcgcaagtgcattcagagtattttgaaggaggaaggggaacacattagggagatggtcaaacagattaacgacataagaaaccatgttaatttttag

SEQ ID NO: 316824 - DNA, 1881 bp, Artificial Sequence
  derived and/or modified sequence
atggtgctggagctgcccaagagatggggcaagaacagcgagttcgagggcggcaagagcaccgtgaactgcagcaccacccccgtggccgagagattcttcaccagcagcaccagcctgaccctgaagcacgccgcctggtaccccagcgagatcctggacccccacgtggtgctgctgaccagcgacaacgtgatcagaatctacagcctgagagagccccagacccccaccaacgtgatcatcctgagcgaggccgaggaggagagcctggtgctgaacaagggcagagcctacaccgccagcctgggcgagaccgccgtggccttcgacttcggccccctggccgccgtgcccaagaccctgttcggccagaacggcaaggacgaggtggtggcctaccccctgtacatcctgtacgagaacggcgagaccttcctgacctacatcagcctgctgcacagccccggcaacatcggcaagctgctgggccccctgcccatgcaccccgccgccgaggacaactacggctacgacgcctgcgccgtgctgtgcctgccctgcgtgcccaacatcctggtgatcgccaccgagagcggcatgctgtaccactgcgtggtgctggagggcgaggaggaggacgaccacaccagcgagaagagctgggacagcagaatcgacctgatccccagcctgtacgtgttcgagtgcgtggagctggagctggccctgaagctggccagcggcgaggacgaccccttcgacagcgacttcagctgccccgtgaagctgcacagagaccccaagtgccccagcagataccactgcacccacgaggccggcgtgcacagcgtgggcctgacctggatccacaagctgcacaagttcctgggcagcgacgaggaggacaaggacagcctgcaggagctgagcaccgagcagaagtgcttcgtggagcacatcctgtgcaccaagcccctgccctgcagacagcccgcccccatcagaggcttctggatcgtgcccgacatcctgggccccaccatgatctgcatcaccagcacctacgagtgcctgatctggcccctgctgagcaccgtgcaccccgccagcccccccctgctgtgcaccagagaggacgtggaggtggccgagagccccctgagagtgctggccgagacccccgacagcttcgagaagcacatcagaagcatcctgcagagaagcgtggccaaccccgccttcctgaactgcttcacccagctgagaaagatcaaggtggagaccctgttcctgagagccagcgagaaggacatcgcccccccccccgaggagtgcctgcagctgctgagcagagccacccaggtgttcagagagcagtacatcctgaagcaggacctggccaaggaggagatccagagaagagtgaagctgctgtgcgaccagaagaagaagcagctggaggacctgagctactgcagagaggagagaaagagcctgagagagatggccgagagactggccgacaagtacgaggaggccaaggagaagcaggaggacatcatgaacagaatgaagaagctgctgcacagcttccacagcgagctgcccgtgctgagcgacagcgagagagacatgaagaaggagctgcagctgatccccgaccagctgagacacctgggcaacgccatcaagcaggtgaccatgaagaaggactaccagcagcagaagatggagaaggtgctgagcctgcccaagcccaccatcatcctgagcgcctaccagagaaagtgcatccagagcatcctgaaggaggagggcgagcacatcagagagatggtgaagcagatcaacgacatcagaaaccacgtgaacttctag

SEQ ID NO: 316825 - protein, 315 aa, Artificial Sequence
  derived and/or modified sequence
MQPESGANGTVIAEFILLGLLEAPGLQPVVFVLFLFAYLVTVRGNLSILAAVLVEPKLHTPMYFFLGNLSVLDVGCISVTVPSMLSRLLSRKRAVPCGACLTQLFFFHLFVGVDCFLLTAMAYDRFLAICRPLTYSTRMSQTVQRMLVAASWACAFTNALTHTVAMSTLNFCGPNVINHFYCDLPQLFQLSCSSTQLNELLLFAVGFIMAGTPMALIVISYIHVAAAVLRIRSVEGRKKAFSTCGSHLTVVAIFYGSGIFNYMRLGSTKLSDKDKAVGIFNTVINPMLNPIIYSFRNPDVQSAIWRMLTGRRSLA

SEQ ID NO: 316826 - DNA, 465 bp, Artificial Sequence
  derived and/or modified sequence
atggagatcatgcccatgaacatcgtgagcatcatcagccccctgatcgacgtgagccccggcagaagaggcagactgaagaacgccggcggcggcatcagactggccgagagagtgaacagaagagccgacagaaacgtgctgagaagagagaagggcctggccctgggcagagtgaccttccccagagccggcagaggcagcagagtgagcgcccccgccagaagcgagcccggccccgccgccgtgcccggcggcgtgagaagagccgacgacagaaagttcccccccggcgccagccagcccgccttcagaagcagaagattccaggccgccgccggcggccccagctacgccaacgaccccaccagcagcgccaagcccgtgaagctgctgcccagagagagagccggcctgaaggtgaccaacttcagccagagcagagagagagagggcagcgcctag

SEQ ID NO: 316827 - DNA, 465 bp, Artificial Sequence
  derived and/or modified sequence
atggagattatgcctatgaacatcgtgagcattatctcacctttgatcgatgtgtctccaggacgtcgaggccggttaaaaaacgccggaggaggtattaggctggccgaacgggtgaatcgacgagccgaccggaatgtgctgcgcagggaaaagggactggccttaggtcgcgttacattccctcgggcaggccggggcagccgggtgagcgcccccgccagatcggagccaggccccgccgccgtcccagggggtgtacgtcgtgcagacgaccgcaagttccctcctggagcctcccagcccgcttttagaagcaggcgctttcaggcagcggctggcggacccagttacgcaaatgatcctacctctagcgcgaagccagtgaagcttttgccgcgcgagcgggccggactgaaagttactaatttctcccagtcccgagagcgcgaagggagcgcatag

SEQ ID NO: 316828 - DNA, 465 bp, Artificial Sequence
  derived and/or modified sequence
atggagatcatgcccatgaacatcgtgtccatcatcagccccctgattgatgtgtccccaggccggcggggccgcctgaagaatgccggcggcggcatccggctggccgagcgggtgaacagaagagctgacagaaatgtgctgcggcgggagaagggcctggccctgggccgggtgaccttcccccgggccggccggggcagccgggtgtctgccccagcccggtctgagcccggccctgctgctgtgcctgggggcgtgcggcgggcagatgacaggaagttccccccaggggccagccagcctgccttccgcagccgccgcttccaggccgctgctgggggccccagctatgccaatgaccccaccagcagcgccaagcctgtgaagctgctgccccgggagagagctggcctgaaggtgaccaacttcagccagagccgggagcgggagggcagcgcctag

SEQ ID NO: 316829 - DNA, 465 bp, Artificial Sequence
  derived and/or modified sequence
atggagatcatgcccatgaacatcgtgagcatcatcagccccctgatcgacgtgagccctgggcgaaggggtcggctgaagaatgccggaggtggcataagactcgccgaaagagtgaacaggagggccgatagaaatgtcttacgacgtgagaagggtttggccctggggagagtaaccttcccccgcgccggccgaggctctagagtgtcagctcctgcacggagcgagcccggacccgccgccgttccaggaggggtccggagagcagacgacaggaagtttcctccaggagcctcccagccagcatttaggagcagacggttccaagccgcagccggcggcccgtcatatgcgaacgatcctacttcttcagctaaacctgtcaaacttctgcctcgagaaagggctgggcttaaagtcaccaatttcagccagagccgggaacgcgaaggtagcgcttag

SEQ ID NO: 316830 - DNA, 465 bp, Artificial Sequence
  derived and/or modified sequence
atggaaatcatgcctatgaatatcgtaagcattatatcacctctgattgacgtttccccagggagacgcggacgccttaagaacgccggaggtggaatacggctcgccgaacgggtgaataggcgggctgataggaacgtgttgcggagggaaaaaggcttagccctgggacgggtgacctttcctagggcaggaagaggaagccgggtctccgcccctgcccgttctgagccgggtcccgcagccgtacccggtggcgtgagaagggctgatgaccgtaagtttccacccggagcttctcagcccgcatttagaagcaggagatttcaggcagcagctggaggtccctcatatgccaacgatcccacaagttcagcgaaaccagtgaagttgcttccccgtgaacgggcagggctgaaggtgacaaatttcagtcagagccgtgagagagaagggtcagcctag

SEQ ID NO: 316831 - DNA, 879 bp, Artificial Sequence
  derived and/or modified sequence
atgctactagatcggtcgggccaagggaaagtgtatgggctcatcggtaggcgaagattccagcagatggatgtactcgagggcctgaatttacttatcaccatctcaggcaaaagaaacaaactgcgcgtgtactatctatcttggctgcgaaataagatcctccacaacgaccctgaggtcgagaaaaagcaggggtggaccactgtgggagatatggaaggttgtggccattacagggtggtgaaatatgagcggattaagtttttggtaattgccttgaaatctagcgtggaggtgtatgcgtgggcaccaaaaccctaccataagttcatggcttttaagagctttgctgatctcccccatcgacccctcctcgtcgaccttacagtcgaggaaggccagagactgaaggtgatttacgggagttccgctggctttcacgccgtggatgttgattccggtaactcttatgacatttatatcccagtgcatatacagtcacagattacgcctcacgcgattatcttcctccccaacaccgacggcatggaaatgctcctgtgttacgaagatgagggtgtgtacgtcaatacttacgggcggatcatcaaagatgtggtgcttcaatggggcgagatgcctacgtctgtcgcctatatctgcagcaaccagataatgggctggggggagaaagcaatcgagattcggtccgtggaaactggccacctcgatggcgtgtttatgcataaaagggctcagcgtctgaagttcttatgcgaaagaaatgacaaagttttcttcgccagtgttcgctccggtggcagctcccaggtgtactttatgaccctcaatcggaactgcattatgaactggtag

SEQ ID NO: 316832 - DNA, 879 bp, Artificial Sequence
  derived and/or modified sequence
atgctgctggacaggagcggccagggcaaggtgtatggcctgattggaagaagacgcttccagcagatggatgtgctggagggcctgaacctgctgatcaccatcagcggcaagaggaacaagctgcgggtgtactacctgtcctggctgaggaacaagatcctgcacaatgaccctgaggtggagaagaagcagggctggaccaccgtgggggacatggagggctgcggccactacagagtggtgaagtatgaaagaatcaagttcctggtgattgccctgaagagctctgtggaggtgtatgcctgggcccccaagccctaccacaagttcatggccttcaagagctttgctgacctgccccaccggcccctgctggtggacctgactgtggaggagggccagaggctgaaggtgatctacggcagcagcgctggcttccacgctgtggatgtggacagcggcaacagctatgacatctacatccctgtgcacatccagagccagatcacccctcatgccatcatcttcctgcccaacacagatggcatggagatgctgctgtgctatgaagatgagggcgtgtatgtgaacacctacggccgcatcatcaaggatgtggtgctgcagtggggcgagatgcccacctctgtggcctacatctgcagcaaccagatcatgggctggggcgagaaggccatcgagatccgctctgtggagaccggccacctggatggagtcttcatgcacaagagggcccagaggctgaagttcctgtgtgaaagaaatgacaaggtgttctttgcctctgtgcgcagcggcggcagcagccaggtgtacttcatgaccctgaacagaaactgcatcatgaactggtag

SEQ ID NO: 316833 - DNA, 1907 bp, Artificial Sequence
  derived and/or modified sequence
gtccagcccagccactcacccaccgagaacagcaaaggccaaagcccaccctcgaaggatgggagtggtgactaccagtctcgtgggctggtaaaggcccctggcaagagctcgttcacgatgtttgtggatctagggatctaccagcctggaggcagtggggacagcatccccatcacagccctagtgggtggagagggcactcggctcgaccagctgcagtacgacgtgaggaagggttctgtggtcaacgtgaatcccaccaacacccgggcccacagtgagacccctgagatccggaagtacaagaagcgattcaactccgagatcctctgtgcagccctttggggggtcaacctgctggtgggcacggagaacgggctgatgttgctggaccgaagtgggcagggcaaggtgtatggactcattgggcggcgacgcttccagcagatggatgtgctggaggggctcaacctgctcatcaccatctcagggaaaaggaacaaactgcgggtgtattacctgtcctggctccggaacaagattctgcacaatgacccagaagtggagaagaagcagggctggaccaccgtgggggacatggagggctgcgggcactaccgtgttgtgaaatacgagcggattaagttcctggtcatcgccctcaagagctccgtggaggtgtatgcctgggcccccaaaccctaccacaaattcatggccttcaagtcctttgccgacctcccccaccgccctctgctggtcgacctgacagtagaggaggggcagcggctcaaggtcatctatggctccagtgctggcttccatgctgtggatgtcgactcggggaacagctatgacatctacatccctgtgcacatccagagccagatcacgccccatgccatcatcttcctccccaacaccgacggcatggagatgctgctgtgctacgaggacgagggtgtctacgtcaacacgtacgggcgcatcattaaggatgtggtgctgcagtggggggagatgcctacttctgtggcctacatctgctccaaccagataatgggctggggtgagaaagccattgagatccgctctgtggagacgggccacctcgacggggtcttcatgcacaaacgagctcagaggctcaagttcctgtgtgagcggaatgacaaggtgttttttgcctcagtccgctctgggggcagcagccaagtttacttcatgactctgaaccgtaactgcatcatgaactggtgacggggccctgggctggggctgtcccacactggacccagctctccccctgcagccaggcttcccgggccgcccctctttcccctccctgggcttttgcttttactggtttgatttcactggagcctgctgggaacgtgacctctgacccctgatgctttcgtgatcacgtgaccatcctcttccccaacatgtcctcttcccaaaactgtgcctgtccccagcttctggggagggacacagcttccccttcccaggaattgagtgggcctagcccctccccccttttctccatttgagaggagagtgcttggggcttgaaccccttaccccactgctggggcagggaccatttcttcattttctgaaagcactttaatgattccccttcccccaaactccagggaatggaggggggaccccgccagccaaaacattccccccattcccgacccccctctcctcttctagcccatgcccttccccggtggagggagggagcagggagccctcactctccacgccccttgcttgcatctgtatatagtgtgagcagcaagtaacccttctccctccccccccacccctcctcaatgtagtggccttggatatcctgtttgttaataaagacaattcaaccagctccc

SEQ ID NO: 316834 - DNA, 879 bp, Artificial Sequence
  derived and/or modified sequence
atgctgctggaccggagcggccagggcaaggtgtacggcctgatcggccgccggcggtttcagcagatggatgtcctggagggccttaatctgctgatcactatcagcggaaagagaaacaagctccgcgtgtattacctgagttggcttagaaacaaaatcctccataacgatccagaggtcgagaagaaacaggggtggactacagtaggtgatatggagggatgcggccactaccgcgtggtgaagtacgaacggatcaagtttctggttatcgccctcaagtcctcagtggaagtgtacgcatgggctccgaaaccttaccataagttcatggcttttaaaagcttcgctgacctgcctcacagacctctcctggtggacctgaccgtcgaggagggacagcgcctgaaagttatctacggcagttctgctggttttcacgccgttgacgtggactcagggaattcctacgatatctacatccccgtgcacatccagtcacagattactccccacgcaatcatatttctgccaaacactgatggcatggagatgctgttgtgctatgaagacgaaggcgtttacgtgaatacgtatggaaggattatcaaggacgtagtgttacagtggggggaaatgccaacctccgttgcatatatttgtagcaatcagatcatgggttggggcgagaaggcgatcgagatccggtcagtagagactggccacctagatggggtgttcatgcataagagagcccagcgcctgaagtttctgtgcgaaaggaacgacaaggttttcttcgcttctgtacggagcggaggttcttctcaggtgtactttatgacactcaaccgaaactgcatcatgaattggtag

SEQ ID NO: 316835 - DNA, 879 bp, Artificial Sequence
  derived and/or modified sequence
atgttgctcgaccggagtgggcagggaaaagtctacggactgatcggtcggcgtagatttcagcagatggacgtgcttgaggggctcaacctactgatcaccatatctggaaagcgtaataagttgcgtgtgtactatttgagttggctacgcaataaaattctgcataatgatcctgaagtggaaaaaaagcagggctggactactgtgggcgatatggaaggctgcgggcactacagagtcgtaaagtacgaaagaatcaagtttttggtgattgcgctgaagtcatcagtggaagtatatgcttgggcgccaaagccctatcacaaattcatggcattcaagtcctttgccgatctgccccacaggcccttactggtggacctcacagtggaggaaggccagagactgaaagtgatctatgggagtagcgcagggtttcacgccgtcgacgttgacagcggaaactcttatgacatctatatcccagtgcatatccaaagtcaaatcacaccccacgctattattttcctgcctaatacagatggcatggaaatgctcctatgctatgaggatgagggtgtctatgtgaacacatatggacgtataatcaaggatgtcgtgctgcagtggggggagatgcccacgtccgtggcttacatttgttctaaccagattatgggctggggagagaaggccatcgagattcggtctgtggagactggacaccttgacggcgtgttcatgcacaaaagggcccagaggctaaaattcctgtgtgaacggaacgacaaggtcttctttgccagtgtgaggtctggtggctccagtcaagtgtattttatgacactgaacagaaactgtatcatgaattggtag

SEQ ID NO: 316836 - DNA, 879 bp, Artificial Sequence
  derived and/or modified sequence
atgctgctggacagaagcggccagggcaaggtgtacggcctgatcggcagaagaagattccagcagatggacgtgctggagggcctgaacctgctgatcaccatcagcggcaagagaaacaagctgagagtgtactacctgagctggctgagaaacaagatcctgcacaacgaccccgaggtggagaagaagcagggctggaccaccgtgggcgacatggagggctgcggccactacagagtggtgaagtacgagagaatcaagttcctggtgatcgccctgaagagcagcgtggaggtgtacgcctgggcccccaagccctaccacaagttcatggccttcaagagcttcgccgacctgccccacagacccctgctggtggacctgaccgtggaggagggccagagactgaaggtgatctacggcagcagcgccggcttccacgccgtggacgtggacagcggcaacagctacgacatctacatccccgtgcacatccagagccagatcaccccccacgccatcatcttcctgcccaacaccgacggcatggagatgctgctgtgctacgaggacgagggcgtgtacgtgaacacctacggcagaatcatcaaggacgtggtgctgcagtggggcgagatgcccaccagcgtggcctacatctgcagcaaccagatcatgggctggggcgagaaggccatcgagatcagaagcgtggagaccggccacctggacggcgtgttcatgcacaagagagcccagagactgaagttcctgtgcgagagaaacgacaaggtgttcttcgccagcgtgagaagcggcggcagcagccaggtgtacttcatgaccctgaacagaaactgcatcatgaactggtag

SEQ ID NO: 316837 - protein, 111 aa, Artificial Sequence
  derived and/or modified sequence
MGDPAPARSLDDIDLSALRALWFQFFYHSGSSLESPGMLNGPFQHRNSRIMTHRSAEKTLLGSLSLWRWSAMEPTDRCTRVGMSRRGSWLPSRSWMSRRTRRKRSNRRSTC

SEQ ID NO: 316838 - DNA, 336 bp, Artificial Sequence
  derived and/or modified sequence
atgggcgatccagctcctgcgcggagcttagacgacatcgacttgtcagccctccgcgcactttggttccagtttttttaccactcgggcagctcactcgaatcacctggcatgctaaacggaccctttcagcacaggaattctagaattatgacccataggagtgcagagaaaacgctcctcggcagcttatcgctgtggagatggtcggctatggaacccactgatcggtgcactagggtgggcatgtccaggcgcgggagttggctaccaagtcggtcgtggatgtctcgccggactaggagaaaaaggtccaacaggagatctacttgttag

SEQ ID NO: 316839 - DNA, 336 bp, Artificial Sequence
  derived and/or modified sequence
atgggagaccctgccccagcccggagcctggatgacatcgacctgagcgccctgcgggccctgtggttccagttcttctaccacagcggcagcagcctggagagccctggcatgctgaatggccccttccagcacaggaacagccgcatcatgacccacaggtctgctgagaagaccctgctgggcagcctgagcctgtggcgctggagcgccatggagcccacagaccgctgcaccagggtgggcatgagcagaagaggctcctggctgcccagccgctcctggatgagcaggaggaccaggaggaagaggagcaacagaagaagcacctgctag

SEQ ID NO: 316840 - DNA, 336 bp, Artificial Sequence
  derived and/or modified sequence
atgggggaccccgctccagcacgctccctggacgacatcgacctcagtgctttgcgagcactgtggttccagtttttttatcactctggttcttctctggaatcgcccggtatgctgaatggtcctttccagcatcggaatagtcggatcatgactcaccgctccgcggagaagaccctgctaggcagtctgtctttgtggcggtggagcgcaatggagccgacagaccggtgtacgagagtcgggatgagtcgaagaggcagttggctgccaagcagaagttggatgagcagacggacacgtagaaagcgtagtaaccggagatctacgtgctag

SEQ ID NO: 316841 - DNA, 336 bp, Artificial Sequence
  derived and/or modified sequence
atgggcgaccccgcccccgccagaagcctggacgacatcgacctgagcgccctgagagccctgtggttccagttcttctaccacagcggcagcagcctggagagccccggcatgctgaacggccccttccagcacagaaacagcagaatcatgacccacagaagcgccgagaagaccctgctgggcagcctgagcctgtggagatggagcgccatggagcccaccgacagatgcaccagagtgggcatgagcagaagaggcagctggctgcccagcagaagctggatgagcagaagaaccagaagaaagagaagcaacagaagaagcacctgctag

SEQ ID NO: 316842 - DNA, 1182 bp, Artificial Sequence
  derived and/or modified sequence
gttagccccgcgcagccgccggcgtcgccgccatggacctaggacccttgaacatctgtgaagaaatgactattctgcatggaggcttcttgctggccgagcagctgttccaccctaaggcactggcagaattaacaaagtctgactgggaacgtgttggacggcccatcgtggaggccttaagggagatctcctcggctgcagcacactcccagccctttgcctggaagaagaaagccctgatcatcatctgggccaaggttctgcagccgcaccccgtgaccccgtccgacacagagacacggtggcaggaagacctgttcttctcggtgggcaacatgatccccaccatcaaccacaccatcctcttcgagctgctcaaatccctggaagcttctggactctttatccagctcctgatggccctgcccaccaccatctgccatgcagaactagagcgctttctggaacatgtgaccgttgacacttctgccgaagacgtggccttcttcctggacgtctggtgggagaggacgacccccaggaggtgtctgcaaccgtgtatctggacaaactggccacggtgatctctgtgtggaactcggacacccagaatccctaccaccagcaggcgctggcagagaaggtgaaggaggcagaacgggatgtcagcctgacctcgctggccaaactccccagtgagaccattttcgtgggctgcgagttcctgcaccacctgctgcgggagtggggggaggagttgcaggccgtgctccgcagcagccaggggacaagttacgacagctaccggctgtgcgacagtctgacttccttcagccagaacgcgacgctctacctgaaccgcaccagcctgtccaaggaggacaggcaggtggtctctgagctggcggagtgtgtcagggacttcctgaggaaaacgagcacggtgctgaagaacagggccttggaggatatcacagcttccattgccatggccgtcatccagcagaagatggaccgccatatggaagtgtgctacatttttgcctctgagaagaagtgggccttctcggacgagtgggtagcctgcctggggagtaacagggccctcttccgacagccagacttggtgttgaggctgctggaaacagtgatagacgtcagcacagctgacagagccat

SEQ ID NO: 316843 - DNA, 1437 bp, Artificial Sequence
  derived and/or modified sequence
atgctggagttcgcccagaaatattttagagacccccagaggcgaccacaggacggattacggctaaagtccaaagaacctagggagagtaggactctggaggacatgctctgctttacaaaaacacccctgcaagagtctcttattgaactgtctgatagcagtcttagcaagatggcgaccgacatgttcctcgccgtcatgcgctttatgggcgacgctcctctgaagggacagtccgacctggatgtgctgtgcaacctcctgaaactgtgtggggaccacgaagtcatgagagatgaatgctattgccaggttgtaaagcaaataaccgacaataccagcagcaagcaggacagctgccaaagagggtggaggttgctctatatcgttacagcttatcactcttgtagtgaagtactgcacccccatctgaccagattcctgcaagatgtgagtcggaccccgggtcttccgtttcagggaattgccaaggcatgcgaacagaacctccagaagacacttaggttcggaggcagactggagttgccgtcctccattgagctccgggctatgctcgcaggtcggagcagcaagcgacagctctttctgctcccagggggcttggagaggcacttgaagataaaaacctgcacggtggcacttgatgtggttgaggagatttgcgcagaaatggccttaactcgccccgaagccttcaacgaatacgtgatcttcgttgtgacaaaccgtggtcaacacgtgtgcccattgtcccggcgcgcctacatccttgatgtggctagtgagatggaacaggtcgacggcgggtacatgctgtggtttcgaagagtgctgtgggaccaacccttgaaattcgagaacgagctgtacgtcaccatgcactataatcaggtccttcccgattatttgaagggactgtttagctccgtgccagcatcacggccttccgagcagcttctgcagcaggtgtccaaactggcatctctccaacacagagctaaggaccatttctacctccctagcgtgcgtgaggtgcaggagtacatccccgcccagctttatagaacaactgccgggtctacctggctaaatttagtaagccagcatcgtcagcagacacaggctctttcgccccatcaggcacgagcacagtttctgggactgttgagcgctctgccaatgtttggcagtagcttcttctttatccagtcttgctccaacattgctgtaccagccccgtgcatcctggcgataaaccataacggcttgaactttctcagtaccgaaacgcacgtcagcggactgtccctggctttgccgagccccccctccgtgccttggtcaccaacgccaagcaagcgacccagaccgcctgctgccgaggcccagtttcattgtttgccaccttcctag

SEQ ID NO: 316844 - DNA, 1437 bp, Artificial Sequence
  derived and/or modified sequence
atgctggagtttgcccagaagtacttccgggacccccagaggcggccccaggacggcctgcggctgaagagcaaggagccccgggagagcaggaccctggaggacatgctgtgcttcaccaagacccccctgcaggagagcctgattgagctgagtgacagcagcctgagcaagatggccacagacatgttcctggccgtgatgaggttcatgggagatgcccccctgaagggccagagcgacctggatgtgctgtgcaacctgctgaagctgtgtggggaccacgaggtgatgagagatgagtgctactgccaggtggtgaagcagatcacagacaacaccagcagcaagcaggacagctgccagaggggctggaggctgctgtacatcgtgacagcctaccacagctgcagcgaggtgctgcacccccacctgacccgcttcctgcaggatgtgtccaggaccccaggcctgcccttccagggcatcgccaaggcctgtgagcagaacctgcagaagaccctgcgctttggaggccgcctggagctgcccagcagcattgagctgcgggccatgctggccggccgcagcagcaagaggcagctgttcctgctgcccggcggcctggagcggcacctgaagatcaagacctgcaccgtggccctggatgtggtggaggagatctgtgccgagatggccctgaccaggcctgaggccttcaatgaatatgtgatctttgtggtgaccaacagaggccagcacgtgtgccccctgagccggcgggcctacatcctggatgtggccagcgagatggagcaggtggatggcggctacatgctgtggttcagaagagtgctgtgggaccagcccctgaagtttgaaaatgagctgtatgtgaccatgcactacaaccaggtgctgcctgactacctgaagggcctcttcagctctgtgcctgccagccggcccagcgagcagctgctgcagcaggtgtccaagctggccagcctgcagcaccgggccaaggaccacttctacctgcccagcgtgcgggaggtgcaggagtacatcccagcccagctgtaccgcaccacagctggcagcacctggctgaacctggtgtcccagcaccggcagcagacccaggccctgagcccccaccaggcccgggcccagttcctgggcctgctgagcgccctgcccatgtttggcagcagcttcttcttcatccagagctgcagcaacattgctgtgcctgccccctgcatcctggccatcaaccacaacggcctgaacttcctgagcacagagacccacgtgtctggcctgagcctggccctgcccagcccccccagcgtgccctggagccccacccccagcaagaggcccaggcctcctgctgctgaggcccagttccactgcctgccccccagctag

SEQ ID NO: 316845 - DNA, 1919 bp, Artificial Sequence
  derived and/or modified sequence
atatatatattaattaaataaaaaaacgaggtgccttctcctgactccctgatccccgcgctctccagctctgccctcgcgatcgctggagccccctgaggaactcacgcagcccgctgctgcccccgacttcctgcagctgccaacggagccaggccgcggccgagcagccgccgtggccgctgctgtggcctctgcagccgctgcacaggaggtgggccgcaggagagagggtcccccagtcagggcccgctctgctgaccatggggaggacgccctggcgctcccaccctacacaatgctcgagtttgcccagaagtatttccgagaccctcagaggagaccccaggatggcctcaggctgaaatccaaggagcctcgggagtccagaaccttggaggacatgctttgcttcaccaagactcccctccaggaatccctcatcgaactcagcgacagcagcctcagcaagatggccaccgacatgttcctagctgtaatgaggttcatgggggatgccccactgaagggccagagtgacctggacgtgctttgtaacctcctgaagctgtgcggggaccatgaggtcatgcgggatgaatgttactgccaagttgtgaagcagatcacagacaataccagctccaagcaggacagctgccagcgaggctggaggctgctgtatatcgtgaccgcctaccacagctgctctgaggtcctccacccacacctcactcgcttcctccaagacgtgagccggaccccaggcctgccctttcaggggatcgccaaggcctgcgagcagaacctgcagaaaaccttgcgcttcggaggtcgtctggagctccccagcagcatagagcttcgggccatgttggcaggccgcagttccaagaggcaactctttcttcttcctggaggccttgaacgccatctcaaaatcaaaacatgcactgtggccctggacgtggtggaagagatatgtgctgagatggctctgacacgccctgaggccttcaatgaatatgttatcttcgttgtcaccaaccgtggccagcatgtgtgcccactcagtcgccgtgcttacatcctggatgtggcctcagagatggagcaggtggacggcggctacatgctctggttccggcgtgtgctctgggatcagccactcaagttcgagaatgagctatatgtgaccatgcactacaaccaggtcctgcctgactacctgaagggactcttcagcagtgtgccggccagccggcccagcgagcagctgctgcagcaggtgtccaagctggcttcactgcagcatcgcgccaaggaccacttctacctgccgagcgtgcgggaagtccaggagtacatcccagcccagctctaccgtacaacggcaggctcgacctggctcaacctggtcagccagcaccggcagcagacacaggcgctcagcccccaccaggcccgtgcccagtttctgggcctcctcagcgccttacctatgttcggctcctccttcttcttcatccagagctgcagcaacattgctgtgccagccccttgcatccttgccatcaaccacaatggcctcaactttctcagcacagagactcatgtgagtggcctcagcctggcactgccatcgccaccctctgttccctggtccccaaccccctccaagaggccaagacctccagccgccgaagcccagttccactgcttaccaccttcatgatctcaggcaagtctcttccctcctctgagccttgctttcctcatctggaaaatgaggataagagttgagccccacccatagggctgttgtgaaggtgagatgaggtaaaacatactctatgcactcaaatagtacatctgtgtgcttaggctgccataataaaagaccacagactgagtaactt

SEQ ID NO: 316846 - DNA, 1345 bp, Artificial Sequence
  derived and/or modified sequence
atttagggggcggggccgggtgtgaagcaaggccagggggcagtcggacagtacccactgaagccccgcccctgcaggtgttttaccccaaggacagctacagccatcctgtgcagcttgacctcctgttccggcaggctggaggttcgggaccatccacgggcgcgtgggccgcttcccttcggagctggtgcagcccgctgctgcccccgacttcctgcagctgccaacggagccaggccgcggccgagcagccgccgtggccgctgctgtggcctctgcagccgctgcacaggaggtgggccgcaggagagagggacagctgccagcgaggctggaggctgctgtatatcgtgaccgcctaccacagctgctctgaggtcctccacccacacctcactcgcttcctccaagacgtgagccggaccccaggcctgccctttcaggggatcgccaaggcctgcgagcagaacctgcagaaaaccttgcgcttcggaggtcgtctggagctccccagcagcatagagcttcgggccatgttggcaggccgcagttccaagaggcaactctttcttcttcctggaggccttgaacgccatctcaaaatcaaaacatgcactgtggccctggacgtggtggaagagatatgtgctgagatggctctgacacgccctgaggccttcaatgaatatgttatcttcgttgtcaccaaccgtggtcctgcctgactacctgaagggactcttcagcagtgtgccggccagccggcccagcgagcagctgctgcagcaggtgtccaagctggcttcactgcagcatcgcgccaaggaccacttctacctgccgagcgtgcgggaagtccaggagtacatcccagcccagctctaccgtacaacggcaggctcgacctggctcaacctggtcagccagcaccggcagcagacacaggcgctcagcccccaccaggcccgtgcccagtttctgggcctcctcagcgccttacctatgttcggctcctccttcttcttcatccagagctgcagcaacattgctgtgccagccccttgcatccttgccatcaaccacaatggcctcaactttctcagcacagagactcatgtgagtggcctcagcctggcactgccatcgccaccctctgttccctggtccccaaccccctccaagaggccaagacctccagccgccgaagcccagttccactgcttaccaccttcatgatctcaggcaagtctcttccctcctctgagccttgctttcctcatctggaaaatgaggataagagttgagccccacccatagggctgttgtgaaggtgagatgaggt

SEQ ID NO: 316847 - DNA, 1437 bp, Artificial Sequence
  derived and/or modified sequence
atgctggagttcgcccagaagtacttccgggacccccagcggcggccccaggacggactccgtttgaaaagcaaagaaccaagagagtcgagaacgctggaagacatgttatgctttactaaaactcctctgcaagaatctctgatcgaactgtcagattcctctctgagcaagatggccacggacatgtttcttgccgtcatgaggtttatgggtgatgcacccctgaaaggccagtccgacttggacgtgctgtgtaatctcttaaagctgtgcggcgaccacgaggtgatgcgtgatgaatgttactgtcaggtagtcaagcagattacagacaacacaagttcgaaacaggacagctgccagcgaggctggaggctgctctacatcgttacggcttaccatagctgctcagaggtactgcacccacatctgacaaggtttttgcaggacgtgagccggaccccagggctcccattccaaggaatagccaaagcctgcgagcagaacctccagaagactctccgctttggaggccggctggaactgccgagttcaatagagctgcgcgccatgttggcaggccgcagctccaaaagacagcttttcctgctcccagggggcctggagcgacacctgaagataaagacctgcactgtcgctctcgatgttgtagaagagatctgcgctgagatggcattgactcgcccagaggccttcaacgagtacgtaatttttgtggtcacaaatcgggggcaacatgtgtgtcctttaagtaggcgcgcctatattttggatgtggctagcgagatggagcaggtagacggggggtacatgttgtggtttagacgagtcttgtgggaccagccccttaaattcgagaatgagctgtacgtgaccatgcactacaaccaggtcctccctgactacctcaaggggctcttcagctccgtgccagcatccagacccagtgagcagctgctgcaacaggtctccaagctggctagcttacagcacagagcaaaggatcatttttacctgccatctgtccgggaggtgcaggagtatatcccggcgcagctgtaccgcacaacagcaggatcaacttggctcaaccttgtgtcccaacatcgacaacagacgcaggctctgagtccgcaccaggctagggcgcagtttctgggactgctatcagcgctcccaatgttcgggtcctcctttttcttcatccagagctgcagtaacatcgctgtgccggccccctgtatattggcaatcaatcacaatgggctaaactttttgagcaccgaaacacacgtctctggattatctctggcactccctagccctccatcagtaccctggtcccccacccctagtaagcgtccacgcccccccgccgcggaggcccagttccactgcttaccaccctcctag

SEQ ID NO: 316848 - DNA, 1437 bp, Artificial Sequence
  derived and/or modified sequence
atgctggaatttgcccagaagtattttagagatccccaacgacgcccacaggacgggctgcgcctgaaatctaaggagcctcgagagtcaagaacactggaagatatgctttgtttcacaaagacacccctccaggagtccctgatcgaactgtcagacagcagcctgtccaaaatggccaccgatatgttcttggcagtgatgaggttcatgggtgacgcacctctcaaagggcagtctgacttggatgtgctctgcaatctcctgaagctctgcggagaccatgaagtaatgcgggacgagtgctactgtcaggtagtcaagcagataacagacaacacatcatccaaacaggatagctgccagagaggttggcggcttctatacatagtcactgcttaccactcgtgcagcgaagtgttgcatcctcatctaacacgtttcttgcaggacgtgagtaggacacccggtctgccttttcagggcatcgccaaagcctgtgaacagaatctacagaaaacactgaggttcggcggacgccttgagctgccctcatccatcgaactcagggccatgctggcaggaagaagttccaagcggcagctatttctgctaccgggtgggttggagagacacctgaagatcaaaacctgcacagtggccctggatgtggtggaggaaatctgtgctgaaatggctctgaccagaccagaggctttcaatgagtacgtcattttcgtcgtcacaaataggggacaacatgtgtgtcccctcagccgtcgcgcttacatcctcgacgtggcctctgaaatggagcaggtggacgggggttacatgctctggtttagaagggtgttgtgggaccaacccttgaagttcgagaacgagttgtatgtgaccatgcactacaatcaagtcttgcctgattatctgaaagggctattttccagtgttcctgcatcccgaccttccgagcagctcctccagcaagtgagcaagctcgcctccctgcagcatcgggctaaggaccacttctacctaccgagtgtacgggaagtccaggaatatatccctgcacaattgtatcgcaccactgccggttccacctggcttaatcttgttagtcagcatcggcagcaaactcaggccctcagtccgcaccaggcacgggcacaatttctcggactattgtcagccctgccaatgttcggcagttcttttttctttatacagtcgtgctcaaatattgcagtgccagcaccttgcatcctggccattaaccacaacgggcttaattttctgtccacggagacgcacgtgtcaggcctctctctggcccttccgtcccccccatccgtcccttggtctcctactccgtccaaaaggccccgaccaccagccgctgaagcacagtttcattgcctccccccttcttag

SEQ ID NO: 316849 - DNA, 1437 bp, Artificial Sequence
  derived and/or modified sequence
atgctggagttcgcccagaagtacttcagagacccccagagaagaccccaggacggcctgagactgaagagcaaggagcccagagagagcagaaccctggaggacatgctgtgcttcaccaagacccccctgcaggagagcctgatcgagctgagcgacagcagcctgagcaagatggccaccgacatgttcctggccgtgatgagattcatgggcgacgcccccctgaagggccagagcgacctggacgtgctgtgcaacctgctgaagctgtgcggcgaccacgaggtgatgagagacgagtgctactgccaggtggtgaagcagatcaccgacaacaccagcagcaagcaggacagctgccagagaggctggagactgctgtacatcgtgaccgcctaccacagctgcagcgaggtgctgcacccccacctgaccagattcctgcaggacgtgagcagaacccccggcctgcccttccagggcatcgccaaggcctgcgagcagaacctgcagaagaccctgagattcggcggcagactggagctgcccagcagcatcgagctgagagccatgctggccggcagaagcagcaagagacagctgttcctgctgcccggcggcctggagagacacctgaagatcaagacctgcaccgtggccctggacgtggtggaggagatctgcgccgagatggccctgaccagacccgaggccttcaacgagtacgtgatcttcgtggtgaccaacagaggccagcacgtgtgccccctgagcagaagagcctacatcctggacgtggccagcgagatggagcaggtggacggcggctacatgctgtggttcagaagagtgctgtgggaccagcccctgaagttcgagaacgagctgtacgtgaccatgcactacaaccaggtgctgcccgactacctgaagggcctgttcagcagcgtgcccgccagcagacccagcgagcagctgctgcagcaggtgagcaagctggccagcctgcagcacagagccaaggaccacttctacctgcccagcgtgagagaggtgcaggagtacatccccgcccagctgtacagaaccaccgccggcagcacctggctgaacctggtgagccagcacagacagcagacccaggccctgagcccccaccaggccagagcccagttcctgggcctgctgagcgccctgcccatgttcggcagcagcttcttcttcatccagagctgcagcaacatcgccgtgcccgccccctgcatcctggccatcaaccacaacggcctgaacttcctgagcaccgagacccacgtgagcggcctgagcctggccctgcccagcccccccagcgtgccctggagccccacccccagcaagagacccagaccccccgccgccgaggcccagttccactgcctgccccccagctag

SEQ ID NO: 316850 - DNA, 801 bp, Artificial Sequence
  derived and/or modified sequence
tgagacttcagcctgggcgtgcccagctggtggtgcctgatctgcttcaacatcggccccagcgtgggccccagccagcccgaccccaacagattcgacagagacagactgttcaacgccgtgagcagaggcgtgcccgaggacctggccggcctgcccgagtacctgagcaagaccagcaagtacctgaccgacagcgagtacaccgagggcagcaccggcaagacctgcctgatgaaggccgtgctgaacctgaaggacggcgtgaacgcctgcatcctgcccctgctgcagatcgacagagacagcggcaacccccagcccctggtgaacgcccagtgcaccgacgactactacagaggccacagcgccctgcacatcgccatcgagaagagaagcctgcagtgcgtgaagctgctggtggagaacggcgccaacgtgcacgccagagcctgcggcagattcttccagaagggccagggcacctgcttctacttcggcgagctgcccctgagcctggccgcctgcaccaagcagtgggacgtggtgagctacctgctggagaacccccaccagcccgccagcctgcaggccaccgacagccagggcaacaccgtgctgcacgccctggtgatgatcagcgacaacagcgccgagaacatcgccctggtgaccagcatgtacgacggcctgctgcaggccggcgccagactgtgccccaccgtgcagctggaggacatcagaaacctgcaggacctgacccccctgaagctggccgccaaggagggcaagatcgagtag

SEQ ID NO: 316851 - DNA, 801 bp, Artificial Sequence
  derived and/or modified sequence
taagatttttccctgggagttccatcctggtggtgcctcatctgtttcaatatcggaccgtccgtcggcccttcccagcctgaccctaatcgctttgaccgggaccgtctctttaacgcagtgtcccgaggtgttcctgaggatctggccggtcttccagaatacttgtctaagacctccaagtatctgacagactctgaatacacagagggctcaaccggaaagacatgtctgatgaaggccgtcctcaatctcaaagacggcgtcaacgcgtgtattctacctctgttacagatcgatagagatagcggcaatccacagcctcttgtcaatgcccaatgtactgatgattattacaggggacattccgccctccacatcgctatagaaaagcgcagcttgcaatgtgtcaaactactcgtggagaacggcgctaatgtgcacgctagggcttgcgggaggttcttccagaaaggccagggcacttgtttttattttggcgagctccctctcagcctagcagcatgtacaaaacagtgggatgtggtgtcttacctcttagaaaatccgcaccagcccgcgtccctgcaggccactgattcgcagggcaacaccgtccttcacgcgctcgtgatgatctccgacaactccgctgagaatatagctctcgtaacctcgatgtacgatgggctccttcaagcaggcgcgcgcctgtgcccgacggtgcagctggaagacattcgcaatctgcaggatctgacgcctctgaagctcgctgcaaaggagggcaaaatcgagtag

SEQ ID NO: 316852 - DNA, 801 bp, Artificial Sequence
  derived and/or modified sequence
tgagacttcagcctgggcgtgcccagctggtggtgcctgatctgcttcaacatcggccccagcgtgggccccagccagcctgaccccaacagatttgaccgggacaggctcttcaatgctgtgtcccggggcgtgcctgaggacctggccggcctgcctgagtacctgagcaagaccagcaagtacctgacagacagcgagtacacagagggcagcacaggcaagacctgcctgatgaaggctgtgctgaacctgaaggatggagtgaatgcctgcatcctgcccctgctgcagattgaccgggacagcggcaacccccagcccctggtgaatgcccagtgcacagatgactactaccggggccacagcgccctgcacatcgccatcgagaagaggagcctgcagtgtgtgaagctgctggtggagaatggagccaacgtgcacgcccgggcctgtggccgcttcttccagaagggccagggcacctgcttctactttggagagctgcccctgagcctggccgcctgcaccaagcagtgggatgtggtgtcctacctgctggagaacccccaccagcctgccagcctgcaggccacagacagccagggcaacacagtgctgcacgccctggtgatgatcagtgacaacagcgcagaaaatattgccctggtgacctccatgtatgatggcctgctgcaggccggggcccggctgtgccccaccgtgcagctggaggacatccggaacctgcaggacctgacccccctgaagctggccgccaaggagggcaagattgaatag

SEQ ID NO: 316853 - DNA, 801 bp, Artificial Sequence
  derived and/or modified sequence
tgagacttcagcctgggcgtgcccagctggtggtgcctgatctgcttcaatatcggtccctccgtaggcccatctcagcccgatccaaaccgttttgaccgggatcggctgtttaacgcagtgagtcgaggcgtgcctgaagatttggcgggtttgccagagtacctgtccaagacctccaagtacttaactgattcagagtacaccgaaggcagcacaggaaaaacttgcctgatgaaagcggtattgaacttgaaggacggcgtcaacgcttgcatccttccactgctgcagatcgatcgcgacagcggaaacccacagccattagtcaacgcccagtgcactgacgactattatcggggtcatagcgccctgcacattgctatcgagaagaggtcactccagtgtgtaaagttgctcgtggaaaacggcgctaacgttcacgcgagagcctgtggtaggtttttccagaaaggccagggcacttgtttttacttcggagagctgccactttccttggctgcttgcactaagcagtgggatgttgtttcgtacctgctcgaaaacccccatcagccagcttcacttcaggcaacagactcccagggcaacaccgttctccacgccttagtgatgatttcggacaattctgccgagaacattgctctagtaactagcatgtacgatggtctactccaagccggtgcgcgcctgtgccctaccgtccaactggaggatattcggaacctccaggatctcacgcctctgaaactggccgccaaggagggcaaaatcgaatag

SEQ ID NO: 316854 - DNA, 801 bp, Artificial Sequence
  derived and/or modified sequence
tgagattttagcctcggagtgccctcttggtggtgcctaatctgcttcaacattgggccttccgtcgggccatcgcagccagaccccaacagattcgaccgcgacaggctatttaacgccgtctccaggggggtccccgaagacttagctggattgcctgagtacctgtctaagacttccaaatatcttacggattctgaatatacggagggtagcacaggcaaaacctgtctgatgaaggcggttctgaatctgaaggacggggtcaacgcctgcatcttgccactgctgcagattgaccgcgattctggtaatccccagcccctggtcaatgcccagtgtaccgatgattattataggggtcactctgccctccacattgcaatagaaaagcgttccttgcagtgcgttaagttactggttgaaaacggcgcaaatgtccacgccagagcctgtggacgatttttccagaaagggcagggcacttgtttctatttcggcgagttgccactttcactcgccgcttgtacaaagcagtgggatgtggtcagttacctgctggaaaaccctcatcaacccgcatctctgcaggctacggacagccagggtaatactgtgttgcacgcgcttgtcatgatcagtgacaacagcgcagaaaatatcgcactcgtcaccagcatgtacgatggactcctgcaggcaggagcaagactctgccctaccgtgcagcttgaggatattagaaacttacaggatctgacaccgctcaagcttgccgcaaaagaggggaagattgagtag

SEQ ID NO: 316855 - DNA, 796 bp, Artificial Sequence
  derived and/or modified sequence
agatttctcattaggtgtgccttcttggtggtgtctgatatgtttcaacattgggcccagcgttgggcccagtcagccggatccaaaccgatttgaccgagatcggctcttcaatgcggtctcccggggtgtccccgaggatctggctggacttccagagtacctgagcaagaccagcaagtacctcaccgactcggaatacacagagggctccacaggtaagacgtgcctgatgaaggctgtgctgaaccttaaggacggagtcaatgcctgcattctgccactgctgcagatcgacagggactctggcaatcctcagcccctggtaaatgcccagtgcacagatgactattaccgaggccacagcgctctgcacatcgccattgagaagaggagtctgcagtgtgtgaagctcctggtggagaatggggccaatgtgcatgcccgggcctgcggccgcttcttccagaagggccaagggacttgcttttatttcggtgagctacccctctctttggccgcttgcaccaagcagtgggatgtggtaagctacctcctggagaacccacaccagcccgccagcctgcaggccactgactcccagggcaacacagtcctgcatgccctagtgatgatctcggacaactcagctgagaacattgcactggtgaccagcatgtatgatgggctcctccaagctggggcccgcctctgccctaccgtgcagcttgaggacatccgcaacctgcaggatctcacgcctctgaagctggccgccaaggagggcaagatcgag

SEQ ID NO: 316856 - protein, 1111 aa, Artificial Sequence
  derived and/or modified sequence
MSSCRRSWRRQRSAALSWLRRQTRRAAASPSSAVCWPSWQTSTSRSSTDANPEVTMTMLRWIYTDELEFREDDVFLTELMKLANRFQLQLLRERCEKGVMSLVNVRNCIRFYQTAEELNASTLMNYCAEIIASHWDDLRKEDFSSMSAQLLYKMIKSKTEYPLHKAIKVEREDVVFLYLIEMDSQLPGKLNEADHNGDLALDLALSRRLESIATTLVSHKADVDMVDKSGWSLLHKGIQRGDLFAATFLIKNGAFVNAATLGAQETPLHLVALYSSKKHSADVMSEMAQIAEALLQAGANPNMQDSKGRTPLHVSIMAGNEYVFSQLLQCKQLDLELKDHEGSTALWLAVQHITVSSDQSVNPFEDVPVVNGTSFDENSFAARLIQRGSHTDAPDTATGNCLLQRAAGAGNEAAALFLATNGAHVNHRNKWGETPLHTACRHGLANLTAELLQQGANPNLQTEEALPLPKEAASLTSLADSVHLQTPLHMAIAYNHPDVVSVILEQKANALHATNNLQIIPDFSLKDSRDQTVLGLALWTGMHTIAAQLLGSGAAINDTMSDGQTLLHMAIQRQDSKSALFLLEHQADINVSRTQDGETALQLAIRNQLPLVVDAICTRGADMSVPDEKGNPPLWLALANNLEDIASTLVRHGCDATCWGPGPGGCLQTLLHRAIDENNEPTACFLIRSGCDVNSPRQPGANGEGEEEARDGQTPLHLAASWGLEETVQCLLEFGANVNAQDAEGRTPIHVAISSQHGVIIQLLVSHPDIHLNVRDRQGLTPFACAMTFKNNKSAEAILKRESGAAEQVDNKGRNFLHVAVQNSDIESVLFLISVHANVNSRVQDASKLTPLHLAVQAGSEIIVRNLLLAGAKVNELTKHRQTALHLAAQQDLPTICSVLLENGVDFAAVDENGNNALHLAVMHGRLNNIRVLLTECTVDAEAFNLRGQSPLHILGQYGKENAAAIFDLFLECMPGYPLDKPDADGSTVLLLAYMKGNANLCRAIVRSGARLGVNNNQGVNIFNYQVATKQLLFRLLDMLSKEPPWCDGSYCYECTARFGVTTRKHHCRHCGRLLCHKCSTKEIPIIKFDLNKPVRVCNICFDVLTLGGVS

SEQ ID NO: 316857 - DNA, 3336 bp, Artificial Sequence
  derived and/or modified sequence
atgagcagctgcagaagaagctggagaagacagagaagcgccgccctgagctggctgagaagacagaccagaagagccgccgccagccccagcagcgccgtgtgctggcccagctggcagaccagcaccagcagaagcagcaccgacgccaaccccgaggtgaccatgaccatgctgagatggatctacaccgacgagctggagttcagagaggacgacgtgttcctgaccgagctgatgaagctggccaacagattccagctgcagctgctgagagagagatgcgagaagggcgtgatgagcctggtgaacgtgagaaactgcatcagattctaccagaccgccgaggagctgaacgccagcaccctgatgaactactgcgccgagatcatcgccagccactgggacgacctgagaaaggaggacttcagcagcatgagcgcccagctgctgtacaagatgatcaagagcaagaccgagtaccccctgcacaaggccatcaaggtggagagagaggacgtggtgttcctgtacctgatcgagatggacagccagctgcccggcaagctgaacgaggccgaccacaacggcgacctggccctggacctggccctgagcagaagactggagagcatcgccaccaccctggtgagccacaaggccgacgtggacatggtggacaagagcggctggagcctgctgcacaagggcatccagagaggcgacctgttcgccgccaccttcctgatcaagaacggcgccttcgtgaacgccgccaccctgggcgcccaggagacccccctgcacctggtggccctgtacagcagcaagaagcacagcgccgacgtgatgagcgagatggcccagatcgccgaggccctgctgcaggccggcgccaaccccaacatgcaggacagcaagggcagaacccccctgcacgtgagcatcatggccggcaacgagtacgtgttcagccagctgctgcagtgcaagcagctggacctggagctgaaggaccacgagggcagcaccgccctgtggctggccgtgcagcacatcaccgtgagcagcgaccagagcgtgaaccccttcgaggacgtgcccgtggtgaacggcaccagcttcgacgagaacagcttcgccgccagactgatccagagaggcagccacaccgacgcccccgacaccgccaccggcaactgcctgctgcagagagccgccggcgccggcaacgaggccgccgccctgttcctggccaccaacggcgcccacgtgaaccacagaaacaagtggggcgagacccccctgcacaccgcctgcagacacggcctggccaacctgaccgccgagctgctgcagcagggcgccaaccccaacctgcagaccgaggaggccctgcccctgcccaaggaggccgccagcctgaccagcctggccgacagcgtgcacctgcagacccccctgcacatggccatcgcctacaaccaccccgacgtggtgagcgtgatcctggagcagaaggccaacgccctgcacgccaccaacaacctgcagatcatccccgacttcagcctgaaggacagcagagaccagaccgtgctgggcctggccctgtggaccggcatgcacaccatcgccgcccagctgctgggcagcggcgccgccatcaacgacaccatgagcgacggccagaccctgctgcacatggccatccagagacaggacagcaagagcgccctgttcctgctggagcaccaggccgacatcaacgtgagcagaacccaggacggcgagaccgccctgcagctggccatcagaaaccagctgcccctggtggtggacgccatctgcaccagaggcgccgacatgagcgtgcccgacgagaagggcaacccccccctgtggctggccctggccaacaacctggaggacatcgccagcaccctggtgagacacggctgcgacgccacctgctggggccccggccccggcggctgcctgcagaccctgctgcacagagccatcgacgagaacaacgagcccaccgcctgcttcctgatcagaagcggctgcgacgtgaacagccccagacagcccggcgccaacggcgagggcgaggaggaggccagagacggccagacccccctgcacctggccgccagctggggcctggaggagaccgtgcagtgcctgctggagttcggcgccaacgtgaacgcccaggacgccgagggcagaacccccatccacgtggccatcagcagccagcacggcgtgatcatccagctgctggtgagccaccccgacatccacctgaacgtgagagacagacagggcctgacccccttcgcctgcgccatgaccttcaagaacaacaagagcgccgaggccatcctgaagagagagagcggcgccgccgagcaggtggacaacaagggcagaaacttcctgcacgtggccgtgcagaacagcgacatcgagagcgtgctgttcctgatcagcgtgcacgccaacgtgaacagcagagtgcaggacgccagcaagctgacccccctgcacctggccgtgcaggccggcagcgagatcatcgtgagaaacctgctgctggccggcgccaaggtgaacgagctgaccaagcacagacagaccgccctgcacctggccgcccagcaggacctgcccaccatctgcagcgtgctgctggagaacggcgtggacttcgccgccgtggacgagaacggcaacaacgccctgcacctggccgtgatgcacggcagactgaacaacatcagagtgctgctgaccgagtgcaccgtggacgccgaggccttcaacctgagaggccagagccccctgcacatcctgggccagtacggcaaggagaacgccgccgccatcttcgacctgttcctggagtgcatgcccggctaccccctggacaagcccgacgccgacggcagcaccgtgctgctgctggcctacatgaagggcaacgccaacctgtgcagagccatcgtgagaagcggcgccagactgggcgtgaacaacaaccagggcgtgaacatcttcaactaccaggtggccaccaagcagctgctgttcagactgctggacatgctgagcaaggagcccccctggtgcgacggcagctactgctacgagtgcaccgccagattcggcgtgaccaccagaaagcaccactgcagacactgcggcagactgctgtgccacaagtgcagcaccaaggagatccccatcatcaagttcgacctgaacaagcccgtgagagtgtgcaacatctgcttcgacgtgctgaccctgggcggcgtgagctag

SEQ ID NO: 316858 - DNA, 3336 bp, Artificial Sequence
  derived and/or modified sequence
atgagttcctgccgaaggagttggcgaagacagcgaagcgctgctctgagttggcttcgccgacagactagacgggcggcagcttcacccagcagcgctgtgtgttggccctcctggcagaccagtacctcgcggtcttctaccgatgcgaacccagaagttaccatgaccatgctgcggtggatctatacagacgagctagagttccgcgaagacgacgtattcttaaccgaacttatgaaacttgccaataggttccaactccaactgttgcgggaaaggtgcgagaagggcgtgatgagcttggtgaatgtgaggaattgcatccgcttctatcagacagcagaagaactgaacgcctcaacactgatgaactattgtgcagaaataatcgcctctcactgggacgatttgcgcaaagaagattttagcagcatgtccgctcaattactttacaagatgataaaatcaaagaccgaatatcctctgcacaaggctattaaagttgaacgggaggatgtggtgtttctgtacttgatcgaaatggacagccagttaccaggaaagttaaatgaagcagatcacaacggggaccttgcactggatttagctctgagcaggcgactggaatcaatcgctactactctcgtatctcataaagcagacgttgatatggtcgataagtctggttggagcctcctacacaaaggcatacagcgcggagacctctttgctgcaacgtttctgatcaagaatggcgcctttgttaacgctgccacattgggtgcacaggaaaccccactgcatctggtggccctgtattctagcaagaagcactcagcagacgtgatgtccgaaatggctcagatcgctgaggccttgctccaggccggcgctaaccctaatatgcaagacagcaaggggagaactcccctgcatgttagcataatggccggaaatgagtacgtgttctctcagctactgcagtgcaaacaactcgacctggaacttaaggaccacgaggggtctactgccctgtggctggcagtccagcacataaccgtcagcagcgaccaaagcgtcaaccccttcgaggacgtccccgtggtcaatggaactagttttgacgagaacagcttcgcagcacgtcttattcagaggggatctcataccgacgcgcccgacaccgctacaggaaactgtctactccagcgggcagccggcgctgggaacgaggcagcagcgttgttcctcgcaaccaacggcgcccatgttaatcaccggaacaagtggggggagacaccccttcatacggcgtgtagacatggactggccaatttgacagcggaactgttgcagcagggcgccaacccgaaccttcagaccgaggaagcgctcccactgccaaaagaagcggcatcccttacttcgctcgcagactccgttcacctgcagactcccctccatatggccattgcctataatcatcctgacgtggtgtctgtaatcctggagcagaaagctaacgctctgcacgccaccaacaatctccagattatccccgacttctctctcaaagatagtagagaccagacggtgctcggcctggcactgtggactggtatgcacaccatagcagcccagctcctagggagcggggcagccatcaacgacaccatgtccgatgggcagacacttttgcacatggcaatccagaggcaggactccaaatctgctctgtttctactcgagcaccaggccgacataaacgtgagccgcactcaggacggtgagaccgccttgcagctggccatacgtaatcagctccccctggtggtagacgctatctgcactcggggtgcggacatgagcgtccccgacgagaaaggtaatcctccgctgtggttggccttagctaacaacctcgaagacatcgccagcactttagtgcggcacggatgcgacgctacgtgctggggtccgggaccaggaggctgtttgcagacacttctgcaccgggctattgacgagaataatgagccaaccgcgtgtttcctcatcagaagcggttgcgacgtgaattcccctcgacagccgggcgctaatggagagggcgaagaagaggccagggatggccagacccccctgcatttggctgcaagctggggacttgaagagaccgtccagtgcctgcttgaattcggtgccaatgtgaacgcccaggatgcagaaggtcgtactcctatccatgtggccattagtagtcagcacggtgtcattatacaattgctggtttcacaccctgatatccacctaaacgtgcgggatcgtcagggcttgacgccttttgcctgcgctatgacattcaaaaataataaatcagcggaagctatcctgaaaagagagtcaggcgctgcagagcaggtggataacaaaggcagaaactttctgcatgtcgcagtgcagaattccgacatagagagcgtgctatttctgatctccgttcatgcgaacgtgaacagccgggttcaggacgcatcaaagctaacacccttgcacttggctgtacaggctggcagcgagataattgtgagaaacctgcttctcgccggcgcaaaagttaatgaactcactaagcaccggcaaactgccttgcatctggccgctcagcaagatctgcccacaatttgctcagtgttgctggagaacggcgtggacttcgcagccgttgatgagaatggtaacaatgcgctccatctggccgtgatgcacggacgtctgaacaatatcagggtgctcctaacagagtgcaccgtggacgctgaagcctttaacctcagaggccaaagccctctccatattctaggccagtatggaaaggagaacgcggcagcaattttcgacttgtttttagaatgtatgcctggttacccgctggacaaacccgacgccgacggctctactgttctgctcctggcgtacatgaaagggaacgcaaacctttgcagggccatcgttcgatccggagctaggctcggcgtcaacaacaatcagggcgtgaatatcttcaattaccaggtggcaactaagcagcttctcttccgtctgcttgatatgctatccaaggaacccccatggtgcgatggcagctactgctacgagtgtactgcccgcttcggagtgactactagaaagcatcactgccgccactgcgggaggttgctgtgccataaatgctccactaaggaaattcccataatcaagtttgatctcaacaaacccgtgcgagtgtgtaacatctgttttgatgttttaaccctcggcggggtgagctag

SEQ ID NO: 316859 - DNA, 3336 bp, Artificial Sequence
  derived and/or modified sequence
atgagcagctgcagaagatcctggaggcggcagaggtctgctgccctgtcctggctgcggcggcagacccggcgggctgctgccagccccagcagcgctgtgtgctggcccagctggcagaccagcaccagccgcagcagcacagatgccaaccctgaggtgaccatgaccatgctgcgctggatctacacagatgagctggagttcagagaagatgatgtgttcctgacagagctgatgaagctggccaaccgcttccagctgcagctgctgcgggagcgctgtgagaagggcgtgatgagcctggtgaatgtgaggaactgcatccgcttctaccagacagctgaggagctgaatgccagcaccctgatgaactactgtgccgagatcatcgccagccactgggatgacctgaggaaagaagacttcagctccatgtctgcccagctgctgtacaagatgatcaagagcaagacagagtaccccctgcacaaggccatcaaggtggagcgggaggatgtggtgttcctgtacctgattgagatggacagccagctgcccgggaagctgaatgaagctgaccacaacggggacctggccctggacctggccctgagccggcggctggagagcatcgccaccaccctggtgagccacaaggcagatgtggacatggtggacaagagcggctggagcctgctgcacaagggcatccagagaggagacctgtttgctgccaccttcctgatcaagaatggagcctttgtgaatgctgccaccctgggcgcccaggagacccccctgcacctggtggccctgtacagcagcaagaagcacagcgcagatgtgatgtctgagatggcccagattgctgaggccctgctgcaggccggggccaaccccaacatgcaggacagcaaaggaagaacacccctgcacgtgtccatcatggctggaaatgaatatgtgttcagccagctgctgcagtgcaagcagctggacctggagctgaaggaccacgagggcagcacagccctgtggctggccgtgcagcacatcaccgtgtccagtgaccagagcgtgaacccctttgaagatgtgcctgtggtgaatggcaccagctttgatgaaaattcctttgctgcccggctcatccagaggggcagccacacagatgccccagacacagccaccggcaactgcctgctgcagagagctgctggagctggaaatgaagctgctgccctcttcctggccaccaatggagcccacgtgaaccacaggaacaagtggggcgagacccccctgcacacagcctgccgccacggcctggccaacctgacagctgagctgctgcagcagggcgccaaccccaacctgcagacagaggaggccctgcccctgcccaaggaggccgccagcctgaccagcctggccgacagcgtgcacctgcagacccccctgcacatggccatcgcctacaaccacccagatgtggtgtctgtcatcctggagcagaaggccaatgccctgcacgccaccaacaacctgcagatcatcccagacttcagcctgaaggacagccgggaccagacagtgctgggcctggccctgtggacaggcatgcacaccatcgccgcccagctgctgggcagcggggccgccatcaatgacaccatgtctgatggccagaccctgctgcacatggccatccagaggcaggacagcaagagcgccctcttcctgctggagcaccaggccgacatcaacgtgtccaggacccaggatggagaaacagccctgcagctggccatccggaaccagctgcccctggtggtggatgccatctgcaccagaggagctgacatgtctgtgcctgatgagaagggcaacccccccctgtggctggccctggccaacaacctggaggacatcgccagcaccctggtgcgccacggctgtgatgccacctgctggggccctggccctgggggctgcctgcagaccctgctgcaccgggccattgatgaaaataatgagcccacagcctgcttcctgatccgcagcggctgtgatgtgaacagcccccggcagcccggggccaacggggagggggaggaggaggccagagatggccagacccccctgcacctggccgcctcctggggcctggaggagaccgtgcagtgcctgctggagtttggagccaacgtgaatgcccaggatgctgagggccgcacccccatccacgtggccatcagcagccagcacggcgtcatcatccagctgctggtgagccacccagacatccacctgaatgtgcgggaccggcagggcctgaccccatttgcctgtgccatgaccttcaagaacaacaagtctgctgaggccatcctgaagcgggagagcggggctgctgagcaggtggacaacaagggcaggaacttcctgcacgtggccgtgcagaacagcgacatcgagagcgtgctcttcctgatctctgtgcacgccaacgtgaacagccgggtgcaggatgccagcaagctgacccccctgcacctggccgtgcaggccggcagcgagatcatcgtgaggaacctgctgctggccggggccaaggtgaatgagctgaccaagcaccggcagacagccctgcacctggccgcccagcaggacctgcccaccatctgcagcgtgctgctggagaatggagtggactttgctgctgtggatgaaaatggaaataatgccctgcacctggccgtgatgcacggccgcctgaacaacatccgggtgctgctgacagagtgcaccgtggatgctgaggccttcaacctgcggggccagagccccctgcacatcctgggccagtatggcaaggaaaatgctgctgccatctttgacctcttcctggagtgcatgcctggctaccccctggacaagccagatgctgatggcagcacagtgctgctgctggcctacatgaagggaaatgccaacctgtgccgggccatcgtgcgcagcggggcccggctgggcgtgaacaacaaccagggcgtgaacatcttcaactaccaggtggccaccaagcagctgctcttccggctgctggacatgctgagcaaggagcccccctggtgtgatggcagctactgctatgagtgcacagccaggtttggagtgaccaccaggaagcaccactgccgccactgcggccgcctgctgtgccacaagtgcagcaccaaggagatccccatcatcaagtttgacctgaacaagcctgtgcgggtgtgcaacatctgctttgatgtgctgaccctgggcggcgtgtcctag

SEQ ID NO: 316860 - DNA, 3336 bp, Artificial Sequence
  derived and/or modified sequence
atgagcagctgccggcggagctggcggcggcagcggagcgccgccctcagttggctgcggcggcagactaggcgcgcagcagcctccccctctagcgccgtgtgttggccaagctggcagaccagcacgtcaaggtctagtaccgatgcaaacccagaagtaacaatgacaatgcttagatggatctacactgatgagttagagtttcgggaagatgacgtgttcctgaccgaacttatgaagctggcaaacaggttccagctccagctgttgcgggagagatgtgagaagggagtgatgtctctggtgaatgtacgcaactgcatcaggttctatcaaaccgccgaagagctcaacgcctctaccctcatgaactattgtgcagagattatcgcatcccattgggacgatctgagaaaagaagattttagctcaatgtctgcccaattgctctataagatgattaaatctaagaccgaatatcctctacataaggctataaaagtagagagggaagacgtcgtgtttttgtatctgattgaaatggattcacagctgcccggcaagttgaacgaggcggatcacaatggtgacctggctttagatctggcattatctagacgattagaaagtatcgcaaccacactcgtctcccacaaggcggatgttgatatggtggataagtctggctggtctttgctgcacaaaggaatccagagaggcgatctctttgccgctaccttcttgataaagaacggggctttcgtaaacgccgccactttgggtgcacaggagactcctctccatctggtggccctgtattcttccaagaaacacagcgcagatgtcatgagtgagatggctcagatcgcagaggctctcctgcaggccggcgccaaccccaacatgcaagacagcaagggccggacccctctccatgtgtccattatggccggaaatgagtatgtcttcagtcagctcctgcagtgcaagcagctggacctggagcttaaggatcatgaaggaagcaccgccctgtggctcgcagtgcagcacataacagttagcagcgatcagtctgtcaatccattcgaggatgtgcccgtggtgaatggtacgtcctttgacgaaaactcctttgcagcccgactcattcaacgagggagccataccgacgctcccgacactgctactgggaactgcttgctgcaacgcgctgctggggcaggaaacgaggccgccgccttattcctcgctacaaacggagcccatgtgaaccaccgcaacaagtggggagagaccccattacacactgcttgtcgacacggtctcgctaacctcaccgcggaactcctgcagcagggcgccaatcccaatctgcagaccgaggaggctctgcctctccccaaggaggccgcgtctttgacaagcctggcagatagcgttcatttgcagaccccacttcatatggcaattgcatacaaccacccggatgtggtgagtgtgatcctggaacagaaggcaaacgcactgcacgctacgaataacctacagatcatccctgatttctctctgaaggacagcagagaccaaacagtcctgggactagctctgtggactggcatgcacactatcgccgctcagttgctgggcagtggcgcagcgatcaacgacacaatgagcgacggccagactcttctgcacatggccatccagagacaggactctaagtctgccctgtttctgctggagcaccaggccgatatcaacgtgtctagaacccaggatggcgaaactgccttacagctggcaatcaggaaccagctgcccctggtggttgacgcgatctgcacccgaggcgctgacatgtcagtgcccgacgagaaagggaatccacctttgtggttagctttggctaataatctggaggacatcgctagcacgctggtcaggcacggttgcgacgcaacatgttgggggcccgggcccggaggttgcctgcaaaccctgctccacagagccatcgacgaaaataacgaaccaaccgcttgctttcttattcggtctggctgcgatgtgaattcaccacggcagccaggagccaacggcgagggggaggaggaggccagagacggtcaaacccctctccacttggcagccagttggggtctggaggaaacagtccagtgcttgttggagtttggggccaatgttaatgcacaggacgccgaggggaggacacctatccatgtggcaattagcagccagcatggcgttataatacagctcctagtgtcccatccagacattcacttaaatgtgagagacagacaggggctgaccccgttcgcttgcgccatgaccttcaaaaacaacaaaagcgccgaggctattctcaagagagagtctggcgccgcggaacaggttgataataagggtagaaacttcctccatgttgcggtgcagaatagcgacattgaatcagttctgtttctcatttcagtacacgcaaatgtgaattccagggtgcaggacgcgagcaaactgactcctcttcatctggcagtgcaagcaggatcagagatcatcgtcagaaacctgctgctggcaggagccaaggtgaatgagcttacgaaacatagacagaccgctctccatctcgccgcccagcaggatctgcctaccatttgctcggtactattggagaatggagtggattttgccgctgtggacgagaacggcaataatgccctccaccttgccgtaatgcacgggcggctcaacaatattagagtactattgactgaatgcacggtcgacgcggaggcctttaatcttcggggccagagcccattgcatatcctgggacagtacgggaaagagaatgctgccgccatcttcgacctgttcttagaatgcatgcccgggtatccacttgacaagcctgacgccgacgggtctaccgtcctgctgttggcatatatgaagggtaacgcgaacctgtgcagagccatcgtcagaagcggggcccgtctcggcgtgaacaataaccagggcgttaacatatttaattaccaggtggctacaaaacaactgctgtttcgtcttttagacatgctttcgaaagaacctccctggtgtgatggcagctactgctatgaatgtacagccaggttcggagttactactaggaaacatcactgtcggcactgcgggaggctcctgtgtcacaaatgctcgacaaaggaaatccccatcatcaagtttgatttgaacaaacctgtgcgtgtctgtaacatctgtttcgacgtgttgaccttaggcggggtgtcctag

SEQ ID NO: 316861 - DNA, 7840 bp, Artificial Sequence
  derived and/or modified sequence
gcacttctcgcgaggttgcaggcagtgccgggccagacatggcggaagaggaggtggccaagttggagaagcacttgatgcttctgcggcaggagtatgtcaagctgcagaagaagctggcggagacagagaagcgctgcgctctcttggctgcgcaggcaaacaaggagagcagcagcgagtccttcatcagccgtctgctggccatcgtggcagacctctacgagcaggagcagtacagatgctaatcctgaggtgacgatgacaatgcttcgctggatctatacagatgagctggagttcagagaggatgatgtgttcctgactgaactgatgaaactagcaaatcggtttcagctacagctcctcagggagagatgtgagaagggtgttatgtctctagtgaatgtcaggaactgtattcgcttctaccagacggcagaggagctgaatgccagcacactgatgaactactgtgcagaaattattgcaagtcattgggacgacctgaggaaggaggatttcagcagcatgagcgctcagttgttatacaaaatgatcaaatccaagacagagtacccgctacataaagccatcaaagtggagagagaagacgtggtcttcctgtatctgattgaaatggattcccagctccctgggaagctgaatgaagcggatcataacggagatctggcattagatctagccctctcacgacgactggagagtattgccaccacgctggttagtcacaaagctgatgtggacatggtggacaagagtggctggagcttgttacacaaaggaatccaaagaggagatctctttgctgccactttcctcattaagaatggggcctttgtcaacgctgctacactgggtgcccaggagacaccactgcaccttgtggccttgtacagttcaaagaaacactcagcagatgtgatgtctgagatggcgcagattgcagaggcccttctgcaggctggtgccaaccccaacatgcaggacagcaaggggaggactcctttacatgtgtccatcatggccgggaatgaatatgtgttcagtcagctgctgcagtgcaaacaactagatttagaactcaaagaccacgagggcagcacggctctgtggctggcagtgcagcatatcacagtgtcttctgaccagtctgtgaaccccttcgaagatgtccccgtggtaaatgggacttcatttgatgagaacagctttgcagccagactcatccagcgcggcagccacacagacgcacctgacacggcgacaggaaactgtttactacagcgggcagctggagcaggaaacgaggcagcagctcttttcctggcaaccaacggtgcccatgtcaaccacagaaacaagtggggagaaaccccgttgcacacagcgtgtcggcatggcctggccaacctcacggcagagctcctgcagcaaggcgccaacccaaacctgcagacggaggaagctctgcctctgccaaaggaggccgcatccctgaccagcttggcggacagcgtccatctgcagacgccactgcacatggcgatcgcctataaccatccggatgtggtgtctgtcatcctggagcagaaagccaatgctcttcatgccaccaacaacttgcagatcattccggacttcagcctcaaagattcccgagaccagactgtgctgggcctggcattatggactggcatgcacacgatcgcagcccagctgctgggctctggagccgccatcaatgacaccatgtcggatgggcagacgctactgcacatggccatacagcggcaggacagcaagagcgcactcttcctgctggagcaccaggcagatataaatgtcagcaggactcaggacggggagacagccctccagctggccatcagaaaccagcttccactcgtagttgatgccatatgcacccgaggagctgacatgtctgtgccagatgagaaggggaaccccccgctgtggcttgcattggcaaacaatctggaggacatcgcatccactctggtcagacatggctgtgatgccacatgctggggtccgggacctggtgggtgccttcagacgctcctgcacagagccattgatgaaaacaacgagcccaccgcctgctttcttattcgcagtggctgtgacgtgaacagtcccagacaaccaggcgccaatggagaaggagaggaagaggctagagatgggcagacccctttgcatttggcagcctcttgggggctggaagagacagtacagtgtcttctggagtttggtgccaacgtgaacgcacaggatgcagaaggaagaacccccatccacgtggccatcagcagccaacacggtgtcatcattcagctgttggtttctcaccccgatatccatttgaatgtacgagacagacaagggctgaccccgtttgcctgtgccatgactttcaagaacaacaagtcagccgaggccattctcaaacgagagtccggggctgctgagcaggtggataacaagggccggaatttccttcatgtggcagttcagaactctgatattgaaagtgtgctgttcctgatcagtgtccacgctaatgtgaattcaagagtccaggatgcctccaagttgacccccctgcacctcgctgtccaagcaggctcagaaattattgtccgcaatttgcttcttgcgggagccaaagtgaacgaattaaccaagcatcgccagactgccctccatcttgctgcccagcaggacctgcccaccatctgctcagtcctcctagagaatggcgtggactttgctgccgtggatgagaatggaaacaatgctcttcatcttgctgtcatgcacggccggctcaacaacatccgggttctcctgacagagtgcacagtggacgccgaagcctttaatctcagaggccagtcaccactgcacattttgggacaatatggcaaggagaatgcagcggccatctttgatctcttcctagaatgcatgccggggtatcctctggacaagccggatgcagacggcagcacggtgctgctcctggcatacatgaaagggaacgccaacttgtgccgcgccatcgtccggtcgggggctcgcctcggggtgaataacaaccagggagtcaacatcttcaactaccaggtcgccaccaagcagctcctgttccgactgctggatatgctgtccaaggagcctccgtggtgtgacggctcctactgctatgagtgcactgccaggttcggagtcaccactcgcaaacaccactgtcgtcactgcggacgtcttctttgccataaatgctcgaccaaggagattcctattataaagtttgatctgaacaagcctgtgcgggtttgcaacatttgttttgatgtactgactctgggtggggtttcttagtgagccccccggagggtccaggccacgtccttggtcacctccccagcagctgctctgctcaccagcctgaccccacccagagcaggagctggcgggtgtcttcctgcggcaatagactggaacgattaaggaccatggtgtgatagatcccatttcaaatgattccatatgattgtcagtgtgtgtgtcagactgtgatcgatttcactagatgtctcactcatcagaccaggccattgggcctaagtggtaaatgtgattaggaattagacctctccccattctgctagcaacatacagggacacttggaaaaccatttccccttccagtagcttggtgtccatcccagagcattcatgaagtcttcccgcctgggctgactgatgaggcagagcctctcagcgtaggaagctggctgcttaatgagctggctttactctagggtaagtggctgtggacttttctgcacagtgttttcataaagataataggatcctcttgccctgaagtctttttttctttttacgctaagctgtatttttagtgagctaccccttttaaaaaggtgaaatctttcttaacagggttcaaagatgagagctgaaaaatcgtggccttaacaactgaaagctttacagtgttcatgctactgaggtgtcaggagtgcagctgggccgcttgacacctcgtagcagccgtctcattctctcgtcttgctgcgtcctgtctgtggagtcctcagtcactctgctgttggagagtgctggaggaaatgcacttttactgtgctgcactttttatagagctgcattgtcggtgattccaatttaaaaatccatattcaaaaataccctcacacatccctgcatcagtgattctaatgatcagctttgactggacctcagctcacacgaatctccaaggaaaaactctacagagcatcttttagagcaagagattcatacaggccaagtgatgagagggggagtcaccaaggcttcagccccaagggcatctccagcctcaggccggcaggtcctatgtccttgacacaaatgcttcttgctgaaatcctccctagtgatgctgcgagtgctgttggtcccagttctgtgtagcttgccctgccccatgaagggccaccagccaagggccctggccacgtgtgcgccaccttactttggaagtctctggcttgtgtgctggatgaggctgccagaacttgttgggcgttcatcgctgttagtacatatattaaccgtgaggtgttaaacttttcttttgaaggtttggccagtttctaaaaaatgcacatttaaagagaagcatctaccacggctttaaaacaaaacaactctgagatgaacaatatgtgttatactcagagattaacaatctcaatcatacatactgattctttcagacatttaataaccactacatttttttgcattaatgaagtttgactatatgtgtaaagggactaaatatttttgcaacagcctgttctttgttcattcttttctggatagtgtgtcctctgtattgcggtagatttatacattctgttgcctaaatatgtgtgtaaaatgagctgataaactggagtactacttaaaaaaaagtctgtgatttataagatgtatatgctttctatgtgaatataagcttgtgcacaatgtttaaaagaaaaacaatgaattagaagagatcccccgtcccccagtctgacatatttcatacagaatgtttaaaagaaaaactctgctagtcttggcaaacatttggccatgtgaggcatgtggtcagtttccattttctattacctggaaagggccataaggaagcaggcagggcttaggtagcttggttacctaagttagaaagtaagagaatcatgattcggatatgaattgaagtggttggtacatggatacctgttctttaaaaggaatgtgggagatgagtcaagggtgaggccgattgttctgcccatgccctaccataccaatttcaataacaatcttgcctgtcattgcactcagaatcttaagatcatgtttcaaatatgttgattcaaacttgcttctaagcctgagtccagggatagcaatggtactgaccagctatggactgggagaacattgagtcctgttttccattggcttcagggcgcatccatgtggatataggaaaagcctctttccacagacttaggaagccccccgaccacgcggacgctcgctgggctgcactcagcaggctgcttgagtgggagctgactccaacatgccctgccctggctgggactaggcatgcttccagcccttcccgtgctctccctgctgtcaacacttgcgtacaaacctgcctagctgttgtaagttttcatcagtagcttaagtactagtagcaaaaacttaaattcattcagaaagttgccacttctgaatgagtagagcaggaaaagtaaactttactgaaacataatttgctgcaacagtcaacattgttatgctgaatgtgctctcaactgccctttgctcatcgccagatttattatccagtgtattcctaacagtcttttgttgtcgttgtttttaaaacaaaggtacggaccatgtgctatatataaatcgaatggcttaaactaatttgctatgatcctctaacaccgaaatttcccataaacttaagtgcctacacttaggacttttgaactttcagtcatctttttcgtggtgtctcactgaacgatgtgttagaacatgtgttccatttggagttttgggcctgtgcacggtcaaccccaattaccaatttagttgaggctggattcgattgctcagttcacctgccacgttctctccaaggagtggggtctacgtgacctttagtcctctacctcagagccccgagtcatttctgaccaccccgttctgtgtcctcactcttgtccctgaatgggtccctgtgtggatctcagtgtgtgtgtggtttctccactcctccccgctcatgtcccacacctgccatattgaaccgtttctgcactaatcttctccacgggcacggagtggagggaacgtcttgggaaaggggagagcttgacctccatctaggtttcttttatctggagaaaaagaacacttttgaactatgtaatgcttcaccctgaaaggcaagctaacgctaacttcccaggtgacagtagcaggaacaaggaagggtaatgtttccatgacagacacttgcttcccttgggacaagtcccagaagaactacctgaagcaccaaagctccccaccccagcctggtggcagaggaagcaggtggcaccaactcaccaaagggacttgggagccaccttctcactctgtggaagtactttagtgagagctgactggcaagataaaaaccctgaaattcccagaagttacagatgccttaaagactttctttggaagatcattgcctgtactattccttttttgtgtggcataaataatatattaacctgttacaactgacaacattggttttctgcagctagggagtcttgagtcgagactgctcgccttgatgacttgctcttttttggcagatgtgtggagttggctgttacgacatccctgtgtgatcccagaggaggggcagtagctgggcagaaactgcaggcacacatttgggtggatcacctggcttccagccccttcggggtggtgctcagtgtggggtgatggtatcatagaggaccacggcgcttatcagcattgtttctttggagtctgtgtaatggaatgtatttttcaaatactgatatttgcattttctgtaacaattccttataataaaatgaagtaaaattgtgcatttaaagtggaaactttaataagacatttgtagttacttctaatgcagaagtaccaataagcattaaaaacaaattttagaaaactcctgacgtgaataagtttcttgaccagctgccctccagaaagtttgaattccaacatttttcaggaacatgctgttgacagcagtaaaagtagctattttatgtatgtatttttaatttttaaaagtttcagtaggtttttggggttcaggtggtgtttggttacgtgaggttctttagcggtgatttccaggattttggggcacccatcacccaagcagtgtacactggacccttttatccctcaccccaaccctttcccctgagcccccaaagtccactgtatcattcttaatgcctttacgtcctcatggcttagctcccgaaaagtagttattttaaacatactagctgcctgaacttactgtgcccttggcccagatttcagctcatagcaccgagcgtgatcactgaggcagtctcagtcaccgtcacctgacccctctgaa

SEQ ID NO: 316862 - DNA, 3336 bp, Artificial Sequence
  derived and/or modified sequence
atgtctagctgtcggagaagttggagacgacagaggtcagcggctctatcttggctgaggcggcagacgaggcgggcagccgcttcaccatcttctgctgtttgctggcctagttggcagactagtaccagccggtccagcaccgacgcgaatcctgaggtaaccatgactatgcttcgttggatctacaccgacgagctggagttccgcgaggacgacgtatttctgactgagctgatgaagctggctaataggttccagctccagttgctccgcgagcgctgcgaaaagggcgtgatgagcctggtgaacgtgaggaattgtattaggttctaccagacagcagaagaactgaatgcctcaacgctgatgaactactgcgccgaaataattgcctcccattgggacgatctgagaaaggaggatttttccagcatgtctgcgcaattattgtacaaaatgatcaaaagcaaaacagagtacccactccacaaagctatcaaggttgaaagagaggacgtggtattcttatatctgatcgaaatggactcacaactgcccggaaaactgaatgaagcagatcacaatggtgacctggccctggatctggcactgagtagaagattggaaagcattgcaaccacacttgtttcccacaaagccgatgtggacatggtggataaaagcggctggagcttgctgcacaaaggaatccagaggggcgatctgttcgccgcaacattcttgattaagaacggcgcatttgtgaacgcagccaccctcggtgcacaggaaaccccgctgcacctggttgcgctctatagcagtaaaaagcactccgcagacgtgatgagcgagatggcccaaatagctgaggccctgctgcaggctggtgcgaaccctaatatgcaggatagcaagggtagaactcccctgcacgtctctattatggctggaaacgaatacgtgttttctcagctgctgcagtgtaaacagttagacctggagctgaaggatcatgagggctctactgccctgtggttggccgtgcagcacatcacagtgtcatccgatcagagcgtgaacccatttgaggacgttcctgtcgtgaatggcacctcctttgatgaaaatagcttcgccgctagactcattcagcgcggatcccacactgacgctccggacacagctacaggcaactgtcttcttcagcgtgcagcgggagctggaaatgaggctgccgcactctttctagctacaaacggcgctcacgtaaatcaccgcaacaagtggggagaaacgcctctgcacactgcatgcagacatgggctggccaaccttacggccgagctgttgcagcagggggctaaccccaaccttcagaccgaagaggctctgcctctgccaaaggaggcggctagtttgactagtctggccgatagcgtccatttgcaaacacctctgcatatggctatagcgtataatcaccccgatgtcgtgtcagtaattctggagcagaaggctaacgctttgcacgccacaaacaatctccagataattcccgacttctctctgaaggacagtcgtgaccagactgttttgggccttgccctctggacaggtatgcacaccatagccgctcaattgctggggtcaggagctgctataaatgataccatgtccgatggccagaccctgctgcacatggctatccagcgtcaagatagcaaaagcgctctgttcctcctagaacatcaagctgacattaatgtgagccgaacccaggacggagaaaccgctctgcagctggcaatcagaaaccaactgccgcttgttgtggacgctatctgcacccgtggggctgatatgagcgtgcccgacgagaagggcaacccacccttgtggttagccttggctaacaacctggaggacattgctagcacattggtgcgacatggctgtgatgccacatgctggggcccaggacctggtggttgccttcagaccctactccatcgggcaatcgatgagaataacgagcccaccgcttgtttcctcattcggagcggctgtgatgtgaattctcccaggcagcctggcgctaatggagaaggcgaggaggaggcgagagacgggcaaactccactgcacctggctgcatcctgggggctggaagagaccgtccagtgcctcctcgagttcggcgctaatgtcaacgcgcaggatgccgagggcagaactccaatccatgtcgccatttctagccagcatggggttatcatacagctactggtctcccatccggacattcatctgaatgtgagagatcgccagggactgacacctttcgcttgcgccatgacgttcaaaaacaataagagcgccgaggccattttgaaacgcgaaagtggggctgctgaacaggtggataacaagggacggaactttctccacgtcgctgtgcaaaactctgatatcgagtcagtgctgttcctgatcagtgtccatgccaatgttaatagccgagtccaagacgcatctaaactgacgcctctgcacctggccgttcaggcaggctcagaaatcatcgtccgaaatctcctgctggcaggggcaaaagtgaatgagcttacaaagcaccggcagaccgctctccacctggccgctcagcaagacctgcctacaatatgctccgtgctgctggagaacggagttgacttcgctgctgtagatgagaacggcaacaatgcactgcacctggccgtgatgcatggacggttgaataatatcagggtgctgttaactgagtgtacggtggatgccgaggcgtttaatcttagaggccagtccccgctgcacatcctagggcagtacgggaaagagaatgccgctgcgatcttcgacctgttcttggaatgtatgccaggataccccctcgacaagcccgatgcagatgggtctaccgtattactcttggcctatatgaaagggaacgctaacctatgtcgcgcaatcgtgaggtccggcgcaagactgggagtgaataacaatcaaggggtcaacattttcaattatcaggtggccacaaaacagctgctgtttagactcctggatatgttaagcaaggaacccccatggtgcgatggtagttattgctatgaatgtacagctcggtttggagtgacaactcggaaacatcattgtaggcactgcgggagattgctttgtcataaatgctcaaccaaggaaatccctataattaagttcgacctgaacaagcccgtcagggtgtgcaatatctgcttcgacgtgctgaccctgggtggcgtgtcctag

SEQ ID NO: 316863 - DNA, 1464 bp, Artificial Sequence
  derived and/or modified sequence
atggccgaggaggaggtggccaagctggagaagcacctgatgctgctgagacaggagtacgtgaagctgcagaagaagctggccgagaccgagaagagatgcgccctgctggccgcccaggccaacaaggagagcagcagcgagagcttcatcagcagactgctggccatcgtggccgacctgtacgagcaggagcagtacagcgacctgaagatcaaggtgggcgacagacacatcagcgcccacaagttcgtgctggccgccagaagcgacagctggagcctggccaacctgagcagcaccaaggagctggacctgagcgacgccaaccccgaggtgaccatgaccatgctgagatggatctacaccgacgagctggagttcagagaggacgacgtgttcctgaccgagctgatgaagctggccaacagattccagctgcagctgctgagagagagatgcgagaagggcgtgatgagcctggtgaacgtgagaaactgcatcagattctaccagaccgccgaggagctgaacgccagcaccctgatgaactactgcgccgagatcatcgccagccactgggacgacctgagaaaggaggacttcagcagcatgagcgcccagctgctgtacaagatgatcaagagcaagaccgagtaccccctgcacaaggccatcaaggtggagagagaggacgtggtgttcctgtacctgatcgagatggacagccagctgcccggcaagctgaacgaggccgaccacaacggcgacctggccctggacctggccctgagcagaagactggagagcatcgccaccaccctggtgagccacaaggccgacgtggacatggtggacaagagcggctggagcctgctgcacaagggcatccagagaggcgacctgttcgccgccaccttcctgatcaagaacggcgccttcgtgaacgccgccaccctgggcgcccaggagacccccctgcacctggtggccctgtacagcagcaagaagcacagcgccgacgtgatgagcgagatggcccagatcgccgaggccctgctgcaggccggcgccaaccccaacatgcaggacagcaagggcagaacccccctgcacgtgagcatcatggccggcaacgagtacgtgttcagccagctgctgcagtgcaagcagctggacctggagctgaaggaccacgagggcagcaccgccctgtggctggccgtgcagcacatcaccgtgagcagcgaccagagcgtgaaccccttcgaggacgtgcccgtggtgaacggcaccagcttcgacgagaacagcttcgccgccagactgatccagagaggcagccacaccgacgcccccgacaccgccaccggcaaggccagagccagcagaagaggcgacgccggcgtgtgcagaagacaggagatggcctgcaagtgcctgcaccccaagttcagaaactag

SEQ ID NO: 316864 - DNA, 1464 bp, Artificial Sequence
  derived and/or modified sequence
atggcagaggaggaagtggccaagctggaaaagcacctgatgctattgaggcaagagtacgtgaaactgcaaaaaaagctggctgagaccgagaagagatgtgcgttgttagcagctcaggctaataaggaatcctcgagcgagagcttcatcagtcgactactggcaatcgtcgctgacctctatgaacaagagcagtacagcgacctcaagatcaaggttggtgataggcacatttccgctcacaaattcgtgctggcagcgagatctgattcatggagcctcgccaacctgtcaagcactaaagaactggatctgtctgacgctaatcctgaagtgaccatgacaatgctgagatggatatatacagacgaactggagttccgggaggatgacgtgtttctgacagaactgatgaagttggctaacaggtttcaactgcagctgctgcgggaacgctgcgaaaagggggtaatgagcctggtcaacgttcgaaactgcatcagattctatcagactgcggaggagctaaacgcatccacactgatgaactactgtgcagaaataattgctagtcattgggatgacctcaggaaggaagacttctcctcgatgtccgcgcagttgttgtacaaaatgatcaaaagtaagacggagtaccccttacataaggctatcaaggtggaaagggaggacgtggtgttcctctatctcatcgagatggacagccagcttccaggcaagctgaatgaggccgaccacaacggggatttggccctggacctcgccctgtcgcggagactcgagtccattgccaccactctggtctctcataaagcagatgttgatatggttgacaaatccggctggtctctactacacaaagggatccaacggggagatctctttgcagcgacttttctgatcaagaacggtgcctttgtgaacgctgccacgctgggagcccaggagaccccccttcacctggtggctctctatagctctaaaaagcactccgccgatgtcatgtcagaaatggctcaaattgctgaagcgctattacaggccggggctaatcccaacatgcaggattccaagggacggacgcccttacatgtgagtatcatggccgggaatgagtacgtgttttctcagctcctccagtgtaaacaactggaccttgagctgaaggaccacgaagggagcaccgccttatggcttgccgtccagcatattacagtaagctccgaccagtctgtgaatccattcgaggatgtaccagtggtgaatggcacttcattcgatgagaacagttttgctgcgaggctgatccagcgaggaagccacaccgatgcccctgataccgcaaccggtaaagcgcgggccagtcgtcgcggggatgcaggcgtctgtaggcggcaggaaatggcatgtaagtgcctgcatcccaagttccggaactag

SEQ ID NO: 316865 - DNA, 1464 bp, Artificial Sequence
  derived and/or modified sequence
atggccgaggaggaggtggccaagctggagaagcacctgatgctgctgcggcaggagtatgtgaagctgcagaagaagctggccgagacagagaagagatgtgccctgctggccgcccaggccaacaaggagagcagcagcgagagcttcatcagccggctgctggccatcgtggccgacctgtatgagcaggagcagtacagcgacctgaagatcaaggtgggggacagacacatcagcgcccacaagtttgtgctggccgcccggagtgacagctggagcctggccaacctgagcagcaccaaggagctggacctgagtgatgccaaccctgaggtgaccatgaccatgctgcgctggatctacacagatgagctggagttccgggaggatgatgtgttcctgacagagctgatgaagctggccaaccgcttccagctgcagctgctgcgggagcgctgtgagaagggcgtgatgagcctggtgaatgtgaggaactgcatccgcttctaccagacagctgaggagctgaatgccagcaccctgatgaactactgtgccgagatcatcgccagccactgggatgacctgaggaaggaggacttcagctccatgtctgcccagctgctgtacaagatgatcaagagcaagacagagtaccccctgcacaaggccatcaaggtggagagagaagatgtggtgttcctgtacctgattgagatggacagccagctgcccgggaagctgaatgaggccgaccacaatggagacctggccctggacctggccctgagccggcggctggagagcatcgccaccaccctggtgagccacaaggcagatgtggacatggtggacaagagcggctggagcctgctgcacaagggcatccagagaggagacctgtttgctgccaccttcctgatcaagaatggagcctttgtgaatgctgccaccctgggcgcccaggagacccccctgcacctggtggccctgtacagcagcaagaagcacagcgcagatgtgatgtctgagatggcccagattgctgaggccctgctgcaggccggggccaaccccaacatgcaggacagcaagggccgcacccccctgcacgtgtccatcatggctggaaatgaatatgtgttcagccagctgctgcagtgcaagcagctggacctggagctgaaggaccacgagggcagcacagccctgtggctggccgtgcagcacatcaccgtgtccagtgaccagagcgtgaacccctttgaagatgtgcctgtggtgaatggcaccagctttgatgagaacagctttgctgcccggctcatccagaggggcagccacacagatgccccagacacagccaccgggaaggcccgggccagcagaagaggagatgctggggtgtgccggcggcaggagatggcctgcaagtgcctgcaccccaagttcaggaactag

SEQ ID NO: 316866 - DNA, 1464 bp, Artificial Sequence
  derived and/or modified sequence
atggccgaggaggaggtggccaagctggagaagcacctgatgctgcttcggcaggaatatgttaagctccagaaaaagcttgctgaaaccgaaaaacgctgtgcactactagccgcacaggctaataaggagtcctcttcagagagtttcatctccaggctgctggccatagtggccgacctatacgagcaggagcaatatagtgatctgaagattaaggtgggagaccggcacatctccgcccacaaatttgtattagccgccagaagcgactcatggtctctcgccaatctcagcagtactaaggagctggacctgagcgacgctaaccccgaggtgacgatgaccatgctgagatggatctatacagacgagttagaatttagggaggatgatgtgtttctgaccgagctcatgaaacttgccaatcggttccagctgcaattgctccgggaaaggtgcgaaaagggagttatgagcttggtaaatgtgcgtaactgcatccgattctatcagactgctgaagaattgaacgcgtcgaccctgatgaactattgtgccgaaatcatagcttcccactgggatgaccttagaaaagaggattttagttccatgtccgcccaactgctttataagatgatcaagtccaagactgagtaccccctgcataaagcaattaaggtcgagagggaggatgtggtgtttttgtacctgattgagatggactcccaactacctggcaaacttaacgaggccgaccacaatggcgacctcgccctagacttggccctgtccagacgcctggaatccatcgccaccacccttgtttctcacaaggctgatgtggacatggtggataagtctgggtggtctctcttgcacaagggaatccagcgcggcgatcttttcgctgccacattcctgatcaagaacggtgctttcgtaaatgcagccaccctgggtgcgcaagaaactcccttgcacctggtggcgttgtactcgtctaaaaagcactcggctgatgtgatgagcgagatggctcagatagccgaggccctcctccaggccggggcaaaccccaatatgcaggattctaaagggaggacacctctgcatgtctccattatggccggaaatgagtacgttttctcacagcttctgcaatgcaagcagctggacttggaactgaaggaccatgagggttctacagcattgtggctggctgttcagcacatcaccgtgtcaagcgatcagtctgtaaatccatttgaagacgttcccgtggttaacgggaccagtttcgatgaaaatagctttgccgcccgcttgattcaaaggggttcccacaccgacgcaccagacaccgccacgggtaaggcaagagcttctaggagaggggatgccggggtgtgtaggcgccaggagatggcctgcaagtgtttacaccctaaattcaggaattag

SEQ ID NO: 316867 - DNA, 1908 bp, Artificial Sequence
  derived and/or modified sequence
gcacttctcgcgaggttgcaggcagtgccgggccagacatggcggaagaggaggtggccaagttggagaagcacttgatgcttctgcggcaggagtatgtcaagctgcagaagaagctggcggagacagagaagcgctgcgctctcttggctgcgcaggcaaacaaggagagcagcagcgagtccttcatcagccgtctgctggccatcgtggcagacctctacgagcaggagcagtacagcgatctgaagataaaggttggggacaggcacatcagtgctcacaagtttgtcctggcagcccgcagtgacagctggagtctggctaacttgtcttccactaaagagttggacctgtcagatgctaatcctgaggtgacgatgacaatgcttcgctggatctatacagatgagctggagttcagagaggatgatgtgttcctgactgaactgatgaaactagcaaatcggtttcagctacagctcctcagggagagatgtgagaagggtgttatgtctctagtgaatgtcaggaactgtattcgcttctaccagacggcagaggagctgaatgccagcacactgatgaactactgtgcagaaattattgcaagtcattgggacgacctgaggaaggaggatttcagcagcatgagcgctcagttgttatacaaaatgatcaaatccaagacagagtacccgctacataaagccatcaaagtggagagagaagacgtggtcttcctgtatctgattgaaatggattcccagctccctgggaagctgaatgaagcggatcataacggagatctggcattagatctagccctctcacgacgactggagagtattgccaccacgctggttagtcacaaagctgatgtggacatggtggacaagagtggctggagcttgttacacaaaggaatccaaagaggagatctctttgctgccactttcctcattaagaatggggcctttgtcaacgctgctacactgggtgcccaggagacaccactgcaccttgtggccttgtacagttcaaagaaacactcagcagatgtgatgtctgagatggcgcagattgcagaggcccttctgcaggctggtgccaaccccaacatgcaggacagcaaggggaggactcctttacatgtgtccatcatggccgggaatgaatatgtgttcagtcagctgctgcagtgcaaacaactagatttagaactcaaagaccacgagggcagcacggctctgtggctggcagtgcagcatatcacagtgtcttctgaccagtctgtgaaccccttcgaagatgtccccgtggtaaatgggacttcatttgatgagaacagctttgcagccagactcatccagcgcggcagccacacagacgcacctgacacggcgacaggtaaagcacgtgcctcccgaaggggcgacgctggggtctgcaggcgccaggaaatggcatgtaaatgccttcaccccaaatttagaaactgaacggcatactatgaggataattattttgtacttaattttatatacagtaaaagcctgggttgtcatttttaaaaatcctgtgcttcaaacaattgagcagacatcaagtccctgaaactgaaacttccatttatttaatgcggcgactcgcagactctttggactcaagaattcctttgaccgtcttaaaaattgtaccccagagagcttttctttaggtgggttataacttcagtatttaccatattagactacactttgagaacactgttttaatgtatttccttgatctgactaaataaaataacagggatattttaaggagagggatttggtgtaattcagtattgagtactggcaatgcataaaacatgggtaggtgtcactcacacaggaagacttgacc

SEQ ID NO: 316868 - DNA, 1464 bp, Artificial Sequence
  derived and/or modified sequence
atggctgaagaagaagttgctaaacttgagaagcacctgatgctgctgcggcaagagtacgtgaaactgcagaagaagctggccgagaccgagaagcgctgcgccctcttggccgctcaggcgaacaaggagagctccagcgagtcgttcatctccaggctgctggcaatagttgcagatctgtacgagcaggagcagtatagcgatctcaagatcaaagttggagaccggcatattagtgctcacaaatttgtactggcagcccgttctgactcctggagtctcgcgaatctgtcatccaccaaggaactggacttgtccgacgcaaacccagaggtgacaatgactatgttgcgatggatctatacggatgagctcgaattccgagaagacgacgtgtttctgacggaattgatgaagctggccaacaggtttcagctgcaactgttaagggagcgatgtgagaagggtgtgatgtcattggtaaatgttcgcaactgcatccgtttttatcagacagccgaggaactcaatgcaagtacgcttatgaattattgcgccgagatcatcgcgtcccactgggacgatctgcggaaggaggacttcagtagcatgtcagctcagcttctatataagatgataaaatctaaaactgagtatcccttgcacaaagcaatcaaagtcgaaagagaagatgtcgttttcctgtacctgatcgagatggattctcagctaccaggcaagctaaacgaagctgatcataatggcgatttggctcttgacctggcactgtcacgtaggttggaatctatcgctactactttagtttctcacaaagcggacgtggacatggtggacaagtctggatggtccttactgcataaagggattcagaggggcgatctgttcgcagcaacttttcttattaagaacggtgccttcgtcaatgcagctacactcggagcacaggagaccccgctgcacctcgtcgcattgtattcgagcaagaaacactccgccgatgtgatgtcggagatggcacagattgccgaggccctgctgcaagccggtgcaaacccaaatatgcaggatagtaaaggtagaacccctctccacgtgagcattatggccggtaatgagtacgtcttttcccagctgctgcagtgcaagcaactcgatctggagctgaaagatcatgaagggagtacagctttatggctcgccgtgcagcacattacagtatcatcagaccagtccgtgaatcccttcgaagatgttccagtggtgaacggaaccagctttgacgaaaattctttcgccgctaggctcatccaacggggttctcataccgacgctcccgacacagctaccggtaaggccagagctagccggaggggcgatgccggagtgtgcagacgacaggagatggcatgcaagtgtctgcaccctaagttccggaactag

SEQ ID NO: 316869 - DNA, 432 bp, Artificial Sequence
  derived and/or modified sequence
atgcggctgcagaaaactcggtgcgggtcagccgcatcccctcctaacaaacagcagacagaattacccgctttttcagtgatgccgaggcccgctgggcagcatgtctggccatggcgtggagagcgcatgagactcccgggtgcggcttcctcactgttctccaattatttttccctgccttacgttatttatctgtctattagcgatcttaacgtggaatgccttattttttccgtgttcgactcccagcaggtccacaccagctatcagtccaatggcctccaccgaaatggcatgttccatgactgtctggaggtgtctaagcatccttttctcggcctgactctcacactgtggctctgcgacctttctagcagcggattctacatgtcaggtcacgagccgctgtggaacttatcacctctgtag

SEQ ID NO: 316870 - protein, 352 aa, Artificial Sequence
  derived and/or modified sequence
MSSRKLSGPKGRRLSIHVVTWNVASAAPPLDLSDLLQLNNRNLNLDIYVIGLQELNSGIISLLSDAAFNDSWSSFLMDVLSPLSFIKVSHVRMQGILLLVFAKYQHLPYIQILSTKSTPTGLFGYWLSIAKKHDPLLREFQEGRLLFPPTYKFDRNSNDYDTSEKKRKPAWTDRILWRLKRQPCAGPDTPIPPASHFSLSLRGYSSHMTYGISDHKPVSGTFDLELKPLVSAPLIVLMPEDLWTVENDMMVSYSSTSDFPSSPWDWIGLYKVGLRDVNDYVSYAWVGDSKVSCSDNLNQVYIDISNIPTTEDEFLLCYYSNSLRSVVGISRPFQIPPGSLREDPLGEAQPQI

SEQ ID NO: 316871 - DNA, 1059 bp, Artificial Sequence
  derived and/or modified sequence
atgagcagcagaaagctgagcggccccaagggcagaagactgagcatccacgtggtgacctggaacgtggccagcgccgccccccccctggacctgagcgacctgctgcagctgaacaacagaaacctgaacctggacatctacgtgatcggcctgcaggagctgaacagcggcatcatcagcctgctgagcgacgccgccttcaacgacagctggagcagcttcctgatggacgtgctgagccccctgagcttcatcaaggtgagccacgtgagaatgcagggcatcctgctgctggtgttcgccaagtaccagcacctgccctacatccagatcctgagcaccaagagcacccccaccggcctgttcggctactggctgagcatcgccaagaagcacgaccccctgctgagagagttccaggagggcagactgctgttcccccccacctacaagttcgacagaaacagcaacgactacgacaccagcgagaagaagagaaagcccgcctggaccgacagaatcctgtggagactgaagagacagccctgcgccggccccgacacccccatcccccccgccagccacttcagcctgagcctgagaggctacagcagccacatgacctacggcatcagcgaccacaagcccgtgagcggcaccttcgacctggagctgaagcccctggtgagcgcccccctgatcgtgctgatgcccgaggacctgtggaccgtggagaacgacatgatggtgagctacagcagcaccagcgacttccccagcagcccctgggactggatcggcctgtacaaggtgggcctgagagacgtgaacgactacgtgagctacgcctgggtgggcgacagcaaggtgagctgcagcgacaacctgaaccaggtgtacatcgacatcagcaacatccccaccaccgaggacgagttcctgctgtgctactacagcaacagcctgagaagcgtggtgggcatcagcagacccttccagatcccccccggcagcctgagagaggaccccctgggcgaggcccagccccagatctag

SEQ ID NO: 316872 - DNA, 1059 bp, Artificial Sequence
  derived and/or modified sequence
atgagctcacgtaaactcagcggccctaagggaagacggctctccatccacgtggtcacatggaatgtagcttctgctgctccacccctagatctgtctgatctcctgcagctgaacaatcgaaatctgaatcttgacatttacgttatcggcctccaagaactcaatagcggaatcatctctcttctaagcgatgctgcatttaacgacagctggtcaagcttcctgatggacgtgctgtccccactttctttcatcaaggtgtcccatgtacggatgcagggaatcttattgctggtatttgcgaagtatcagcatctaccctacatacagatcttgagcaccaaatcaacgcccacaggactcttcgggtattggttgagcatagccaagaaacatgacccactgcttagagaatttcaggagggccgcctactgttccccccaacctacaaatttgacagaaattccaatgattacgataccagcgagaaaaagcgcaagcccgcatggaccgaccgtattctttggcgcctgaagagacaaccatgtgcagggcccgacactcccatcccacctgcctctcatttctccctgtcgttgaggggctattcttcacacatgacatacgggattagtgaccacaagcccgtgagcggtacctttgatctggaattaaaaccgctcgtgagcgctcctttaatagtgttaatgccagaagacctttggactgttgagaacgacatgatggtgtcttactcgtccacgtccgacttcccttcctctccttgggattggatcggtctgtacaaggtagggctaagggatgtcaacgactatgtgagctacgcctgggtgggcgattctaaagtgagttgctcggacaacctcaatcaggtctacatcgatatcagtaatatcccgacaaccgaggacgagttcttgctgtgctattatagtaatagtttgaggtcagttgtgggaatctctcggccatttcagataccccccggatccctgagggaggatcctcttggagaagctcaaccacagatctag

SEQ ID NO: 316873 - DNA, 1059 bp, Artificial Sequence
  derived and/or modified sequence
atgagcagcaggaagctgagcggccccaagggccggcggctgagcatccacgtggtgacctggaatgtggccagcgctgccccacccctggacctgagtgacctgctgcagctgaacaacagaaacctgaacctggacatctacgtgattggcctgcaggagctgaacagcggcatcatcagcctgctgagtgatgctgccttcaatgacagctggagcagcttcctgatggatgtgctgagccccctgtccttcatcaaggtgagccacgtgaggatgcagggcatcctgctgctggtgtttgccaagtaccagcacctgccctacatccagatcctgagcaccaagagcacccccaccggcctgtttggctactggctgagcatcgccaagaagcatgaccccctgctgcgggagttccaggagggccgcctgctcttcccccccacctacaagtttgacaggaacagcaatgactatgacaccagcgagaagaagaggaagccagcctggacagaccgcatcctgtggaggctgaagaggcagccctgtgccggccctgacacccccatccccccagccagccacttcagcctgagcctgcggggctacagcagccacatgacctacggcatcagtgaccacaagcctgtgtctggcacctttgacctggagctgaagcccctggtgtctgcccccctgattgtgctgatgcctgaggacctgtggacagtggagaatgacatgatggtgtcctacagcagcaccagtgacttccccagcagcccctgggactggattggcctgtacaaggtgggcctgagagatgtgaatgactatgtgtcctatgcctgggtgggggacagcaaggtgtcctgcagcgacaacctgaaccaggtgtacatcgacatcagcaacatccccaccacagaagatgagttcctgctgtgctactacagcaacagcctgcggtctgtggtgggcatcagccggcccttccagatccccccaggcagcctgcgggaggaccccctgggggaggcccagccccagatctag

SEQ ID NO: 316874 - DNA, 1059 bp, Artificial Sequence
  derived and/or modified sequence
atgagcagccggaagctgagcggccccaagggccggcggctgagcatccacgttgtgacatggaacgtggcatcagctgcccctcccctcgacctcagcgacctactgcagctgaataatagaaacttgaatctcgatatctacgtaatcggtctgcaggagctgaattctggcataatcagtctgctttcggacgccgccttcaacgacagttggagctccttcctgatggacgtgctttcacctctatccttcatcaaggtctcacacgtgcggatgcagggcattctgctacttgtatttgccaaataccagcacctcccctacattcagatattgtcaacaaagagcacccccacaggcctgtttggctactggctctcaatcgcgaaaaaacatgatccactactgcgggaatttcaggaggggcggctcctgtttccccctacttataagtttgataggaattccaatgattacgacacatctgaaaagaaacgcaaacctgcatggactgatcggatcctatggagactgaaaaggcagccatgcgcaggtcccgatacacctataccccctgcttcccacttctccctaagccttagaggatattccagccatatgacttacgggataagcgaccataagcccgtgtctggtaccttcgacttagagctgaagcctctggtaagcgctcccctgatcgtcctgatgcctgaggacttgtggactgtggagaatgacatgatggtcagctactccagcacctcagactttccttcgtccccatgggactggatcggtttgtacaaagtcgggctccgcgatgtgaatgactatgtgagctatgcatgggtcggagactccaaggtgtcttgtagtgataaccttaaccaggtctacattgacatatcaaatatccctacaaccgaagacgagttcttgttgtgctactactcaaactccctaaggtcagtcgtgggaatttcccggccattccaaatcccgcctggatccctgagggaagaccctctgggggaagctcagccgcagatctag

SEQ ID NO: 316875 - DNA, 1059 bp, Artificial Sequence
  derived and/or modified sequence
atgtcctctagaaagcttagcgggcctaagggtcggcgtctctcaatccatgttgtgacttggaacgtggcctctgccgcaccccctctagacttgtccgacctgctgcaactgaacaatcgtaatctgaacctcgatatatatgtgattggtcttcaggaactgaatagtggaatcatcagcctcctttctgatgccgcttttaatgacagttggtcatcatttctgatggacgtcctttcaccactgtctttcattaaggtctcccacgtgcgtatgcagggtattctgctgctggtgtttgctaagtatcagcaccttccctacattcagatcctctctactaagtctacgccaactggcttgtttgggtactggcttagtattgccaagaagcacgatccactgttgagggaatttcaggagggcaggcttcttttcccaccaacatacaagttcgaccgtaatagcaatgactacgatactagcgagaagaagcgaaagcccgcatggaccgaccgcatcctttggagactcaaacggcagccctgcgccggacctgacactcccatccctcccgcaagccacttttctctgtccctaaggggctatagttcgcacatgacatacggcatcagtgaccataaacccgtgtccggcactttcgacctggaactcaagccgttggtctcagcaccactcatagtactgatgcccgaggacctttggacagtggaaaacgacatgatggtatcatatagcagcaccagtgattttccctcgagcccctgggactggattggcctgtacaaagtcggtttgcgggacgttaatgactatgtcagctacgcatgggttggggactctaaggtgagctgctcagacaacctcaaccaggtttacatagatatatccaacattcctacaacggaggatgaatttctgctctgttactattcaaatagtttaaggtccgtcgtgggcatcagtaggcccttccagatcccccctggtagtctgcgcgaggatcccctgggtgaagctcaaccccagatttag

SEQ ID NO: 316876 - DNA, 1371 bp, Artificial Sequence
  derived and/or modified sequence
aaaaacagtccgcgacagctaggcgcgtgagaccggccgcccgcagggctgctctggccgggacccgctggccgggagacgcgaacctgccggaccaccgcgcggggacgacggcggccatgagctcgcggaagctgagcgggccgaaaggcaggaggctcagcatacacgtcgtgacttggaacgtggcttcggcagcgccccctctagatctcagtgacctgcttcagctgaacaaccggaacctcaatcttgacatatatgttattggtttgcaggaattgaactctgggatcataagcctcctttccgatgctgcctttaatgactcgtggagcagtttcctcatggatgtgctttcccctctgagcttcatcaaggtctcccatgtccgtatgcaggggatcctcttactggtctttgccaagtatcagcatttgccctatatccagattctgtctactaaatccacccccactggcctgtttgggtactggctcagcattgccaagaaacatgacccgctgctccgggagttccaggagggccgcctactcttcccgcccacctacaagtttgataggaactccaacgactatgacaccagtgagaaaaaacgcaagcctgcatggaccgatcgcatcctgtggaggctgaagcggcagccctgtgctggccccgacactcccataccgccggcgtcacacttctccttgtctctgaggggctacagcagccacatgacgtacggcatcagcgaccacaagcctgtctccggcacgttcgacttggagctgaagccattggtgtctgctccgctgatcgtcctgatgcccgaggacctgtggaccgtggaaaatgacatgatggtcagctactcttcaacctcggacttccccagcagcccgtgggactggattggactgtacaaggtggggctgcgggacgttaatgactacgtgtcctatgcctgggtcggggacagcaaggtctcctgcagcgacaacctgaaccaggtttacatcgacatcagcaatatccctaccactgaagatgagtttctcctctgttactacagcaacagtctgcgttctgtggtggggataagcagacccttccagatcccgcctggctccttgagggaggacccactgggtgaagcacagccacagatctgagccaggatgggagtgaatcccaggcggaggccagagctggcagccagctctgcctttccactgccgggagtgctgggggcccagcctggccccctgaagagacagccaagtgtcgtccacatactcctcccagagtgagctctaaccaggctcatttgctctctccactactcatctctggaattagccgctt

SEQ ID NO: 316877 - DNA, 594 bp, Artificial Sequence
  derived and/or modified sequence
atgctggccccggaaggggctcttaatattcacgagaaggcctggaatgcatacccttactgcagaaccgtgcttcccaacgaatatatgaaagaagattttttgattaagatagaaacatggcacaagccagatctgggaacccaggagaacgtgcacaagttggagcccgaagcctggaaacatgtggaagcggtttacatcgacatagctgaccgaagtcaggtgttaagcaaggattataaagctgaagaggatccagccaaatttaagtctatcaagaccggtagggggcctctcgggccgaattggaaacaggaactggtgaaccagaaggactgcccctatatgtgtgcatataagcttgtgactgtcaagtttaagtggtggggcctccagaacaaagtcgagaattttattcacaaacaagagcggcggctgtttactaatttccataggcaactcttttgctggctcgacaagtgggtcgatctgacgatggatgacattcggaggatggaagaggagactaagcggcagctggatgagatgcgccaaaaggatcccgtgaaaggaatgacagcagacgattag

SEQ ID NO: 316878 - DNA, 594 bp, Artificial Sequence
  derived and/or modified sequence
atgctggcccctgagggcgccctgaacatccacgagaaggcctggaatgcctacccctactgcaggacagtgctgcccaatgagtacatgaaggaggacttcctgatcaagattgagacctggcacaagccagacctgggcacccaggagaatgtgcacaagctggagcctgaggcctggaagcacgtggaggccgtgtacatcgacattgctgacaggagccaggtgctgagcaaggactacaaggccgaggaggaccctgccaagttcaagagcatcaagacaggccggggccccctgggccccaactggaagcaggagctggtgaaccagaaggactgcccctacatgtgtgcctacaagctggtgacagtgaagttcaagtggtggggcctgcagaacaaggtggagaacttcatccacaagcaggagaggaggctcttcaccaacttccaccggcagctgttctgctggctggacaagtgggtggacctgaccatggatgacatccggaggatggaggaggagaccaagaggcagctggatgagatgaggcagaaggaccctgtgaagggcatgacagcagatgactag

SEQ ID NO: 316879 - DNA, 594 bp, Artificial Sequence
  derived and/or modified sequence
atgctggcccccgagggcgccctgaacatccacgagaaggcctggaatgcatatccctactgccgtactgtgttgcctaatgaatatatgaaagaggatttcctcatcaagattgagacctggcataagcctgatcttggcacacaggaaaatgtacacaaactggaaccggaagcctggaagcacgtggaagccgtatatatcgacatcgccgatcgatcccaggttctgtctaaggactataaggcagaagaggaccctgcaaaatttaaatcaataaagaccgggaggggtccgctgggccctaattggaaacaggaactggtgaaccagaaagactgtccctacatgtgcgcctacaaactcgtaaccgtaaagttcaaatggtgggggctgcagaataaggtcgagaactttatccacaaacaggagcgaaggttgtttactaattttcatcggcaactgttttgctggctcgacaagtgggtggacctgaccatggatgatattagacggatggaagaggagaccaagcgacagctggacgagatgaggcagaaagatcctgtcaaggggatgactgcagacgattag

SEQ ID NO: 316880 - DNA, 594 bp, Artificial Sequence
  derived and/or modified sequence
atgctcgcccctgaaggtgcacttaacatccacgagaaggcctggaatgcatacccctattgccgaactgtgctccccaacgagtatatgaaagaggacttcctgattaagatcgagacttggcacaaacccgacttggggactcaggagaacgtgcacaagttagagcctgaggcctggaagcacgtggaagcggtgtacatcgacatcgccgacaggtcacaagtcctcagtaaggattacaaggcagaagaggaccctgcgaaattcaaatctataaagaccgggagaggcccactgggcccaaactggaaacaagagctcgtgaaccagaaagattgtccctatatgtgtgcctataaacttgttaccgtcaaattcaagtggtggggcctccagaataaagtggaaaattttatccacaagcaggagaggcggctgttcacaaatttccatagacagctcttctgctggctcgataaatgggtcgacctaaccatggacgatattcgcagaatggaggaggagacaaaaaggcaactggatgagatgcggcagaaggacccagtcaaaggaatgaccgcggacgactag

SEQ ID NO: 316881 - DNA, 594 bp, Artificial Sequence
  derived and/or modified sequence
atgctggcccccgagggcgccctgaacatccacgagaaggcctggaacgcctacccctactgcagaaccgtgctgcccaacgagtacatgaaggaggacttcctgatcaagatcgagacctggcacaagcccgacctgggcacccaggagaacgtgcacaagctggagcccgaggcctggaagcacgtggaggccgtgtacatcgacatcgccgacagaagccaggtgctgagcaaggactacaaggccgaggaggaccccgccaagttcaagagcatcaagaccggcagaggccccctgggccccaactggaagcaggagctggtgaaccagaaggactgcccctacatgtgcgcctacaagctggtgaccgtgaagttcaagtggtggggcctgcagaacaaggtggagaacttcatccacaagcaggagagaagactgttcaccaacttccacagacagctgttctgctggctggacaagtgggtggacctgaccatggacgacatcagaagaatggaggaggagaccaagagacagctggacgagatgagacagaaggaccccgtgaagggcatgaccgccgacgactag

SEQ ID NO: 316882 - protein, 118 aa, Artificial Sequence
  derived and/or modified sequence
MLLLLLSIIVLHVAVLVLLFVSTIVSQWIVGNGHATDLWQNCSTSSSGNVHHCFSSSPNEWLQSVQATMILSIIFSILSLFLFFCQLFTLTKGGRFYITGIFQILAESNSSQMCGYRD

SEQ ID NO: 316883 - DNA, 357 bp, Artificial Sequence
  derived and/or modified sequence
atgctgctgctcctgctctctattatcgtgctgcatgtcgctgtgcttgtgctcctcttcgtctctacaatcgtctcacagtggattgtgggcaacggtcacgctaccgacctctggcagaattgttcaacctcctcctcgggcaatgtccatcattgcttttcttctagccctaatgagtggttgcaaagcgtgcaggctacgatgatcctcagcattatcttttcgattctctccctattcttgtttttttgccagcttttcaccttaaccaaaggtggccggttctatattactggcatctttcagatccttgcagaaagtaacagctcccagatgtgcggttacagagattag

SEQ ID NO: 316884 - DNA, 357 bp, Artificial Sequence
  derived and/or modified sequence
atgctgctgctgctgctgagcatcatcgtgctgcacgtggccgtgctggtgctgctgtttgtgtccaccatcgtgtcccagtggatcgtgggcaatggccacgccacagacctgtggcagaactgcagcaccagcagcagtggaaatgtgcaccactgcttcagcagcagccccaatgagtggctgcagagcgtgcaggccaccatgatcctgagcatcatcttcagcatcctgagcctcttcctgttcttctgccagctgttcaccctgaccaagggcggccgcttctacatcaccggcatcttccagatcctggccgagagcaacagcagccagatgtgtggctacagagactag

SEQ ID NO: 316885 - DNA, 357 bp, Artificial Sequence
  derived and/or modified sequence
atgctgctgctgctgctgagcatcatcgtgctgcacgtggccgtgctagtactgctgttcgtgtcaaccattgtctcacagtggatcgtcggaaacgggcacgccactgacctgtggcagaattgctccacctcttcttccggcaatgtacaccattgcttttcctcatctccaaacgagtggctccagtccgtgcaggctactatgatcctttctatcatctttagcattttgagtttattcctcttcttctgccaactgtttaccctgactaagggcggccggttttacatcaccggaatttttcagatcctagcggaatcaaattcctcgcagatgtgtggttatagagactag

SEQ ID NO: 316886 - DNA, 357 bp, Artificial Sequence
  derived and/or modified sequence
atgctattgctgttgctgtccattatcgttcttcacgtcgccgtgttggtcctgctctttgtttccaccatagtctctcagtggatcgtcggaaatggccacgcaacggacttgtggcaaaattgctctacaagttcgtcaggcaatgtgcatcactgcttctcatcctctcccaacgaatggctgcaatccgtgcaggcaaccatgatattgtccataatctttagtatcctgtctttattcctgttcttctgtcagctctttacgctcacaaagggtgggagattctatataacaggaatcttccaaatccttgctgaaagtaatagtagccagatgtgcgggtaccgggattag

SEQ ID NO: 316887 - DNA, 357 bp, Artificial Sequence
  derived and/or modified sequence
atgctgctgctgctgctgagcatcatcgtgctgcacgtggccgtgctggtgctgctgttcgtgagcaccatcgtgagccagtggatcgtgggcaacggccacgccaccgacctgtggcagaactgcagcaccagcagcagcggcaacgtgcaccactgcttcagcagcagccccaacgagtggctgcagagcgtgcaggccaccatgatcctgagcatcatcttcagcatcctgagcctgttcctgttcttctgccagctgttcaccctgaccaagggcggcagattctacatcaccggcatcttccagatcctggccgagagcaacagcagccagatgtgcggctacagagactag

SEQ ID NO: 316888 - DNA, 501 bp, Artificial Sequence
  derived and/or modified sequence
tgacaggagagagtgtggcccgccgtgagaagaggcagaggcggcagcatgttcagactgctgagctggagcctgggcagaggcttcctgagagccgccggcagaagatgcagaggctgcagcgccagactgctgcccggcctggccggcggccccggccccgaggtgcaggtgccccccagcagagtggccccccacggcagaggccccggcctgctgcccctgctggccgccctggcctggttcagcagacccgccgccgccgaggaggaggagcagcagggcgccgacggcgccgccgccgaggacggcgccgacgaggccgaggccgagatcatccagctgctgaagagagccaaggtgagaagactgagagccctgagacccgccgagagaggcagcctgtgcgagagaggcctgggcgtggccgcccactacagcctgagactggccgaggagtggatggaggcccccagagtgaagctgcccagaatgagctag

SEQ ID NO: 316889 - DNA, 501 bp, Artificial Sequence
  derived and/or modified sequence
tgacaggagcgggtgtggcccgccgtgcggcggggccggggcggctccatgtttcgtctcctgtcctggtcactgggcagggggttcctacgtgctgcgggaaggcgttgtcgcggctgctcggcccgcttgcttccagggctggctggcggtccggggcctgaagtccaggtccctccctccagggtggcaccgcacggacgcgggcctggcctgctaccacttttagccgctttagcttggttctcaaggcccgccgcagccgaagaagaggaacagcagggcgccgatggcgcagcggctgaagacggagcagatgaggccgaagcggaaattattcagctgttgaaaagagccaaagtgcgcagactgcgagcccttaggcctgccgagcgcgggtctctttgtgagaggggattaggggtggctgcacactatagtctgcgcttagctgaggaatggatggaggcacctagagtgaaactgcccagaatgagctag

SEQ ID NO: 316890 - DNA, 567 bp, Artificial Sequence
  derived and/or modified sequence
atgaagaccctggagacccagcccctggcccccgactgctgccccagcgaccaggaccccgcccccgcccagcccgacaccagctacgtggccagcagcagcagagagaaccccatccacatctgggacgccttcaccggcgagctgagagccagcttcagagcctacaaccacctggacgagctgaccgccgcccacagcctgtgcttcagccccgacggcagccagctgttctgcggcttcaacagaaccgtgagagtgttcagcaccgccagacccggcagagactgcgaggtgagagccaccttcggcaagcacctgtgcctgcagggcagaagaagaggcaagggcaccgccacctgcaccggcgccttctgcgagcccggcgccacctgcggcggcagcagaagacccctgtacggccccggcagcagatgcagccccgtgggcagaggcgccaacagactgagagccggcagaaagcccagccagggccagcccgccggccagagaaccgccagcttcctgaacagctaccccgtgagctgcggcgccttcggcctgtag

SEQ ID NO: 316891 - DNA, 567 bp, Artificial Sequence
  derived and/or modified sequence
atgaagacattagagacccaaccccttgcccctgattgttgtccctcagaccaggatcccgctcctgctcagcccgacacttcctacgtggccagcagttccagagagaaccccatccacatctgggatgcttttacaggtgaattgcgagcatccttccgtgcctataatcaccttgacgagctcactgccgcccatagcctgtgtttttcccctgacgggtcacagcttttctgtggcttcaataggacggtcagggtgttctctaccgcgaggcctggtcgcgactgcgaagtaagagctaccttcggcaaacacttatgtttgcaggggcgccggagggggaagggcactgcaacatgcacgggggcattttgcgagcccggtgccacctgcggtggtagtcgcaggcccctctacggccccgggtctagatgctccccagttgggaggggtgccaaccgacttagagctgggcggaagccctctcagggacagcccgcgggtcaaaggacggcctcatttcttaattcttatccagtctcatgcggcgcttttggcctctag

SEQ ID NO: 316892 - DNA, 567 bp, Artificial Sequence
  derived and/or modified sequence
atgaagaccctggagacccagcccctggccccagactgctgccccagcgaccaggaccctgccccagcccagcctgacaccagctatgtggccagcagcagccgggagaaccccatccacatctgggatgccttcaccggggagctgcgggccagcttccgggcctacaaccacctggatgagctgacagctgcccacagcctgtgcttctccccagatggcagccagctgttctgtggcttcaacagaacagtgcgggtcttcagcacagcccggcccggccgggactgtgaggtgcgggccaccttcggcaagcacctgtgcctgcagggcagaagaagaggcaagggcacagccacctgcaccggggccttctgtgagcccggggccacctgtggcggcagccggcggcccctgtatggccctggcagccgctgcagccctgtgggccgcggggccaaccggctgcgggccggcaggaagcccagccagggccagcctgctggccagaggacagccagcttcctgaacagctaccctgtgtcctgtggggccttcggcctgtag

SEQ ID NO: 316893 - DNA, 567 bp, Artificial Sequence
  derived and/or modified sequence
atgaagaccctggagacccagcccctggcccccgactgctgcccctcggaccaggacccagctcctgctcagcccgatacatcctatgtcgcctcaagctcgcgagagaaccctattcatatctgggatgcctttactggcgagctccgtgcgagctttagggcctataatcacctcgatgagctcactgcggcacatagcttatgcttcagtccagacggctcccaactcttctgcggcttcaatcggaccgtgcgcgtgttttccacggctagacctgggcgcgactgtgaggtccgggctacttttgggaagcatctttgtctgcaggggagaaggcgggggaagggcaccgccacatgtaccggggccttctgcgagcccggcgctacctgcggtggctcccgcagaccactctacggtccgggaagcagatgttctcccgtgggccgcggcgcaaatcgtctgagggccggacgcaagccctcacaggggcagcccgcgggccaacggaccgcgagcttcttgaactcataccccgttagttgcggtgcttttggactgtag

SEQ ID NO: 316894 - DNA, 567 bp, Artificial Sequence
  derived and/or modified sequence
atgaagacattggagacacagcctctggccccagattgttgcccatctgatcaggatcctgctcccgctcaaccagacacatcttacgtcgcttcaagcagtagagagaatcctattcatatctgggatgcattcaccggagaattgcgcgctagcttccgcgcatataaccatctcgacgaattgactgccgcacattccttgtgcttcagcccagacggctcccagcttttttgcggatttaatcgcacagtgagagtatttagcaccgctcggccaggacgggactgtgaggtgcgcgcaacctttgggaagcatttgtgcttgcagggacggaggcgcggtaagggaaccgcgacatgtaccggagccttttgcgaacccggagctacttgcggaggctcacgcagaccgctgtacggtccagggagcagatgctccccggttggaagaggagcaaatcggctgcgagcgggaagaaaaccctcgcagggccagcctgcaggacagaggaccgcaagtttccttaattcctatccagtctcatgtggggcatttgggctctag

SEQ ID NO: 316895 - DNA, 1173 bp, Artificial Sequence
  derived and/or modified sequence
aaaagaattggcgtccgctgttcgcctctcctcccgggagtcttctgcctactcccagaagaggagggaagcacaggtgggtttctttagctctgcgtcggatccctgagaacttcgaagccatcctggctgaggctaatctccgctgtgcttcctctgcagtatgaagactttggagactcaaccgttagctccggactgctgtccttcagaccaggacccagctccagcccagccagacacctcctacgtggccagcagcagccgggagaacccgattcatatctgggacgcattcactggagagctccgggcttcctttcgcgcctacaaccacctggatgagctgacggcagcccattcgctctgcttctccccggatggctcccagctcttctgtggcttcaaccggactgtgcgtgttttttccacggcccggcctggccgagactgcgaggtccgagccacatttggtaagcatctgtgcctccaagggaggaggagagggaagggcactgccacctgcacaggggccttttgtgagccgggggccacctgtgggggttcacgccgtcctctgtacggccccgggagcaggtgcagcccagtcggcagaggagcaaacaggctcagagcaggtaggaaaccttcccaaggccaaccagctggtcaaaggactgcttccttcctgaactcataccctgtcagctgtggagcttttggtctctgaaatctttctagaaaattgttgataaagctgattccgttttcctgtaggccttcaacttgcatctctccaaggaagaactgggatttgagagggatgaagtggggcttgggcatttaggtcctttgggaggatagatgtggggagcatcagaggtctttgtcctgcttgtgacagacagcatgggggggatgttgagtccaagcatgttggtgctgggacgggagacagacctctgcttagcctggttagtgccaggagccattgccccctcccccactttgttccttccctctctagcaaaaaagcagggccagagcggcatcatctcctgcatagccttcagcccagcccagcccctctatgcctgtggctcctacggccgctccctgggtctgtatgcctgggatgatggctcccctctcgccttgctgggagggcaccaa

SEQ ID NO: 316896 - protein, 501 aa, Artificial Sequence
  derived and/or modified sequence
MFSLIVKAAQTELGQQILADFEEAFPSQGTKRPGGPSNVLRDACLVANILDPRIKQEIIKKFIKQHLSEYLVLFQENQDVAWLDKIDRRYAWIKRQLVDYEEKYGRMFPREWCMAERIAVEFCHVTRAELAKIMRTRAKEIEVKLLLFAIQRTTNFEGFLAKRFSGCTLTDGTLKKLESPPPSTNPFLEDEPTPEMEELATEKGDLDQPKKPKAPDNPFHGIVSKCFEPHLYVYIESQDKNLGELIDRFVADFKAQGPPKPNTDEGGAVLPSCADLFVYYKKCMVQCSQLSTGEPMIALTTIFQKYLREYAWKILSGNLPKTTTSSGGLTISSLLKEKEGSEVAKFTLEELCLICNILSTAEYCLATTQQLEEKLKEKVDVSLIERINLTGEMDTFSTVISSSIQLLVQDLDAACDPALTAMSKMQWQNVEHVGDQSPYVTSVILHIKQNVPIIRDNLASTRKYFTQFCVKFANSFIPKFITHLFKCKPISMVGAEQVRWT

SEQ ID NO: 316897 - DNA, 1269 bp, Artificial Sequence
  derived and/or modified sequence
atgatggaggaggaggagctggagttcgtggaggagctggaggccgtgctgcagctgacccccgaggtgcagctggccatcgagcaggtgttccccagccaggaccccctggacagagccgacttcaacgccgtggagtacatcaacaccctgttccccaccgagcagagcctggccaacatcgacgaggtggtgaacaagatcagactgaagatcagaagactggacgacaacatcagaaccgtggtgagaggccagaccaacgtgggccaggacggcagacagaagaagctggagagccccccccccagcaccaaccccttcctggaggacgagcccacccccgagatggaggagctggccaccgagaagggcgacctggaccagcccaagaagcccaaggcccccgacaaccccttccacggcatcgtgagcaagtgcttcgagccccacctgtacgtgtacatcgagagccaggacaagaacctgggcgagctgatcgacagattcgtggccgacttcaaggcccagggcccccccaagcccaacaccgacgagggcggcgccgtgctgcccagctgcgccgacctgttcgtgtactacaagaagtgcatggtgcagtgcagccagctgagcaccggcgagcccatgatcgccctgaccaccatcttccagaagtacctgagagagtacgcctggaagatcctgagcggcaacctgcccaagaccaccaccagcagcggcggcctgaccatcagcagcctgctgaaggagaaggagggcagcgaggtggccaagttcaccctggaggagctgtgcctgatctgcaacatcctgagcaccgccgagtactgcctggccaccacccagcagctggaggagaagctgaaggagaaggtggacgtgagcctgatcgagagaatcaacctgaccggcgagatggacaccttcagcaccgtgatcagcagcagcatccagctgctggtgcaggacctggacgccgcctgcgaccccgccctgaccgccatgagcaagatgcagtggcagaacgtggagcacgtgggcgaccagagcccctacgtgaccagcgtgatcctgcacatcaagcagaacgtgcccatcatcagagacaacctggccagcaccagaaagtacttcacccagttctgcgtgaagttcgccaacagcttcatccccaagttcatcacccacctgttcaagtgcaagcccatcagcatggtgggcgccgagcaggtgagatggacctag

SEQ ID NO: 316898 - DNA, 1506 bp, Artificial Sequence
  derived and/or modified sequence
atgttcagcctgatcgtgaaggccgcccagaccgagctgggccagcagatcctggccgacttcgaggaggccttccccagccagggcaccaagagacccggcggccccagcaacgtgctgagagacgcctgcctggtggccaacatcctggaccccagaatcaagcaggagatcatcaagaagttcatcaagcagcacctgagcgagtacctggtgctgttccaggagaaccaggacgtggcctggctggacaagatcgacagaagatacgcctggatcaagagacagctggtggactacgaggagaagtacggcagaatgttccccagagagtggtgcatggccgagagaatcgccgtggagttctgccacgtgaccagagccgagctggccaagatcatgagaaccagagccaaggagatcgaggtgaagctgctgctgttcgccatccagagaaccaccaacttcgagggcttcctggccaagagattcagcggctgcaccctgaccgacggcaccctgaagaagctggagagccccccccccagcaccaaccccttcctggaggacgagcccacccccgagatggaggagctggccaccgagaagggcgacctggaccagcccaagaagcccaaggcccccgacaaccccttccacggcatcgtgagcaagtgcttcgagccccacctgtacgtgtacatcgagagccaggacaagaacctgggcgagctgatcgacagattcgtggccgacttcaaggcccagggcccccccaagcccaacaccgacgagggcggcgccgtgctgcccagctgcgccgacctgttcgtgtactacaagaagtgcatggtgcagtgcagccagctgagcaccggcgagcccatgatcgccctgaccaccatcttccagaagtacctgagagagtacgcctggaagatcctgagcggcaacctgcccaagaccaccaccagcagcggcggcctgaccatcagcagcctgctgaaggagaaggagggcagcgaggtggccaagttcaccctggaggagctgtgcctgatctgcaacatcctgagcaccgccgagtactgcctggccaccacccagcagctggaggagaagctgaaggagaaggtggacgtgagcctgatcgagagaatcaacctgaccggcgagatggacaccttcagcaccgtgatcagcagcagcatccagctgctggtgcaggacctggacgccgcctgcgaccccgccctgaccgccatgagcaagatgcagtggcagaacgtggagcacgtgggcgaccagagcccctacgtgaccagcgtgatcctgcacatcaagcagaacgtgcccatcatcagagacaacctggccagcaccagaaagtacttcacccagttctgcgtgaagttcgccaacagcttcatccccaagttcatcacccacctgttcaagtgcaagcccatcagcatggtgggcgccgagcaggtgagatggacctag

SEQ ID NO: 316899 - DNA, 1269 bp, Artificial Sequence
  derived and/or modified sequence
atgatggaagaagaggaattggagttcgtagaagaactagaagccgtgcttcagctgacacctgaggtccaactcgcaattgaacaggtgtttccctcccaagatccgctggatcgtgccgacttcaacgcagtcgaatatatcaacaccctctttcctaccgaacagagtctggctaacatcgacgaggtagtaaataagatccgcttgaaaatccgtcgtctggatgataacatccgaactgtggtccggggccagaccaatgtcggacaggatggtcgccagaaaaagttagagagcccaccacctagcactaacccgtttctggaggacgaacccacgcctgaaatggaggagttagcaacggagaagggagatcttgaccagcctaaaaaacccaaggcaccagataacccatttcatgggatagtgagcaaatgtttcgagccccacctctatgtgtacattgagtcccaagataagaacctcggagagttaatagacaggtttgtggccgatttcaaagcacaggggccacctaagccgaataccgatgaggggggagccgtgctgccttcatgtgccgatctgttcgtgtattacaagaagtgcatggtccagtgttcccaactcagtaccggtgagcctatgatcgccctgacaaccattttccaaaaatacctgcgcgagtacgcgtggaagattttgtctggtaaccttccaaagactacaacttcctcaggagggcttacaatcagctccctgctcaaggaaaaagaggggagtgaagttgctaaatttaccctggaggagctctgtctgatatgcaacatcctgtccacagctgaatactgtctagccacaacacaacagctggaagaaaagttgaaagagaaggtcgacgtcagcctgatcgagcggatcaaccttacaggagagatggatacgttttctacagttatctcctctagtattcaactgttggtgcaggatctggacgcagcatgcgacccggccctgacagccatgagtaagatgcaatggcaaaacgtcgagcacgtaggggaccagagtccatacgtcaccagtgtcatccttcacattaagcagaacgtaccaataattcgcgacaacctcgcctcaaccaggaagtacttcacccagttttgcgttaagtttgcgaactcttttattccaaagttcatcacacatctgtttaagtgcaagcccattagtatggtgggggcagagcaggttaggtggacatag

SEQ ID NO: 316900 - DNA, 1506 bp, Artificial Sequence
  derived and/or modified sequence
atgttttctcttatcgtgaaagctgcacaaactgagctagggcagcagatcctggccgactttgaagaagcgtttccatcacaaggtactaagcggccagggggcccaagcaatgtgcttcgggacgcttgcctggttgctaacattttagaccctcgcattaaacaagagatcatcaagaaatttatcaagcagcatttatccgagtacttggtgctgttccaggaaaatcaagatgtggcctggctggataaaattgatcgacgctacgcttggatcaagcggcagctcgtggactatgaagagaaatatgggcgcatgtttcctcgcgagtggtgtatggccgagaggatcgcggtagagttttgtcatgtgacaagagccgagctcgccaagataatgaggactagagcgaaggagattgaggtgaagctcctgctttttgcaatccagaggaccactaacttcgaaggctttttagctaagcgctttagtggatgcaccctgaccgatgggacacttaagaagcttgagtccccacccccatccacaaacccatttctcgaagacgagccaacaccagagatggaggaactggctacagagaagggcgacctggatcagcctaagaaaccgaaagctccggataaccccttccacggcatagttagcaagtgctttgagccccacctttacgtgtatatcgagagtcaggacaagaacctgggagagctgattgaccgcttcgttgctgacttcaaggctcaggggcctcctaaaccaaacaccgatgaaggaggagcagtgctaccatcttgcgccgacttgttcgtgtattacaaaaagtgcatggtgcaatgctcccagctctctacaggggagcccatgatcgccttgaccacaatcttccagaagtacctcagagagtatgcttggaaaatccttagcggtaatctgcctaagactaccacgtcaagtggaggcttaacgatcagtagcttgcttaaagagaaggagggctcagaggtcgctaagtttactctggaagaactgtgtctcatttgtaatatcttgtctaccgccgaatactgcctcgcgaccacacagcaactagaggagaaactcaaagaaaaggtagatgtttcgctcatcgagcggatcaatctgactggcgagatggatactttttccacagtaatcagttcatccatacaattgttagttcaagacttggatgccgcttgcgatcctgccttgacagcaatgagcaagatgcaatggcaaaatgtggaacacgtgggggaccaaagcccatatgtcacttccgtaatcctccacattaagcagaacgtgcctataattcgggacaacctggcatccacacgaaagtactttactcagttctgtgtcaagttcgccaattctttcatcccaaaattcataacccacttattcaagtgcaaacctattagcatggtgggcgccgagcaggtgcgatggacatag

SEQ ID NO: 316901 - DNA, 1269 bp, Artificial Sequence
  derived and/or modified sequence
atgatggaggaggaggagctggagtttgtggaggagctggaggccgtgctgcagctgaccccagaggtgcagctggccatcgagcaggtgttccccagccaggaccccctggacagagctgacttcaatgctgtggagtacatcaacaccctcttccccacagagcagagcctggccaacattgatgaggtggtgaacaagatccggctgaagatccggcggctggatgacaacatcagaacagtggtgcggggccagaccaacgtgggccaggacggccggcagaagaagctggagagccccccacccagcaccaaccccttcctggaggatgagcccaccccagagatggaggagctggccacagagaagggggacctggaccagcccaagaagcccaaggccccagacaaccccttccatggaattgtgtccaagtgctttgagccccacctgtatgtgtacatcgagagccaggacaagaacctgggggagctgattgacagatttgtggccgacttcaaggcccagggcccccccaagcccaacacagatgaaggaggagctgtgctgcccagctgtgccgacctgtttgtgtactacaagaagtgcatggtgcagtgcagccagctgagcactggagagcccatgattgccctgaccaccatcttccagaagtacctgcgggagtatgcctggaagatcctgagcggcaacctgcccaagaccaccaccagcagcggcggcctgaccatcagcagcctgctgaaggagaaggagggcagcgaggtggccaagttcaccctggaggagctgtgcctgatctgcaacatcctgagcacagctgagtactgcctggccaccacccagcagctggaggagaagctgaaggagaaggtggatgtgtccctgattgagcgcatcaacctgactggagagatggacaccttcagcaccgtcatcagcagcagcatccagctgctggtgcaggacctggatgctgcctgtgaccctgccctgacagccatgagcaagatgcagtggcagaatgtggagcacgtgggggaccagagcccctacgtgaccagcgtcatcctgcacatcaagcagaatgtgcccatcatccgggacaacctggccagcaccaggaagtacttcacccagttctgtgtgaagtttgccaacagcttcatccccaagttcatcacccacctgttcaagtgcaagcccatctccatggtgggcgctgagcaggtgcgctggacctag

SEQ ID NO: 316902 - DNA, 1506 bp, Artificial Sequence
  derived and/or modified sequence
atgttcagcctgattgtgaaggccgcccagacagagctgggccagcagatcctggccgactttgaggaggccttccccagccagggcaccaagaggcctgggggccccagcaatgtgctgagagatgcctgcctggtggccaacatcctggacccccgcatcaagcaggagatcatcaagaagttcatcaagcagcacctgtctgagtacctggtgctcttccaggagaaccaggatgtggcctggctggacaagattgaccggcgctatgcctggatcaagaggcagctggtggactatgaggagaagtatggccgcatgttcccccgggagtggtgcatggccgagagaattgctgtggagttctgccacgtgaccagggctgagctggccaagatcatgaggacccgggccaaggagattgaggtgaagctgctgctgtttgccatccagaggaccaccaactttgagggcttcctggccaagcgcttcagcggctgcaccctgacagatggcaccctgaagaagctggagagccccccacccagcaccaaccccttcctggaggatgagcccaccccagagatggaggagctggccacagagaagggggacctggaccagcccaagaagcccaaggccccagacaaccccttccacggcatcgtgtccaaatgttttgagccccacctgtatgtgtacatcgagagccaggacaagaacctgggggagctgattgacagatttgtggccgacttcaaggcccagggcccccccaagcccaacacagatgagggcggcgctgtgctgcccagctgtgccgacctgtttgtgtactacaagaagtgcatggtgcagtgcagccagctgagcactggagagcccatgattgccctgaccaccatcttccagaagtacctgcgggagtatgcctggaagatcctgagcggcaacctgcccaagaccaccaccagcagcggcggcctgaccatcagcagcctgctgaaggagaaggagggcagcgaggtggccaagttcaccctggaggagctgtgcctgatctgcaacatcctgagcacagctgagtactgcctggccaccacccagcagctggaggagaagctgaaggagaaggtggatgtgtccctcatcgagcgcatcaacctgaccggggagatggacaccttcagcaccgtcatcagcagcagcatccagctgctggtgcaggacctggatgctgcctgtgaccctgccctgacagccatgagcaagatgcagtggcagaatgtggagcacgtgggggaccagagcccctacgtgaccagcgtcatcctgcacatcaagcagaatgtgcccatcatccgggacaacctggccagcaccaggaagtacttcacccagttctgtgtgaagtttgccaacagcttcatccccaagttcatcacccacctgttcaagtgcaagcccatctccatggtgggcgctgagcaggtgcgctggacctag

SEQ ID NO: 316903 - DNA, 1269 bp, Artificial Sequence
  derived and/or modified sequence
atgatggaggaggaggagctggagttcgtggaggagctggaggccgtcctgcaactaacaccagaggttcagctggctattgagcaggtgtttccttcccaggatcctcttgatagggccgattttaacgctgtggaatatataaatacactgtttcctaccgaacagtccttagcgaatatcgatgaagtggtaaataagattcgtctcaagattcgtagactggacgacaatatccggaccgttgtccggggacagacaaacgtggggcaagatgggagacagaaaaagctggagagtccaccgccgtctacgaacccctttctagaagacgagcctactccagaaatggaggagctcgctaccgaaaagggagatttagaccaacccaagaagcccaaagcccctgacaatccctttcacggtattgtctcaaagtgctttgagcctcatctgtatgtgtacatcgaatcccaggacaagaatctcggcgaactgattgacagattcgtcgctgacttcaaagctcagggcccaccaaaaccaaacacagacgaaggcggtgctgtgctgccatcatgcgcagacctttttgtgtactacaaaaagtgcatggtccaatgtagccagcttagcacaggtgagcctatgatcgcgttaaccactatcttccagaagtaccttagagaatacgcttggaagatcctatccggtaacttgcctaaaaccaccacatcctccggaggccttacgattagttcactgctgaaagaaaaggagggcagtgaagtggccaagtttaccctggaggagctgtgtcttatctgcaatattctctcaaccgctgagtactgtctggctaccacacagcagctggaagagaaactgaaggagaaggtggatgtgtcactgattgaacgaattaatcttaccggggaaatggacactttcagcacagttatctctagttccatccagttgcttgtgcaagatctggacgccgcctgtgaccctgccttgaccgccatgtcaaagatgcagtggcaaaatgtcgagcacgtgggcgatcaatcaccttatgtgacctcagtgatcttgcacataaaacagaatgtgcctattatcagagataaccttgcgtcaacccggaagtactttactcagttttgtgtgaagtttgctaatagctttatcccaaagtttatcacacacctgtttaaatgcaaacctatttctatggtgggggctgaacaggtgcgctggacttag

SEQ ID NO: 316904 - DNA, 1506 bp, Artificial Sequence
  derived and/or modified sequence
atgttcagcctgatcgtgaaggccgcccagaccgagctgggccagcagattctcgccgacttcgaggaagccttcccttctcagggcaccaagagacccggtggaccgagtaatgtgttacgagatgcctgtctggtggccaatattcttgatccaagaatcaagcaagagatcatcaaaaagtttattaagcagcatctctctgagtatctcgtgctatttcaggaaaaccaagatgtcgcctggctggataaaatcgaccggcgttacgcatggatcaaacgacagctcgttgattacgaggagaaatatggtcgaatgttccctcgcgagtggtgtatggctgaacgcatcgctgtggagttttgccatgtgacccgcgccgagttggctaagattatgagaacgcgggcaaaggaaattgaggtcaagcttcttttgttcgcaatccaaagaacaacgaactttgaggggtttctcgctaagcggttcagcggttgcacactcacagacggcactttaaagaagctggaaagtccacccccctctaccaaccctttcctggaagacgagccaactccggagatggaagaactggccaccgagaagggtgacttggatcagcccaagaagcccaaggccccagacaatccttttcacggcatagtgagtaagtgtttcgagccacacttgtatgtgtatattgagtcccaggacaagaacctgggtgagttaattgacaggtttgtggcggatttcaaggcacagggtcctcctaaaccaaacactgatgaagggggcgctgtcctgccaagctgcgctgacttgttcgtgtactataagaagtgcatggtgcagtgttctcaactgagcactggcgaacccatgattgccctgacaaccattttccagaagtacctgcgggagtatgcatggaagattctgagcgggaacttgccaaagactaccacttcttccgggggcttgaccatatcaagcctcctgaaagagaaagagggctctgaggttgctaagtttacactagaggagctgtgtttgatctgcaatatcctgagtactgcggaatactgtctcgccacgacacagcaactggaggaaaagctgaaggagaaagtggatgtcagcctaattgaacggattaaccttactggcgaaatggacacatttagtactgtgatctcttctagtatccagctgttggtgcaggatctcgacgccgcctgtgacccagccctgacggccatgagtaagatgcagtggcagaatgtggagcatgtgggcgaccagtccccatacgtgactagcgtcatactgcacatcaagcagaacgtgcccatcatccgcgataatctggcttctaccagaaaatatttcacccaattctgtgtgaaatttgccaacagctttatccctaagttcatcacccatctgttcaagtgtaagccaatcagcatggttggggcagagcaggtacgctggacttag

SEQ ID NO: 316905 - DNA, 1269 bp, Artificial Sequence
  derived and/or modified sequence
atgatggaagaagaagaactagaattcgtggaagagctggaagcagtgctgcagctcacgccagaagtgcagctggccatcgagcaggtgttcccttcacaggaccctctggatagagctgatttcaacgccgtcgagtatattaatacgcttttccctacagagcagtccctcgccaacattgatgaagtggtcaacaagatcagattaaaaatccggagacttgacgataatattagaaccgtggtcaggggacaaactaatgtggggcaggatggcagacagaaaaagttggagagcccgcctccgagtacaaaccccttcctggaagacgagccaacccccgagatggaagaactggcgacagaaaagggtgacctggatcagccaaagaaacctaaggcacccgataacccattccatgggatcgtgagcaagtgcttcgaaccacacctgtacgtttacattgagagtcaggacaaaaacctaggtgaattgatcgatagatttgtcgctgatttcaaggcccagggacccccaaagccaaacacagatgagggaggagccgtgctccccagctgtgctgacctgttcgtgtattataagaaatgcatggtccagtgctcacagctgtcgacaggagaaccgatgatcgccttaaccacgatctttcagaaatacctgcgggaatatgcttggaagattttaagcgggaacctcccgaagaccaccacgtccagcgggggactgaccataagctcattgctgaaggagaaggagggttcagaggtggccaagtttacgcttgaggagctctgtttaatttgtaacattctcagcaccgctgaatactgtctggctactacacaacaactggaggaaaaactcaaagagaaagtggatgtttcactgattgaacgaatcaatctaacaggggagatggatactttcagcacagtgatttcttctagtattcagttgcttgtgcaggacttagatgcggcttgtgatccggcactcacagccatgagtaaaatgcagtggcagaatgtggaacatgttggcgaccagtctccatatgtgaccagtgtcatcctccacatcaagcagaacgtgccaatcatcagagacaatctagcaagcacgagaaaatacttcactcaattctgtgttaagtttgctaacagctttattcctaagtttatcactcacttatttaagtgcaaaccaattagtatggtaggagcagagcaggtgagatggacgtag

SEQ ID NO: 316906 - DNA, 1506 bp, Artificial Sequence
  derived and/or modified sequence
atgttctctctgatcgtgaaggccgcacaaactgagttaggacagcagattctcgcggacttcgaagaggcatttccatcgcaaggcactaaacggccagggggaccaagcaacgtcttgcgggacgcttgcttagtggccaacattctggatcctcgcattaaacaggagatcattaaaaaatttattaagcaacaccttagcgagtatctggtcctgttccaggaaaatcaggatgtagcatggctcgacaaaattgacaggcgatacgcttggataaagcgacaattagtcgattatgaagagaagtacggcagaatgttcccacgggaatggtgtatggccgaacgaatcgcagtggaattttgtcatgtaactagagccgaattggcgaagatcatgcgaaccagagcaaaggagattgaagtgaagctcctgctattcgcaattcagcgcaccactaactttgaaggcttccttgcaaagcggttttcgggttgcactctgacagacggcaccttgaagaaattggagtctccaccccctagcacaaaccccttcctcgaggatgagccaactcccgagatggaagagctggccacagaaaagggagaccttgaccagcctaaaaagcccaaagcccctgacaacccattccatggaatcgtgagcaaatgttttgaaccacacttgtatgtctatatcgagagtcaggataaaaatttgggtgagctgattgaccgcttcgtagctgacttcaaggcccaaggacctcccaaacccaatacagacgagggaggggctgtgcttccaagctgtgccgacctgttcgtgtattataagaaatgtatggtgcagtgctctcagttgagtacgggcgagcctatgattgccctgactactatctttcagaagtacctgagggagtatgcttggaagattctgagcggaaacctccctaaaaccaccacttcttccggcggactgacaatatcttccctgctgaaagagaaagaggggtccgaggtggctaaatttaccctggaggaactgtgcctgatctgtaacatcctttcaacggcagagtactgtttagccacgacacagcagctggaggaaaaattgaaggagaaagttgatgtcagccttatagaacgcattaatctgacaggagaaatggataccttttcgacagtcattagcagctccattcagctacttgtgcaggatctggatgccgcatgcgatcccgcactgacagccatgtccaaaatgcaatggcagaacgtggaacatgttggcgaccagagcccatacgtgacgagtgtaatcctgcatatcaagcagaatgtgcctataatccgagataatctcgcctcgacacgcaaatactttacacagttttgcgttaagtttgcgaattcatttattcctaaatttatcacacacctcttcaagtgcaaaccgatcagtatggttggcgcagagcaagtgaggtggacctag

SEQ ID NO: 316907 - DNA, 1269 bp, Artificial Sequence
  derived and/or modified sequence
atgatggaggaggaggaactggagttcgtggaggagctggaagccgtgctgcagctcacgcccgaggtgcagctggccatcgagcaggtgtttccaagccaggaccctctagatcgagcagatttcaatgctgttgagtatatcaataccctgttcccaaccgagcaatctctggcgaacatagacgaagtcgtgaacaaaattaggctgaaaataaggagactggatgacaatattcgaactgttgtaagaggtcagacgaacgtggggcaggatggacggcaaaaaaagcttgagtctccacccccatctaccaatcccttcctggaagatgagccaacaccagagatggaggaactggcaacggagaaaggagatttagatcaaccaaagaagcctaaagccccagacaatccatttcatggcattgtttccaagtgttttgagcctcatctctacgtgtatatcgaatcccaagacaagaacctcggagagctgatagatcggtttgtggctgatttcaaagcccaggggccacctaagcccaacactgatgaagggggtgccgtgctccccagctgcgccgacctctttgtctactacaagaagtgcatggtgcaatgctctcagctcagtactggggagcccatgatcgccctgaccaccattttccagaagtacctccgagaatacgcctggaaaatcctctctggcaacctgcccaaaaccacaaccagcagtggaggactgactatcagcagcctcctcaaggaaaaggagggctcagaagtagccaagttcactctggaggagctctgcctcatctgtaacatcctgagcacggcagagtactgtctggccaccacccagcagctagaagaaaaactcaaagaaaaagtggatgtaagtctgattgaacgaatcaatctgactggagagatggacacgttcagcaccgtcatctccagcagtattcagctgctggttcaggatctggatgctgcctgtgatcctgccctgactgccatgagcaagatgcagtggcagaacgtggagcacgttggtgaccagagcccctacgtcacctctgtcattctgcacatcaagcagaacgtccccatcatccgtgacaacctggcttccacacgcaagtacttcactcagttctgcgttaaatttgcaaactccttcattcccaaattcatcacccacctcttcaagtgcaagccaattagcatggtgggagcagaacaggtgagatggacgtag

SEQ ID NO: 316908 - DNA, 3204 bp, Artificial Sequence
  derived and/or modified sequence
gaagtgccggagcggctgacagagcggctgacggagccgggctcaccaggtcgctgccgcgagggagttgctgtgctggggcctgggtggcggctggaggcctgagttgggctcgcggcgggggtcggcagggggccgggtggcggaatgatggaggaggaggaactggagttcgtggaggagctggaagccgtgctgcagctcacgcccgaggtgcagctggccatcgagcaggtgtttccaagccaggaccctctagatcgagcagatttcaatgctgttgagtatatcaataccctgttcccaaccgagcaatctctggcgaacatagacgaagtcgtgaacaaaattaggctgaaaataaggagactggatgacaatattcgaactgttgtaagaggtcagacgaacgtggggcaggatggacggcaagcgcttgaagaggctcagaaagctatccaacaactctttggcaaaatcaaagatatcaaagacaaagctgaaaaatcagagcaaatggtgaaagaaatcacccgtgatattaagcaattagatcacgccaaacgccacctgaccacctcaatcaccacactgaaccacctgcacatgctggcaggaggtgtcgactccctcgaagccatgaccaggcgaagacaatacggagaagttgctaatctccttcagggtgtgatgaatgtcctggagcacttccacaagtatatggggattccgcagatccggcagctttccgaaaggaaacccaaaacactgcagctgcatggattgaactggacgtgatgtgaaatgaaataagccagacacgggaagacagattcctcatgttctcactcatagtgaaggctgcacagactgagttaggacagcaaatcctggcagattttgaagaagcgtttccttcccagggcaccaagagaccaggaggacccagcaatgttctacgagatgcatgtctggttgctaatattctagatcccaggatcaaacaggaaatcatcaaaaagtttattaaacagcatctgtcagagtatctggtactttttcaagaaaaccaagatgttgcctggctggacaaaatcgacagacgctatgcctggataaaacgccagcttgtggactatgaggagaaatacggccgcatgtttccacgtgagtggtgcatggctgagaggattgcggtggaattttgccatgtgacaagggcagaacttgccaagattatgcgtaccagagcgaaggaaattgaagtgaaattgcttctttttgctattcaaagaacaactaactttgaggggtttcttgcaaaacgcttctccggctgcaccctgaccgatgggaccctgaaaaagcttgagtctccacccccatctaccaatcccttcctggaagatgagccaacaccagagatggaggaactggcaacggagaaaggagatttagatcaaccaaagaagcctaaagccccagacaatccatttcatggcattgtttccaagtgttttgagcctcatctctacgtgtatatcgaatcccaagacaagaacctcggagagctgatagatcggtttgtggctgatttcaaagcccaggggccacctaagcccaacactgatgaagggggtgccgtgctccccagctgcgccgacctctttgtctactacaagaagtgcatggtgcaatgctctcagctcagtactggggagcccatgatcgccctgaccaccattttccagaagtacctccgagaatacgcctggaaaatcctctctggcaacctgcccaaaaccacaaccagcagtggaggactgactatcagcagcctcctcaaggaaaaggagggctcagaagtagccaagttcactctggaggagctctgcctcatctgtaacatcctgagcacggcagagtactgtctggccaccacccagcagctagaagaaaaactcaaagaaaaagtggatgtaagtctgattgaacgaatcaatctgactggagagatggacacgttcagcaccgtcatctccagcagtattcagctgctggttcaggatctggatgctgcctgtgatcctgccctgactgccatgagcaagatgcagtggcagaacgtggagcacgttggtgaccagagcccctacgtcacctctgtcattctgcacatcaagcagaacgtccccatcatccgtgacaacctggcttccacacgcaagtacttcactcagttctgcgttaaatttgcaaactccttcattcccaaattcatcacccacctcttcaagtgcaagccaattagcatggtgggagcagaacaggtgagatggacgtagtatcaggcatttgcctggcagcttttgttgtagatcaagcacatattcttctagtccagatctacttggcaggaataaaattgatgatgtcccctgtttggggacagtataatgactcacccggaaggtttcttaattcgttcttccatttatttttaaaaattttgtttgaacgcctactaagttctgggtgcagggtataacacagcaagcaccatggaaaggtccctgctcctagtgctcacactccaataagaagaagtggctgggccgggcacagcggctcacgctgtaaccccagcatttcgggaggcctgggcaggcagatcacctggggtaaggaatttgagagcagcctggccaacatggtgaaatcccatctctactaaaaatacaaaaattagctgggcatgggggcaggctactggggaggctgaggcaggagaatcacttgaacccgggaggtggaggttgcagtgagccgatatcacaccactgcactccagcctgggtgacaaagtgagactccatctcaaaaaaacaaacaaacaaaaaaactagcaaaaaacttggaatattggccgggcatggtggctcacgtctgtaatcctagcactttgggaggcccaggcaggcggatcatctgaggtcaggagttcgagaccagcctggctaacatggtgaaccctgtctctactaataatacaaaaaattagccgggcgtgatggtgggcgcctgtaatcccagctactcgggaggctgaggcagaattgcttcaacccaggaggtggaggttgcagtgagctgagatcacaccactgtactccagcctgggcaacaagagcgaaactccatctc

SEQ ID NO: 316909 - DNA, 2034 bp, Artificial Sequence
  derived and/or modified sequence
atggagtctgatctgcaccagattatccattctagtcagcccctgacccttgagcatgtgcgatacttcttatatcagctcctgagagggctgaagtatatgcacagcgcccaagtgatccacagagatcttaagcctagcaacctgctggtgaacgaaaattgtgagctgaaaatcggggactttggcatggctagaggactctgcacctccccagcggagcatcagtacttcatgaccgagtatgtcgcgacacgctggtacagggcccctgagttgatgttaagtctccacgaatacacccaggccatcgacctttggtccgtcggttgtatcttcggggagatgctggcaagaagacaactcttcccagggaagaactacgtgcatcagttgcagttgatcatgatggtcttaggaactccatcgcctgctgttatccaggcggttggagctgaacgtgtgcgcgcttacatccaaagtctcccccctcggcagccagtgccatgggaaacggtctaccccggcgccgatagacaggccctttctctgctgggaaggatgttaagatttgagccaagtgccaggatttctgccgcagccgctctgcgccacccctttttagctaagtatcacgaccctgatgacgaacccgactgtgcacctccattcgatttcgctttcgatagggaggccctcacacgggagaggatcaaagaggcaatcgttgctgaaatagaggactttcacgcacggcgggaggggatcaggcagcagatcaggttccagcctagtctgcaacccgtggcttcggagcccgggtgcccggatgtcgagatgcctagcccttgggctccttccggagattgtgctatggagagcccaccacctgctcccccgccttgccctggcccagcccccgataccatagaccttaccctacagcctcctcctcccgtctcagagcctgcccctcccaaaaaggatggagctatcagcgacaatactaaggccgccctgaaggccgccctgctgaaaagcctgcggtcccgcctgcgagatggcccctctgcgccactagaggcaccagagccaaggaagcccgtcaccgcacaggaaaggcagagagagagagaggaaaaacggaggagacgccaggagcgagctaaggagagagaaaagcgccggcaggagcgtgaacggaaggagcgcggggccggagcctcaggtggcccaagcacagatccgctcgccggtttggtcctgagtgacaacgacaggtccctcttagagcgttggactcgtatggccaggcctgcagctccagctctcacctccgtgccagccccagcacctgcccccacacccacccctactcccgtacagccaactagtccaccacccgggccagtggcccagccaacggggcctcagcctcagagtgcaggaagcaccagcgggccagtgccccaaccggcttgtcctccccccggccccgctccacacccaacaggtcccccagggccaatccccgtgccggctccacctcagatagctaccagcacttcacttctcgccgcccagtcgttggtgcccccccctggactccctggctctagcacacctggcgtgctgccatatttcccgccggggcttccaccgcctgacgctgggggcgcgcctcagagcagtatgagcgagagcccagacgtgaatctggtcacccagcagctgagcaaaagccaggtggaagatccactgccgcctgtgttcagtgggacacctaagggaagtggggcgggatacggggtaggttttgacctagaggagttccttaatcagtcttttgacatgggcgtcgctgatggaccccaggacggacaggcggattcagcatcattgagcgcatctctgctagctgattggctggagggtcacggcatgaatcctgcagatatcgagtcactccagcgggagatccagatggatagtcctatgctgctcgctgacctgcctgacctgcaggacccatag

SEQ ID NO: 316910 - DNA, 2034 bp, Artificial Sequence
  derived and/or modified sequence
atggagagtgacctgcaccagatcatccacagcagccagcccctgaccctggagcacgtgcgctacttcctgtaccagctgctgcggggcctgaagtacatgcacagcgcccaggtgatccaccgggacctgaagcccagcaacctgctggtgaatgaaaactgtgagctgaagattggagactttggcatggcccggggcctgtgcaccagccctgctgagcaccagtacttcatgacagaatatgtggccacccgctggtaccgggcccctgagctgatgctgagcctgcacgagtacacccaggccatcgacctgtggagcgtgggctgcatctttggagagatgctggcccggcggcagctgtttcctgggaagaactacgtgcaccagctgcagctgatcatgatggtgctgggcacccccagccctgctgtgatccaggccgtgggcgctgagcgggtgcgggcctacatccagagcctgcccccccggcagcctgtgccctgggagaccgtgtacccaggagctgaccggcaggccctgagcctgctgggccgcatgctgcgctttgagcccagcgcccgcatctctgctgctgctgccctgcggcaccccttcctggccaagtaccatgaccctgatgatgagccagactgtgcccccccatttgattttgcctttgaccgggaggccctgacccgggagcgcatcaaggaggccatcgtggccgagattgaggacttccacgcccggcgggagggcatccggcagcagatccgcttccagcccagcctgcagcctgtggccagcgagcccggctgcccagatgtggagatgcccagcccctgggcccccagcggggactgtgccatggagagccccccaccagcccccccaccctgccccggccctgccccagacaccatcgacctgaccctgcagcccccacctcctgtgtctgagcccgccccacccaagaaggatggagccatcagtgacaacaccaaggccgccctgaaggccgccctgctgaagagcctgcggagccggctgagagatggccccagcgcccccctggaggcccctgagcccaggaagcctgtgacagcccaggagcggcagcgggagcgggaggagaagagaagaagacggcaggagcgggccaaggagcgggagaagaggcggcaggagcgggagaggaaggagcggggggccggggccagcggcggccccagcacagaccccctggccggcctggtgctgagtgacaatgacaggagcctgctggagcgctggaccaggatggcccggcctgctgccccagccctgacctctgtgcctgccccagccccagcccccacccccacccccacccctgtgcagcccaccagccccccacctggccctgtggcccagcccaccggcccccagccccagagcgctggcagcaccagcggccctgtgccccagcctgcctgccccccacctggccctgccccccaccccaccggccccccaggccccatccctgtgcctgccccaccccagatcgccaccagcaccagcctgctggccgcccagagcctggtgcccccacctggcctgcccggcagcagcaccccaggagtgctgccctacttccccccaggcctgcccccaccagatgctggaggagccccccagagctccatgtctgagagcccagatgtgaacctggtgacccagcagctgagcaagagccaggtggaggaccccctgccccctgtgttcagcggcacccccaagggcagcggggccggctacggcgtgggctttgacctggaggagttcctgaaccagagctttgacatgggcgtggctgatggcccccaggacggccaggccgacagcgccagcctgagcgccagcctgctggccgactggctggagggccacggcatgaacccagctgacatcgagagcctgcagcgggagatccagatggacagccccatgctgctggccgacctgcctgacctgcaggacccctag

SEQ ID NO: 316911 - DNA, 2034 bp, Artificial Sequence
  derived and/or modified sequence
atggagagcgacctgcaccagatcatccacagcagccagcccctgaccctggaacacgtgcggtatttcctctatcagctccttcgcggtctcaagtatatgcatagtgcccaggttattcatagagaccttaagccgagcaatctcctggtgaatgagaattgcgagctgaaaatcggggacttcggcatggcacgtggactttgtacatccccagccgaacaccagtatttcatgacggagtatgtggccacacgatggtaccgggccccagagttgatgctctcattacatgagtacacacaggcaattgatctgtggtcagtgggctgtattttcggcgagatgctggcgagacgtcagctgtttcctggaaaaaactacgtgcaccagctccagttgataatgatggtgctggggactcccagtcctgcagtgatacaagcagtgggagcggagagggtccgtgcctacatccagtccttgcctcctcgccaacccgttccatgggaaacggtgtaccctggggccgatcgtcaggctctgagcttgcttggtcgcatgctcagatttgagcccagcgcgcgcatctcggcagccgctgcactccgacacccctttttggcaaagtaccacgacccagatgatgagccggactgtgccccaccattcgacttcgcatttgatcgggaagccttaaccagggagcgcataaaagaggcgatcgttgccgagatcgaagattttcatgccaggcgagagggcattcgccagcagatccggttccaaccctccttacagcctgtcgcatccgagccggggtgcccagatgtggaaatgccttcaccctgggcaccctcaggcgactgtgccatggaatcccctccacccgctccaccaccctgcccagggccggctcctgacacgatcgacctgacactccagcctcccccaccagtgtcggaacctgccccccccaagaaggatggcgccatctctgacaacactaaagcagcactgaaggcagcactcctcaaaagtctacgatcaaggttaagagacgggccatcggctccattggaggctcccgaaccgaggaaaccggtgacggcccaagaacgccagagagagcgggaggagaagcgcaggaggcggcaggagcgggctaaggaacgggagaagcgccgacaggaacgggaaagaaaagaacggggagcgggggcaagcggtggaccaagcacagatcctctggccgggttggttcttagcgacaacgaccgcagcctgctagagcgttggacacggatggcgagaccagctgcaccagcgctgacgagtgtgccggctcctgcacccgccccaacacccacccctacacctgttcagccgacgtcccctccacccggcccagtggctcagcctaccggaccccagccacagagcgccggtagtacctccgggccagttccccagcctgcctgtccaccccccggcccggcaccccacccaaccggtccgcctggaccaattccagtgccagcacccccacagattgcgacgtctacttcactcctggctgcccagtcactggttcccccgccaggcctgcctggtagctctaccccgggcgtgttgccttactttccacccggattgccaccgcctgatgccgggggggccccccaaagctccatgtcagagtcaccggacgtaaacctcgtgacacagcagctgtctaagtcccaggtcgaggatccactgccacccgtgttttccgggacccccaagggatccggggccggctacggtgtggggtttgacctggaggagtttctcaatcagtcctttgatatgggtgtggctgatggtccccaggacgggcaggctgactccgcgagcctgagcgccagtcttcttgccgactggctggaaggtcacggaatgaatcctgcagacatcgagtccttacaacgcgaaattcagatggactccccaatgctgctggccgatcttccagacctgcaggatccctag

SEQ ID NO: 316912 - DNA, 2034 bp, Artificial Sequence
  derived and/or modified sequence
atggagtctgacctgcaccagattatacactcatcacagccgctcacactggagcatgtccgatatttcctctaccaactcctgcgcggactgaagtacatgcactcagctcaggtgatccacagagatctgaagccatctaaccttctcgttaatgagaattgtgaactgaaaatcggagactttgggatggctaggggcctctgcactagccctgccgagcaccagtattttatgactgagtacgtagcaacgagatggtacagggccccagagcttatgctgagtcttcacgagtacacacaggccattgatctgtggagcgtgggatgcatctttggggagatgttagccaggcgtcaacttttccctggaaagaattatgtgcaccaactgcagcttattatgatggtgctgggcacccccagtccagcagttattcaggcagtgggagccgaaagggtgcgcgcttacatacaaagcttgcctcctcgacagcctgtgccctgggagaccgtttaccccggagccgaccgccaggctttatctttgttgggcagaatgttgcgctttgaaccgagcgccaggatctcggcggctgctgcgctgagacacccctttttggcaaagtaccacgatcccgacgacgaaccagattgcgctcctccattcgactttgcgtttgaccgggaggccttgaccagagaacgcatcaaagaagcgattgttgccgagatcgaggactttcatgctagaagagagggtatccggcagcagattcgatttcagcccagcctgcagcccgttgctagtgaacccggatgcccagatgtcgagatgcccagtccttgggctccatccggcgattgcgcaatggagtctccccctcccgcacccccaccttgtccaggcccagctcccgatacgatagacctcacactgcaaccaccccctccagtgtccgagcctgccccacccaagaaagatggcgctatctctgataacaccaaagctgccctgaaggctgcgttgctcaagtctctcaggagcagactccgcgatggcccttctgccccacttgaggcgccagagccaaggaagccagtgactgcccaggagaggcagagagagagagaggagaaacgacggcgacgacaggaacgagccaaagagagggagaagaggcggcaggagcgggaacgaaaagaacgaggagccggtgcttctggcggaccctcaacagaccctttggccggattggtgctctccgataacgataggtccctgctggagaggtggacaaggatggcaagacctgccgctccagccttaaccagtgtacctgcaccggcacccgctcctacccccacccccactccagtacagccaacctcacccccacccggtcccgtggcacagcctacaggtccccaacctcaaagtgctggatctactagcggaccagtgccgcagcctgcatgtcctcccccagggccagcaccacaccctacaggcccacctgggccaattccagtgccggcaccaccacagattgccacatcaacgagcttgttggcggctcagagcctcgtacctccgccaggcctgcctggctcttctacccccggagtgcttccctattttcctccgggactacctcctcccgatgccggaggcgcaccacagtcttccatgtcagagtctcccgacgttaatctggtcacacagcagctgagcaaaagccaggttgaggacccactcccacccgtgttctccggtactccaaagggcagcggtgccggatatggcgtaggcttcgacttggaagagtttttaaatcaaagcttcgatatgggcgtcgccgacgggccacaggacggccaggctgattcagcatccttaagtgccagcctgctcgctgattggcttgagggccatggcatgaatccggcagacatcgagagtctgcagcgcgaaatacagatggattcgcccatgctgcttgcagacctgccagatctgcaggatccatag

SEQ ID NO: 316913 - DNA, 2034 bp, Artificial Sequence
  derived and/or modified sequence
atggagagcgacctgcaccagatcatccacagcagccagcccctgaccctggagcacgtgagatacttcctgtaccagctgctgagaggcctgaagtacatgcacagcgcccaggtgatccacagagacctgaagcccagcaacctgctggtgaacgagaactgcgagctgaagatcggcgacttcggcatggccagaggcctgtgcaccagccccgccgagcaccagtacttcatgaccgagtacgtggccaccagatggtacagagcccccgagctgatgctgagcctgcacgagtacacccaggccatcgacctgtggagcgtgggctgcatcttcggcgagatgctggccagaagacagctgttccccggcaagaactacgtgcaccagctgcagctgatcatgatggtgctgggcacccccagccccgccgtgatccaggccgtgggcgccgagagagtgagagcctacatccagagcctgccccccagacagcccgtgccctgggagaccgtgtaccccggcgccgacagacaggccctgagcctgctgggcagaatgctgagattcgagcccagcgccagaatcagcgccgccgccgccctgagacaccccttcctggccaagtaccacgaccccgacgacgagcccgactgcgccccccccttcgacttcgccttcgacagagaggccctgaccagagagagaatcaaggaggccatcgtggccgagatcgaggacttccacgccagaagagagggcatcagacagcagatcagattccagcccagcctgcagcccgtggccagcgagcccggctgccccgacgtggagatgcccagcccctgggcccccagcggcgactgcgccatggagagccccccccccgccccccccccctgccccggccccgcccccgacaccatcgacctgaccctgcagccccccccccccgtgagcgagcccgccccccccaagaaggacggcgccatcagcgacaacaccaaggccgccctgaaggccgccctgctgaagagcctgagaagcagactgagagacggccccagcgcccccctggaggcccccgagcccagaaagcccgtgaccgcccaggagagacagagagagagagaggagaagagaagaagaagacaggagagagccaaggagagagagaagagaagacaggagagagagagaaaggagagaggcgccggcgccagcggcggccccagcaccgaccccctggccggcctggtgctgagcgacaacgacagaagcctgctggagagatggaccagaatggccagacccgccgcccccgccctgaccagcgtgcccgcccccgcccccgcccccacccccacccccacccccgtgcagcccaccagccccccccccggccccgtggcccagcccaccggcccccagccccagagcgccggcagcaccagcggccccgtgccccagcccgcctgccccccccccggccccgccccccaccccaccggcccccccggccccatccccgtgcccgcccccccccagatcgccaccagcaccagcctgctggccgcccagagcctggtgcccccccccggcctgcccggcagcagcacccccggcgtgctgccctacttcccccccggcctgcccccccccgacgccggcggcgccccccagagcagcatgagcgagagccccgacgtgaacctggtgacccagcagctgagcaagagccaggtggaggaccccctgccccccgtgttcagcggcacccccaagggcagcggcgccggctacggcgtgggcttcgacctggaggagttcctgaaccagagcttcgacatgggcgtggccgacggcccccaggacggccaggccgacagcgccagcctgagcgccagcctgctggccgactggctggagggccacggcatgaaccccgccgacatcgagagcctgcagagagagatccagatggacagccccatgctgctggccgacctgcccgacctgcaggacccctag

SEQ ID NO: 316914 - protein, 44 aa, Artificial Sequence
  derived and/or modified sequence
MFCVTPPELETKMNITKGGLVLFSANSNSSCMELSKKIAERLGV

SEQ ID NO: 316915 - DNA, 585 bp, Artificial Sequence
  derived and/or modified sequence
atgttctgcgttacaccccccgaactggaaacaaagatgaacattactaagggcggactggtgctgttttcagccaatagcaacagttcatgtatggagttgagtaaaaagatcgcagagcgattgggcgtggaaatgggaaaggtacaggtgtatcaggagccaaaccgcgagacccgggtgcaaattcaggaaagtgttcgcgggaaagacgtcttcattatccagaccgtttctaaggacgtcaataccaccatcatggagttgctgattatggtgtacgcctgtaaaacctcttgcgccaagtcaattatcggagtcattccatactttccttacagcaaacagtgcaaaatgcggaaaagagggtcaattgtctcgaaactactcgcttcgatgatgtgtaaagccgggctcacgcacctgatcaccatggatctccatcaaaaggaaatccagggcttctttaacattcccgtggataatctccgtgccagcccatttctgttgcaatacatccaggaggaaatcccagactatcgcaacgcggtgatcgtcgccaaaagccctgccagcgcaaaatag

SEQ ID NO: 316916 - DNA, 531 bp, Artificial Sequence
  derived and/or modified sequence
atgttttgcgtcaccccacccgaactagaaactaagatgaatatcaccaagggcggactcgtgctgttttctgctaacagtaactccagctgtatggagttatccaagaaaatagccgaacggctgggagtggagatgggcaaagtgcaggtctaccaggagccaaaccgagaaactcgggtgcaaatccaggagagcgttaggggcaaagatgtgttcataattcaaactgtgtctaaggacgtgaatactactatcatggaactgctaataatggtgtatgcctgtaaaacaagctgcgccaaaagtatcattggagtcatcccatacttcccttactctaaacagtgcaaaatgcggaagcgagggtcaattgtatcaaagctgcttgcatccatgatgtgtaaggcaggtcttacacatctaatcacgatggatctccaccaaaaggagatccaggggtttttcaatattcctgttgataatttgcgcgccagtccattcctccttcagtacatccaggaggagtag

SEQ ID NO: 316917 - DNA, 735 bp, Artificial Sequence
  derived and/or modified sequence
atgttttgcgtgaccccccccgagctggaaacaaaaatgaatattactaagggaggtcttgttctgttctctgccaattcgaactcctcatgtatggagcttagtaagaaaattgccgaacggctgggcgtggagatgggtaaagtgcaggtataccaagagcctaatcgtgagacgcgcgtccagatccaggagtcagtacgcggcaaagacgtgtttatcatccagacggtgtcaaaagatgtgaataccacgattatggaactgctcataatggtctacgcctgcaagactagctgtgccaaatctatcatcggcgtgatcccatacttcccctatagcaaacaatgtaagatgcggaaacgggggtccatcgtttccaagcttctggcttctatgatgtgcaaagcagggctcactcacttgatcaccatggaccttcatcagaaagaaattcaaggatttttcaatatacccgttgacaacctgcgggcatcaccctttctcctgcagtacatccaagaggaaattcccgactatagaaacgccgttatcgtcgccaagtctccggcgagcgcaaaaagggcccagagtttcgccgagaggctgcgactcgggatcgcagttattcacggcgaggcacaggatgccgagtctgatttggtggatggtagacattccccccccatggtgcgaagcgtcgctgccatccatcctagcctggagatcccctag

SEQ ID NO: 316918 - DNA, 135 bp, Artificial Sequence
  derived and/or modified sequence
atgttttgtgtgactcccccagaactcgaaaccaaaatgaatatcacaaaaggtggcctggtgctgttcagtgccaactctaacagcagctgtatggaactgtctaaaaagattgcagagaggctgggcgtttag

SEQ ID NO: 316919 - DNA, 423 bp, Artificial Sequence
  derived and/or modified sequence
atgttctgcgtgactcctccagaactggagaccaagatgaacatcactaaggggggtttggtactgttctccgccaattctaatagctcatgtatggagctgagtaagaagattgccgaacggcttggcgtggagatgggcaaggtccaggtctaccaggagcccaatagagagactagagtccagatccaggagagcgtgaggggcaaggacgtatttatcatccaaacagtcagtaaagacgtcaataccaccataatggagctccttattatggtctacgcgtgcaagacttcatgtgctaaatccatcatcggtgtcataccatactttccttatagcaagcagtgcaagatgaggaagcggggctcaattgtgtccaagttgctggccagcatgatgtgtaaagccgggctaacctag

SEQ ID NO: 316920 - DNA, 585 bp, Artificial Sequence
  derived and/or modified sequence
atgttctgtgtgaccccacctgagctggagaccaagatgaacatcaccaagggcggcctggtgctcttcagcgccaacagcaacagcagctgcatggagctgagcaagaagattgctgagcggctgggcgtggagatgggcaaggtgcaggtgtaccaggagcccaaccgggagaccagggtgcagatccaggagagcgtgcggggcaaggatgtgttcatcatccagacagtgtccaaggatgtgaacaccaccatcatggagctgctgatcatggtgtatgcctgcaagaccagctgtgccaagagcatcattggagtcatcccctacttcccctacagcaagcagtgcaagatgaggaagaggggcagcatcgtgtccaagctgctggcctccatgatgtgcaaggccggcctgacccacctgatcaccatggacctgcaccagaaggagatccagggcttcttcaacatccctgtggacaacctgcgggccagccccttcctgctgcagtacatccaggaggagatcccagactacagaaatgctgtgattgtggccaagagccctgccagcgccaagtag

SEQ ID NO: 316921 - DNA, 531 bp, Artificial Sequence
  derived and/or modified sequence
atgttctgtgtgaccccacctgagctggagaccaagatgaacatcaccaagggcggcctggtgctcttcagcgccaacagcaacagcagctgcatggagctgagcaagaagattgctgagcggctgggcgtggagatgggcaaggtgcaggtgtaccaggagcccaaccgggagaccagggtgcagatccaggagagcgtgcggggcaaggatgtgttcatcatccagacagtgtccaaggatgtgaacaccaccatcatggagctgctgatcatggtgtatgcctgcaagaccagctgtgccaagagcatcattggagtcatcccctacttcccctacagcaagcagtgcaagatgaggaagaggggcagcatcgtgtccaagctgctggcctccatgatgtgcaaggccggcctgacccacctgatcaccatggacctgcaccagaaggagatccagggcttcttcaacatccctgtggacaacctgcgggccagccccttcctgctgcagtacatccaggaggagtag

SEQ ID NO: 316922 - DNA, 735 bp, Artificial Sequence
  derived and/or modified sequence
atgttctgtgtgaccccacctgagctggagaccaagatgaacatcaccaagggcggcctggtgctcttcagcgccaacagcaacagcagctgcatggagctgagcaagaagattgctgagcggctgggcgtggagatgggcaaggtgcaggtgtaccaggagcccaaccgggagaccagggtgcagatccaggagagcgtgcggggcaaggatgtgttcatcatccagacagtgtccaaggatgtgaacaccaccatcatggagctgctgatcatggtgtatgcctgcaagaccagctgtgccaagagcatcattggagtcatcccctacttcccctacagcaagcagtgcaagatgaggaagaggggcagcatcgtgtccaagctgctggcctccatgatgtgcaaggccggcctgacccacctgatcaccatggacctgcaccagaaggagatccagggcttcttcaacatccctgtggacaacctgcgggccagccccttcctgctgcagtacatccaggaggagatcccagactacagaaatgctgtgattgtggccaagagccctgccagcgccaagagggcccagagctttgctgagcggctgcggctgggcattgctgtgattcatggagaggcccaggatgctgagagtgacctggtggatggccgccacagcccccccatggtgcgctctgtggccgccatccaccccagcctggagatcccctag

SEQ ID NO: 316923 - DNA, 135 bp, Artificial Sequence
  derived and/or modified sequence
atgttctgtgtgaccccacctgagctggagaccaagatgaacatcaccaagggcggcctggtgctcttcagcgccaacagcaacagcagctgcatggagctgagcaagaagattgctgagcggctgggcgtgtag

SEQ ID NO: 316924 - DNA, 423 bp, Artificial Sequence
  derived and/or modified sequence
atgttctgtgtgaccccacctgagctggagaccaagatgaacatcaccaagggcggcctggtgctcttcagcgccaacagcaacagcagctgcatggagctgagcaagaagattgctgagcggctgggcgtggagatgggcaaggtgcaggtgtaccaggagcccaaccgggagaccagggtgcagatccaggagagcgtgcggggcaaggatgtgttcatcatccagacagtgtccaaggatgtgaacaccaccatcatggagctgctgatcatggtgtatgcctgcaagaccagctgtgccaagagcatcattggagtcatcccctacttcccctacagcaagcagtgcaagatgaggaagaggggcagcatcgtgtccaagctgctggcctccatgatgtgcaaggccggcctgacctag

SEQ ID NO: 316925 - DNA, 585 bp, Artificial Sequence
  derived and/or modified sequence
atgttctgcgtgaccccccccgagctggagaccaagatgaacatcacaaaagggggattagttctgttttcagccaattctaattccagctgcatggagctttctaagaaaattgccgaaaggctgggggtggaaatgggcaaagtgcaggtgtatcaagaacctaaccgtgaaacccgcgtgcaaatccaggaatctgtacgggggaaagatgtgttcattattcagaccgtgagcaaggatgtcaacacaacgattatggaactgctgatcatggtgtacgcctgcaagaccagctgtgcgaagagtattatcggcgtgatcccttatttcccatacagtaaacaatgcaagatgagaaaaagaggtagcattgtaagcaaactgttggcttccatgatgtgtaaggccggcttaactcatctcataaccatggacctgcatcagaaggaaattcaagggttttttaatattcctgtggataaccttagagcgtcaccctttctgctccagtatatccaggaggagattcctgactacagaaacgccgttatcgtggccaagtcacctgccagtgcaaaatag

SEQ ID NO: 316926 - DNA, 531 bp, Artificial Sequence
  derived and/or modified sequence
atgttctgcgtgaccccccccgagctggagaccaagatgaacatcaccaaaggaggtctggtgctgttctccgctaactcaaactcctcgtgcatggagttgtctaagaagattgccgaaaggcttggcgtggaaatgggtaaggtccaggtatatcaggaaccgaatcgagagaccagagttcagattcaggaatctgtgaggggaaaagatgtcttcatcatacaaaccgtgagcaaggatgttaatacaacgattatggaactgctcataatggtgtatgcctgtaaaacaagttgtgcaaagtccatcattggtgttatcccctacttcccgtactccaagcaatgcaaaatgagaaaaaggggctccatcgtgtccaagttgctggcctccatgatgtgtaaggccgggttgacccatctgattactatggatctgcatcagaaggaaatccaaggcttttttaacattcccgttgacaaccttagggcaagtccattcctgctgcagtatatccaggaagagtag

SEQ ID NO: 316927 - DNA, 735 bp, Artificial Sequence
  derived and/or modified sequence
atgttctgcgtgaccccccccgagctggagaccaagatgaacatcaccaaaggtggtcttgtgttgtttagtgcaaatagcaactcgtcctgtatggagttatctaagaagattgccgaacgactgggtgttgaaatgggaaaagtgcaggtgtaccaagaacccaacagagagacccgtgtgcaaattcaggaaagcgtgcggggcaaggacgtcttcattattcagacagtcagcaaggatgtgaatactacaataatggagctgctcatcatggtgtatgcgtgcaagacgtcttgtgccaagagcatcataggcgttattccttacttcccgtactccaaacagtgtaagatgagaaaacggggatctattgtttcgaagttactggcgtcaatgatgtgcaaggctggtctgacacacctaatcacaatggacttacaccagaaggagatccagggcttctttaatataccagtagataacttgagagcctcaccttttctgcttcagtacattcaggaagagatccccgactataggaacgcagtgattgtggctaagagtcccgcgtctgccaaacgcgcacaatcctttgctgagcgactacgtctgggcatagcggtgattcatggcgaggcccaggatgctgaaagcgatttggtagatgggaggcactccccgccaatggtaagaagcgtcgctgcaatccatccgtccctcgagattccctag

SEQ ID NO: 316928 - DNA, 135 bp, Artificial Sequence
  derived and/or modified sequence
atgttctgcgtgaccccccccgagctggagaccaagatgaacatcactaagggggggctcgtactcttcagcgccaatagcaacagcagctgcatggagctttccaagaagatcgcagagcggctgggcgtatag

SEQ ID NO: 316929 - DNA, 423 bp, Artificial Sequence
  derived and/or modified sequence
atgttctgcgtgaccccccccgagctggagaccaagatgaacatcacaaaaggtggcctggtgctgtttagcgctaattctaatagctcatgtatggaattgtccaaaaagattgccgagaggctgggggtagaaatgggaaaagtgcaggtatatcaagaaccaaacagggaaactagggtccagatccaggagtctgtccgaggcaaggatgtcttcattattcaaactgtgagcaaggacgttaataccaccatcatggaactgctgatcatggtatatgcatgtaaaacaagctgcgccaaatccatcattggggttattccatacttcccctactccaagcagtgtaaaatgaggaagcggggaagcatagtgtctaaactacttgccagcatgatgtgcaaggccggcctgacttag

SEQ ID NO: 316930 - DNA, 787 bp, Artificial Sequence
  derived and/or modified sequence
gccagccacagcagagaggtgggggttgtgaccggagttagatgccagcgcagaagggacgtgagcccagccgaggaggaattttgttgtcagagaataaaaggaggttgtccataattgactttaagcagcaatcagtaaaacattgagctcttcagctccgcctttcttgctctgaaaattggaaaaccaagaaggttttgatgttttgtgtgacgccacctgaattagaaaccaagatgaacataaccaaaggtggtctggtgttgttttcagcaaactcgaattcatcatgtatggagctatcaaagaaaattgcagagcggctaggggtggagatgggcaaagtgcaggtttaccaggaacctaacagagaaacaagagtacaaattcaagagtctgtgaggggaaaagatgttttcatcatccaaactgtttcgaaggacgtgaacaccaccatcatggagctcctgatcatggtgtatgcatgtaagacctcttgtgccaagagcatcattggcgtgataccctactttccttacagcaagcagtgcaagatgagaaaaagaggctccattgtctctaaattgctggcttccatgatgtgcaaagctggtctaactcatcttattactatggatttacaccagaaggaaattcagggcttcttcaatattcctgttgacaatttaagagcatctcccttcttattacagtatattcaagaagagatcccagattacaggaatgcagtaatcgtggccaagtctccagcctcggcgaagag

SEQ ID NO: 316931 - DNA, 883 bp, Artificial Sequence
  derived and/or modified sequence
ttttgctcctagagaggccgccaggagacccggcgctttcttccttctgcagctgaggctgcggcggggccggggctggggtcggggccagaattcagcggggtgccaagtcgttttctgtgtgggttgagagacaggctgtgcagcccactgttgcataggactaactactacaaatcatgctgagaccgagctatttttgctgcttagaggctttgcagccttgagaggaattttgttgtcagagaataaaaggaggttgtccataattgactttaagcagcaatcagtaaaacattgagctcttcagctccgcctttcttgctctgaaaattggaaaaccaagaaggttttgatgttttgtgtgacgccacctgaattagaaaccaagatgaacataaccaaaggtggtctggtgttgttttcagcaaactcgaattcatcatgtatggagctatcaaagaaaattgcagagcggctaggggtggagatgggcaaagtgcaggtttaccaggaacctaacagagaaacaagagtacaaattcaagagtctgtgaggggaaaagatgttttcatcatccaaactgtttcgaaggacgtgaacaccaccatcatggagctcctgatcatggtgtatgcatgtaagacctcttgtgccaagagcatcattggcgtgataccctactttccttacagcaagcagtgcaagatgagaaaaagaggctccattgtctctaaattgctggcttccatgatgtgcaaagctggtctaactcatcttattactatggatttacaccagaaggaaattcagggcttcttcaatattcctgttgacaatttaagagcatctcccttcttattacagtatattcaagaagag

SEQ ID NO: 316932 - DNA, 1038 bp, Artificial Sequence
  derived and/or modified sequence
agtctctgctgcctggaccttaaattctgatggggaaatctttttaccaaggttatatctcttgtctggaaggtaaaggctgaggcccagcaaggacaagtgatgtccacatggcctagtagctggaaggcaaacccaactcttcacactcctacttcagccatctttaagtagaaggaggaattttgttgtcagagaataaaaggaggttgtccataattgactttaagcagcaatcagtaaaacattgagctcttcagctccgcctttcttgctctgaaaattggaaaaccaagaaggttttgatgttttgtgtgacgccacctgaattagaaaccaagatgaacataaccaaaggtggtctggtgttgttttcagcaaactcgaattcatcatgtatggagctatcaaagaaaattgcagagcggctaggggtggagatgggcaaagtgcaggtttaccaggaacctaacagagaaacaagagtacaaattcaagagtctgtgaggggaaaagatgttttcatcatccaaactgtttcgaaggacgtgaacaccaccatcatggagctcctgatcatggtgtatgcatgtaagacctcttgtgccaagagcatcattggcgtgataccctactttccttacagcaagcagtgcaagatgagaaaaagaggctccattgtctctaaattgctggcttccatgatgtgcaaagctggtctaactcatcttattactatggatttacaccagaaggaaattcagggcttcttcaatattcctgttgacaatttaagagcatctcccttcttattacagtatattcaagaagagatcccagattacaggaatgcagtaatcgtggccaagtctccagcctcggcgaagagggcacagtcttttgctgagcgcctgcgcctgggaattgcagtgattcatggagaggcgcaggatgccgagtcggacttggtggatggacggcattccccacccatggtcagaagtgtggctgccatccaccccagcctggagatcccca

SEQ ID NO: 316933 - DNA, 325 bp, Artificial Sequence
  derived and/or modified sequence
aagaggaatcaattttggtatgcagataatcactgggctcatgggtcttgctctttacaaagaggaggaattttgttgtcagagaataaaaggaggttgtccataattgactttaagcagcaatcagtaaaacattgagctcttcagctccgcctttcttgctctgaaaattggaaaaccaagaaggttttgatgttttgtgtgacgccacctgaattagaaaccaagatgaacataaccaaaggtggtctggtgttgttttcagcaaactcgaattcatcatgtatggagctatcaaagaaaattgcagagcggctaggggtgg

SEQ ID NO: 316934 - DNA, 700 bp, Artificial Sequence
  derived and/or modified sequence
atctacatgaagaattacagcaagacatgcaaaagtttaagaatgaggtcaacacattagaagaagagttcctggctttgaagaaagaaaatgttcaacttcataaagaggttgaagaagaaatggagaagcacagaagtaatagcacagaattatcaggaaccctaactgatggtactactgttggcaatgatgatgatggactaaatcagcagattcctaggaaggaaaatgaagagcatgacaggctctgaaaattggaaaaccaagaaggttttgatgttttgtgtgacgccacctgaattagaaaccaagatgaacataaccaaaggtggtctggtgttgttttcagcaaactcgaattcatcatgtatggagctatcaaagaaaattgcagagcggctaggggtggagatgggcaaagtgcaggtttaccaggaacctaacagagaaacaagagtacaaattcaagagtctgtgaggggaaaagatgttttcatcatccaaactgtttcgaaggacgtgaacaccaccatcatggagctcctgatcatggtgtatgcatgtaagacctcttgtgccaagagcatcattggcgtgataccctactttccttacagcaagcagtgcaagatgagaaaaagaggctccattgtctctaaattgctggcttccatgatgtgcaaagctggtctaactc

SEQ ID NO: 316935 - DNA, 585 bp, Artificial Sequence
  derived and/or modified sequence
atgttttgtgtgacccctccggaattggaaactaagatgaacatcacaaaaggtggcttagtcttgttcagtgccaactcaaactcttcctgcatggaactgtcaaaaaaaatagcagaaaggctaggagtggaaatgggcaaagtccaagtgtaccaggaacctaaccgagagaccagagttcagatccaggaatcagtgcgtggaaaagatgtattcataatccagactgtatctaaggatgtcaacacaacgattatggagcttctcattatggtgtacgcctgtaaaacttcttgtgctaaaagcattatcggtgtaataccctatttcccctatagcaagcagtgtaagatgcggaaaagaggttctatcgtatccaagctacttgcaagtatgatgtgcaaggctggcctcacccacctcatcacaatggatctgcatcaaaaagaaatccagggattctttaacatacctgtggataatcttagggcaagcccctttctgttacagtatattcaagaggaaataccagattacagaaacgcagtcattgtggctaagtcccccgcaagtgcaaaatag

SEQ ID NO: 316936 - DNA, 531 bp, Artificial Sequence
  derived and/or modified sequence
atgttctgcgtaactcctccagagcttgaaaccaagatgaatatcaccaaaggaggactggtgctgtttagcgccaacagcaattccagctgcatggaactcagtaaaaaaatcgccgagaggctaggggtggaaatgggcaaggttcaggtttaccaggaacccaaccgcgagacacgggtgcagatccaggagagcgtccggggtaaagacgtgttcattatccagacggtcagtaaggacgtaaatacgaccatcatggagcttctcattatggtttacgcctgcaagacctcatgcgccaagtcgatcatcggcgtgattccgtacttcccttattcaaaacaatgtaagatgagaaagcgaggcagtattgtgagcaagcttctggcatcaatgatgtgcaaagcgggtctgacacaccttatcacaatggacttacatcaaaaggagatccaaggcttcttcaacatcccagtcgataacttgagagctagcccttttcttctccagtatattcaggaggagtag

SEQ ID NO: 316937 - DNA, 735 bp, Artificial Sequence
  derived and/or modified sequence
atgttctgcgtaacacctcccgagctagaaactaagatgaacatcacaaagggagggctcgtgctctttagcgccaattcaaattcatcctgcatggagctgtcaaagaagattgcggagagactgggcgtggaaatgggtaaggtgcaggtgtaccaggaaccaaaccgggagacccgggtccagattcaggaatctgtgagggggaaggatgtgtttatcattcagaccgtatccaaagacgtcaataccaccatcatggagctgttgatcatggtgtacgcctgcaagacaagttgcgctaaaagtattataggcgtgattccgtactttccgtattccaagcagtgcaagatgaggaagcgagggtcaatagtgtctaaactgttggcttctatgatgtgcaaagcgggtctcacacatctgatcacgatggacctccatcagaaagagatccaaggattttttaatatcccagtggataatctccgggcatctccattccttctgcagtatattcaagaagaaattcctgattaccggaatgccgttatcgtggctaaatcacccgcttccgccaagagagcacagtccttcgctgagagacttcggctgggtatcgccgttattcatggggaggctcaggacgccgagtccgacctggtcgacgggagacattctccccctatggtcagatcggtcgctgcgatccaccccagtctggagatcccttag

SEQ ID NO: 316938 - DNA, 135 bp, Artificial Sequence
  derived and/or modified sequence
atgttctgcgtcaccccccctgagcttgagacaaagatgaacatcactaaaggcggactggtcctatttagcgctaattcgaattcgtcttgcatggagctgtctaagaaaattgccgagcgcctcggggtttag

SEQ ID NO: 316939 - DNA, 423 bp, Artificial Sequence
  derived and/or modified sequence
atgttctgtgtgacccctccagaacttgagactaaaatgaatatcacaaaaggtgggctggttctgtttagcgctaattctaattcaagctgcatggagttgtccaaaaaaattgctgagcgactgggtgtggagatgggaaaagtgcaggtgtatcaggagcccaacagagagacccgggtgcaaatacaggaatcagtgaggggaaaagatgtcttcattatccagaccgtctcaaaagacgtgaatactaccattatggagctgttaatcatggtttatgcctgtaagacatcttgcgccaagtccattatcggggtgatcccttactttccctatagtaagcagtgtaagatgcgcaagcggggaagtatcgtctcaaagcttctagcatcaatgatgtgcaaggccggtttgacatag

SEQ ID NO: 316940 - DNA, 585 bp, Artificial Sequence
  derived and/or modified sequence
atgttctgcgtgaccccccccgagctggagaccaagatgaacatcaccaagggcggcctggtgctgttcagcgccaacagcaacagcagctgcatggagctgagcaagaagatcgccgagagactgggcgtggagatgggcaaggtgcaggtgtaccaggagcccaacagagagaccagagtgcagatccaggagagcgtgagaggcaaggacgtgttcatcatccagaccgtgagcaaggacgtgaacaccaccatcatggagctgctgatcatggtgtacgcctgcaagaccagctgcgccaagagcatcatcggcgtgatcccctacttcccctacagcaagcagtgcaagatgagaaagagaggcagcatcgtgagcaagctgctggccagcatgatgtgcaaggccggcctgacccacctgatcaccatggacctgcaccagaaggagatccagggcttcttcaacatccccgtggacaacctgagagccagccccttcctgctgcagtacatccaggaggagatccccgactacagaaacgccgtgatcgtggccaagagccccgccagcgccaagtag

SEQ ID NO: 316941 - DNA, 531 bp, Artificial Sequence
  derived and/or modified sequence
atgttctgcgtgaccccccccgagctggagaccaagatgaacatcaccaagggcggcctggtgctgttcagcgccaacagcaacagcagctgcatggagctgagcaagaagatcgccgagagactgggcgtggagatgggcaaggtgcaggtgtaccaggagcccaacagagagaccagagtgcagatccaggagagcgtgagaggcaaggacgtgttcatcatccagaccgtgagcaaggacgtgaacaccaccatcatggagctgctgatcatggtgtacgcctgcaagaccagctgcgccaagagcatcatcggcgtgatcccctacttcccctacagcaagcagtgcaagatgagaaagagaggcagcatcgtgagcaagctgctggccagcatgatgtgcaaggccggcctgacccacctgatcaccatggacctgcaccagaaggagatccagggcttcttcaacatccccgtggacaacctgagagccagccccttcctgctgcagtacatccaggaggagtag

SEQ ID NO: 316942 - DNA, 735 bp, Artificial Sequence
  derived and/or modified sequence
atgttctgcgtgaccccccccgagctggagaccaagatgaacatcaccaagggcggcctggtgctgttcagcgccaacagcaacagcagctgcatggagctgagcaagaagatcgccgagagactgggcgtggagatgggcaaggtgcaggtgtaccaggagcccaacagagagaccagagtgcagatccaggagagcgtgagaggcaaggacgtgttcatcatccagaccgtgagcaaggacgtgaacaccaccatcatggagctgctgatcatggtgtacgcctgcaagaccagctgcgccaagagcatcatcggcgtgatcccctacttcccctacagcaagcagtgcaagatgagaaagagaggcagcatcgtgagcaagctgctggccagcatgatgtgcaaggccggcctgacccacctgatcaccatggacctgcaccagaaggagatccagggcttcttcaacatccccgtggacaacctgagagccagccccttcctgctgcagtacatccaggaggagatccccgactacagaaacgccgtgatcgtggccaagagccccgccagcgccaagagagcccagagcttcgccgagagactgagactgggcatcgccgtgatccacggcgaggcccaggacgccgagagcgacctggtggacggcagacacagcccccccatggtgagaagcgtggccgccatccaccccagcctggagatcccctag

SEQ ID NO: 316943 - DNA, 135 bp, Artificial Sequence
  derived and/or modified sequence
atgttctgcgtgaccccccccgagctggagaccaagatgaacatcaccaagggcggcctggtgctgttcagcgccaacagcaacagcagctgcatggagctgagcaagaagatcgccgagagactgggcgtgtag

SEQ ID NO: 316944 - DNA, 423 bp, Artificial Sequence
  derived and/or modified sequence
atgttctgcgtgaccccccccgagctggagaccaagatgaacatcaccaagggcggcctggtgctgttcagcgccaacagcaacagcagctgcatggagctgagcaagaagatcgccgagagactgggcgtggagatgggcaaggtgcaggtgtaccaggagcccaacagagagaccagagtgcagatccaggagagcgtgagaggcaaggacgtgttcatcatccagaccgtgagcaaggacgtgaacaccaccatcatggagctgctgatcatggtgtacgcctgcaagaccagctgcgccaagagcatcatcggcgtgatcccctacttcccctacagcaagcagtgcaagatgagaaagagaggcagcatcgtgagcaagctgctggccagcatgatgtgcaaggccggcctgacctag

SEQ ID NO: 316945 - DNA, 473 bp, Artificial Sequence
  derived and/or modified sequence
gaacaaactttctttgcaggattgggtcaaccatggggtctgatttggagatgcttcccttctctgtcagctgctcatgtctcaaatgaagagccttttgtgatgaccatgtatggaatagtgtctgaagtaccactgcactgtacctgtctttgcgtctaaacatcactaccatcatcacgggacaaaccgcccatctcagtggtgtctggcagtgagctgaacatggcaacccgtgtgtgtctcatcccagaaagagaagactttaaccactgtgatgcctgagaatccaagacagagtctcactgcgttgcccaggctggtcttgaactcttggactcaagcaatcctcccaccttggcctcccaaagagcaggaattacaggtgtgacgtttctccagatacttcatgctgttcacctgtgtcctcgccgcaccactgccgcacacgactcctgaaccatgggggaaaa

SEQ ID NO: 316946 - DNA, 552 bp, Artificial Sequence
  derived and/or modified sequence
cgttttccccttccatctactttgtccccaaccctctccccgagtctcttcctttccccgacccgggagcgtccgggacgcggagcccggagctggggcgacgaggcgattgcgggggcctgggctagctgctggctaccaatattctactttctgtctctatgaatgtgactaccctggttacctcatatagatggagtctcactatggtgcctactctgattttgaactcctggcttcaagcaatcctcccaccttggccttccaaagtgctgggattacagaatctccctggaaaaggagacatgaatgtctgcaatgatacttcctgacaagaagttgatacaagaaaaggaaaggagattaacagctagtgagcagaatttcgaacagcaggatttcgtattttttgcttccaactgcacacttccgttgcccacttttaaatcagagatacctacactcaaaacccagacaaggcaaaaggatacttttcttgtatattttttgagatcgaagaaacgacaatgtccaggaaacagaaccagaagg

SEQ ID NO: 316947 - protein, 340 aa, Artificial Sequence
  derived and/or modified sequence
MCAQYCISFADVEKAHINIRDSIHLTPVLTSSILNQLTGRNLFFKCELFQKTGSFKIRGALNAVRSLVPDALERKPKAVVTHSSGNHGQALTYAAKLEGIPAYIVVPQTAPDCKKLAIQAYGASIVYCEPSDESRENVAKRVTEETEGIMVHPNQEPAVIAGQGTIALEVLNQVPLVDALVVPVGGGGMLAGIAITVKALKPSVKVYAAEPSNADDCYQSKLKGKLMPNLYPPETIADGVKSSIGLNTWPIIRDLVDDIFTVTEDEIKCATQLVWERMKLLIEPTAGVGVAAVLSQHFQTVSPEVKNICIVLSGGNVDLTSSITWVKQAERPASYQSVSV

SEQ ID NO: 316948 - DNA, 1023 bp, Artificial Sequence
  derived and/or modified sequence
atgtgtgctcaatactgtatcagcttcgcagacgtggaaaaagcacacattaacattagagatagcattcacctcactcctgtattgacctctagcatcctgaatcagctgaccggacgtaatctatttttcaagtgcgagctctttcagaagaccggctccttcaagattaggggtgcccttaacgcagtcaggtcactggtccctgatgctctcgaacgaaaaccaaaagcagtggtgactcactcttcgggcaaccacggacaagcgctaacgtacgccgccaaactggaaggcattcccgcctacatcgttgtcccgcagaccgccccagactgcaaaaaactcgcaatccaagcgtatggggcgagtattgtgtactgcgaaccgtcagacgagagcagagaaaacgtggctaaacgtgtgacagaagaaactgaaggcataatggtgcaccccaaccaagagccggccgttatcgccggccaaggcaccattgcgctggaggtgctgaaccaggtgcctctcgtggacgcgttggtggtccccgttgggggcgggggcatgctggccggcattgcgataaccgttaaagccctgaagccttctgttaaggtttacgctgccgagcctagcaacgccgacgactgttatcagtccaaactaaagggcaagctgatgcctaacctctacccccctgagacaatcgcggatggagtgaagagttccattgggctaaacacatggcctattatccgagatctggtcgatgatattttcacagtgaccgaggacgagatcaaatgcgccacacagcttgtgtgggaaaggatgaagctgttgattgagccaactgctggtgttggggtcgccgctgtcttgtcgcagcacttccagacagtcagtccagaggtcaaaaacatctgcatagtgttgtcaggagggaacgtcgatcttacatcttcaatcacttgggtgaagcaagccgagcgccccgctagttaccagtctgtctcagtatag

SEQ ID NO: 316949 - DNA, 1023 bp, Artificial Sequence
  derived and/or modified sequence
atgtgtgcccagtactgcatcagctttgctgatgtggagaaggcccacatcaacatccgggacagcatccacctgacccctgtgctgaccagcagcatcctgaaccagctgaccggcaggaacctcttcttcaagtgtgagctgttccagaagacaggcagcttcaagatccggggggccctgaatgctgtgcgcagcctggtgcctgatgccctggagaggaagcccaaggctgtggtgacccacagcagcggcaaccacggccaggccctgacctacgccgccaagctggagggcatcccagcctacatcgtggtgccccagacagccccagactgcaagaagctggccatccaggcctatggagccagcatcgtgtactgtgagcccagtgatgagagccgggagaatgtggccaagagggtgacagaggagacagagggcatcatggtgcaccccaaccaggagcctgctgtgattgctggccagggcaccatcgccctggaggtgctgaaccaggtgcccctggtggatgccctggtggtgcctgtgggcggcggcggcatgctggccggcatcgccatcaccgtgaaggccctgaagcccagcgtgaaggtgtatgctgctgagcccagcaatgctgatgactgctaccagagcaagctgaagggcaagctgatgcccaacctgtacccacctgagaccatcgcagatggagtgaagagcagcatcggcctgaacacctggcccatcatccgggacctggtggatgacatcttcaccgtgacagaagatgagatcaagtgtgccacccagctggtgtgggagaggatgaagctgctgattgagcccacagctggggtgggcgtggccgctgtgctgagccagcacttccagacagtgtccccagaggtgaagaacatctgcatcgtgctgagcggcggcaatgtggacctgaccagcagcatcacctgggtgaagcaggccgagaggcctgccagctaccagagcgtgtctgtgtag

SEQ ID NO: 316950 - DNA, 1023 bp, Artificial Sequence
  derived and/or modified sequence
atgtgcgcccagtactgcatcagcttcgccgacgtggagaaggcccatatcaatatccgcgattccattcacctcaccccagttctgacctccagtatcctcaatcagcttaccggcagaaaccttttttttaaatgtgaattattccagaaaacgggcagcttcaaaataagaggtgctcttaatgccgtccgcagtttggtgccagatgctttagagcgcaagcccaaagccgtcgtaacccacagttccggcaatcacggacaagcactgacctacgccgcaaaattggagggcattccggcttatattgtggtgcctcagactgcgcctgattgcaagaaactagctattcaagcctacggtgcaagtatagtttattgcgaaccctctgacgaatcacgcgagaacgttgccaaacgagttactgaagagaccgagggcatcatggtccacccaaaccaggagcctgctgtgattgccggccaagggacgatcgcgttggaggtgctgaatcaggtcccattggtggatgccctggttgtgcccgtcggagggggggggatgctggctggcattgcaatcacagtgaaggccctcaaaccttcagtgaaggtgtacgccgctgagcccagcaacgccgatgattgctaccagagtaagttgaagggcaagctaatgcccaacctgtaccctcccgagacaatcgcagacggtgtaaagtcgagcatcggcctgaacacttggcctatcatccgcgacctggtggacgacatatttacagtgacagaagatgaaattaaatgtgccacccagttggtctgggagcgtatgaaactgctgatcgagcccacagcaggagtgggtgttgctgccgtgctcagccaacattttcagacagtatctcccgaggtgaaaaacatttgtattgttttgtctggtggcaacgtggatctgacatctagtataacctgggtgaaacaggccgagagacccgccagttaccagagcgtgtcggtctag

SEQ ID NO: 316951 - DNA, 1023 bp, Artificial Sequence
  derived and/or modified sequence
atgtgtgcccaatactgcatatcatttgcggatgtggagaaggcccatattaatatcagggatagtatccacttgacacccgtgctgacatcaagcatcctgaaccagttgaccggacgtaatctcttttttaagtgcgaactgtttcagaaaaccgggtcctttaagatcaggggcgctcttaatgcagtgagatccctagtgcccgacgcccttgagcgaaagccaaaggcggtagttacgcattcctccggcaatcacgggcaggcccttacctacgcagctaaactggaaggcatcccggcttacatcgtcgtaccccaaaccgcacctgattgtaagaaactggcgattcaggcatacggcgctagcattgtttattgtgagccatccgacgagtctagagaaaatgttgctaagcgggtgacagaagaaacggaaggtatcatggtgcacccaaaccaggagcccgctgtcatagccggtcaaggtacaattgccctcgaggttctgaaccaagtccccttggtcgatgcccttgtcgtgccagtaggcggagggggaatgctggccggaattgccattactgtgaaggctctgaaaccgagtgtgaaggtgtacgcagccgagccttccaacgcagatgactgctaccagtctaaattgaaggggaaactcatgcccaacctgtacccacctgagacaattgcagatggtgtgaaatccagcatcggcctcaacacgtggcctataatcagggacctggtggacgacatattcaccgttactgaagacgagatcaagtgcgctacacaactggtctgggaaagaatgaaactgttgatagagccaacagccggtgtgggagtggccgcagttctcagccaacattttcaaacagtctcgccagaagttaagaacatttgcatcgttctttccggaggcaatgtcgatctgacaagctctataacctgggtcaaacaagccgaacgcccagcttcttaccagtcagtttcggtgtag

SEQ ID NO: 316952 - DNA, 2478 bp, Artificial Sequence
  derived and/or modified sequence
gcagaggtgcggccggggaggcgcgcggaggctggagctggaggcgcggcgccggtgagctgagaaccatgtgtgctcagtattgcatctcctttgctgatgttgaaaaagctcatatcaacattcgagattctatccacctcacaccagtgctaacaagctccattttgaatcaactaacagggcgcaatcttttcttcaaatgtgaactcttccagaaaacaggatcttttaagattcgtggtgctctcaatgccgtcagaagcttggttcctgatgctttagaaaggaagccgaaagctgttgttactcacagcagtggaaaccatggccaggctctcacctatgctgccaaattggaaggaattcctgcttatattgtggtgccccagacagctccagactgtaaaaaacttgcaatacaagcctacggagcgtcaattgtatactgtgaacctagtgatgagtccagagaaaatgttgcaaaaagagttacagaagaaacagaaggcatcatggtacatcccaaccaggagcctgcagtgatagctggacaagggacaattgccctggaagtgctgaaccaggttcctttggtggatgcactggtggtacctgtaggtggaggaggaatgcttgctggaatagcaattacagttaaggctctgaaacctagtgtgaaggtatatgctgctgaaccctcaaatgcagatgactgctaccagtccaagctgaaggggaaactgatgcccaatctttatcctccagaaaccatagcagatggtgtcaaatccagcattggcttgaacacctggcctattatcagggaccttgtggatgatatcttcactgtcacagaggatgaaattaagtgtgcaacccagctggtgtgggagaggatgaaactactcattgaacctacagctggtgttggagtggctgctgtgctgtctcaacattttcaaactgtttccccagaagtaaagaacatttgtattgtgctcagtggtggaaatgtagacttaacctcctccataacttgggtgaagcaggctgaaaggccagcttcttatcagtctgtttctgtttaatttacagaaaaggaaatggtgggaattcagtgtctttagatactgaagacattttgtttcctagtattgtcaactcttagttatcagattcttaatggagagtggctatttcattaagatttaatagttttttttggactaagtagtggaaaaacttttatacttaactgagacattttgtcaaggctaaaaaaaagtcttgcaaaatggggcagtggactgacaggctgacatagaaaataaactttgcccaatcacaacttgtgcctcccatccctggagtactgactggcaccggtaagacagaatctctttgaatccattactccatgcccccttgaggcactgttgaagaaatctcacttttcagccagggtactggttctggtacatatggatcataagtccatttggggaagactcgtttatacaggttcatcagtactgtgtcttgagattttagcttcccatcaaagctgcatttcatgtggccatgggtacctagaaagacatcagaacaagtcggtcaaattaaaagtagaaaattttaaagcaatgacttccaacccaacagtcatttagcaacactgcagaaatgcagacatggtctcaaatcccgtgtttccttacctaaaggttccttgatatgtcctctccggccccacttcgttctcagttccactggtttaaaccacagcacatcctcttagaatcaaacacattaaagaccaagatgaaacatttacccacaaaatgtaaacccaacctttataccacaaaggcaatcagatcccatcctcctccttcatacccacctctgttgaagaacatgtaacgtactactgccatcttagtaaaaattttgaaaggatgaccactcagaacaactctcttgatgaccattctgtctggatctactgacataagatggcctgtagcaatgaggctgtgcattcctaaaggacaaaagcaaagaagctatttaggaatttacaggccaaagtcttcatttattgcccagtccatttaaagacccatgcaagagcctggtttgtcatccctgccctagcccaatctgaggctaagattggtaaactgtaagcccacacttaaccttgtcaataggttcttgaaaacttgtacttcaagagaaatgatgtataacaaaaccatactttttctcatcagttgttacaaggaaaggatgttgaacaaaaggcagttatttgaggactggctatacactgtttcacgtaaaagttggagttttcattgttctattaacaatgttaaatgaagacttactgtattttgaaaaccatcattaccttctccataccatttggctcccaaatttaaataaacaagagaaaacggtgttcatcta

SEQ ID NO: 316953 - DNA, 1023 bp, Artificial Sequence
  derived and/or modified sequence
atgtgcgcccagtactgcatcagcttcgccgacgtggagaaggcccacatcaacatcagagacagcatccacctgacccccgtgctgaccagcagcatcctgaaccagctgaccggcagaaacctgttcttcaagtgcgagctgttccagaagaccggcagcttcaagatcagaggcgccctgaacgccgtgagaagcctggtgcccgacgccctggagagaaagcccaaggccgtggtgacccacagcagcggcaaccacggccaggccctgacctacgccgccaagctggagggcatccccgcctacatcgtggtgccccagaccgcccccgactgcaagaagctggccatccaggcctacggcgccagcatcgtgtactgcgagcccagcgacgagagcagagagaacgtggccaagagagtgaccgaggagaccgagggcatcatggtgcaccccaaccaggagcccgccgtgatcgccggccagggcaccatcgccctggaggtgctgaaccaggtgcccctggtggacgccctggtggtgcccgtgggcggcggcggcatgctggccggcatcgccatcaccgtgaaggccctgaagcccagcgtgaaggtgtacgccgccgagcccagcaacgccgacgactgctaccagagcaagctgaagggcaagctgatgcccaacctgtacccccccgagaccatcgccgacggcgtgaagagcagcatcggcctgaacacctggcccatcatcagagacctggtggacgacatcttcaccgtgaccgaggacgagatcaagtgcgccacccagctggtgtgggagagaatgaagctgctgatcgagcccaccgccggcgtgggcgtggccgccgtgctgagccagcacttccagaccgtgagccccgaggtgaagaacatctgcatcgtgctgagcggcggcaacgtggacctgaccagcagcatcacctgggtgaagcaggccgagagacccgccagctaccagagcgtgagcgtgtag

SEQ ID NO: 316954 - protein, 403 aa, Artificial Sequence
  derived and/or modified sequence
MTMPVNGAHKDADLWSSHDKMLAQPLKDSDVEVYNIIKKESNRQRVGLELIASENFASRAVLEALGSCLNNKYSEGYPGQRYYGGTEFIDELETLCQKRALQAYKLDPQCWGVNVQPYSGSPANFAVYTALVEPHGRIMGLDLPDGGHLTHGFMTDKKKISATSIFFESMPYKVNPDTGYINYDQLEENARLFHPKLIIAGTSCYSRNLEYARLRKIADENGAYLMADMAHISGLVAAGVVPSPFEHCHVVTTTTHKTLRGCRAGMIFYRKGGSDNHLILVDLRSKGTDGGRAEKVLEACSIACNKNTCPGDRSALRPSGLRLGTPALTSRGLLEKDFQKVAHFIHRGIELTLQIQSDTGVRATLKEFKERLAGDKYQAAVQALREEVESFASLFPLPGLPDF

SEQ ID NO: 316955 - DNA, 378 bp, Artificial Sequence
  derived and/or modified sequence
atgcggtacctgcttcaggtcgcccagctggtctggctgactgtggacagtcggggaatcggcggtacgcttgaccacgccggtttctctatttgcatcttcaccgtccccccccttagtttcttcggactgtgcgaggcgcaaaccttcggactcagcgggtccaagtccccggcattgcatcggtactacggaggaactgagttcatcgatgagctcgagaccctctgccagaaacgagctctgcaagcctacaaattggatccccagtgttggggagtgaatgttcccactcaggttctggtctccagcatatggccaggtgcagcaagcagttgtgcctcccccagagccgatatgcatcaggaagagtcttag

SEQ ID NO: 316956 - DNA, 1212 bp, Artificial Sequence
  derived and/or modified sequence
atgacgatgcccgtgaatggggcacataaagacgccgatctctggtcctctcacgacaaaatgctcgctcagcccctgaaagattccgatgtggaggtgtacaacatcataaaaaaggaatcaaatagacaacgtgtaggattggaactgattgcttccgagaacttcgcaagtcgggctgttctggaggccctggggtcctgtttgaataataagtacagtgagggataccctggacaacgatattatggaggcactgaatttattgacgaattggagactctctgtcagaagagggccctccaggcgtacaaactggacccccagtgctggggcgtcaacgtgcagccttactccggaagccccgccaattttgctgtgtacacagcactcgtggagccccatggcaggatcatgggcctggacttaccagatgggggccatcttactcatggatttatgacggataagaagaagattagcgctacaagtattttcttcgagtccatgccctacaaagttaatccagacaccggatatattaattatgaccagctcgaggaaaatgctaggctgttccatcctaaattgatcatcgccggtacctcatgttactcccgcaatctggagtacgcccgccttaggaaaattgccgatgagaatggcgcgtacctgatggctgatatggctcacatttccgggctggtcgccgctggggtggttccaagtccattcgagcattgccacgtagttacaactaccacccacaagacactaagaggctgtcgtgccggcatgatcttttatcgaaagggcggctcagacaatcacctgatcctggtggatctgcgctccaaggggaccgatgggggcagagcggagaaagtgttggaagcctgttccattgcctgcaataaaaacacctgcccaggcgaccgatcagccctgagaccatccggccttaggctgggaaccccagccctcacgagccgcggccttctggaaaaagatttccagaaggtggctcattttattcacagaggcatcgagctcaccttgcagatacagtccgacactggcgtgcgagctaccctcaaggagttcaaagagcggctggctggggacaaataccaggcagccgtacaagcactccgtgaggaagtggagtctttcgccagtctgtttcccctccccggactgcccgatttttag

SEQ ID NO: 316957 - DNA, 285 bp, Artificial Sequence
  derived and/or modified sequence
atgactatgcctgtgaacggggcccataaagacgcagacctctggagtagccatgataagatgttggcccaaccactaaaagactcggatgttgaggtttacaacattataaaaaaggaatctaaccggcagagggtcggactggaattgatcgcctccgaaaactttgccagccgtgccgtcctggaggccctgggaagctgtctgaacaataaatatagcgaaggatatcctggtcagagatacgtcaacatcttcaaggggctggtcctgactcagtcttag

SEQ ID NO: 316958 - DNA, 378 bp, Artificial Sequence
  derived and/or modified sequence
atgagatacctgctgcaggtggcccagctggtgtggctgactgtggacagccggggcatcggcggcaccctggaccatgctggcttcagcatctgcatcttcaccgtgccccccctgtccttcttcggcctgtgtgaggcccagaccttcggcctgagcggcagcaagagccctgccctgcaccgctactacggcggcacagagttcattgatgagctggagaccctgtgccagaagagggccctgcaggcctacaagctggacccccagtgctggggcgtgaatgtgcccacccaggtgctggtgagcagcatctggccaggagctgccagcagctgtgccagccccagggctgacatgcaccaggaggagagctag

SEQ ID NO: 316959 - DNA, 1212 bp, Artificial Sequence
  derived and/or modified sequence
atgaccatgcctgtgaatggagcccacaaggatgctgacctgtggagcagccatgacaagatgctggcccagcccctgaaggacagtgatgtggaggtgtacaacatcatcaagaaggagagcaaccggcagagggtgggcctggagctgattgccagcgagaactttgccagcagagctgtgctggaggccctgggcagctgcctgaacaacaagtacagcgagggctacccaggccagcgctactatggaggaacagagttcattgatgagctggagaccctgtgccagaagagggccctgcaggcctacaagctggacccccagtgctggggcgtgaatgtgcagccctacagcggcagccctgccaactttgctgtgtacacagccctggtggagccccacggccgcatcatgggcctggacctgcctgatggcggccacctgacccacggcttcatgacagacaagaagaagatcagcgccaccagcatcttctttgagagcatgccctacaaggtgaacccagacaccggctacatcaactatgaccagctggaggagaatgcccggctcttccaccccaagctgatcatcgccggcaccagctgctacagcaggaacctggagtatgcccggctgaggaagattgctgatgaaaatggagcctacctgatggctgacatggcccacatcagcggcctggtggccgccggcgtggtgcccagcccctttgagcactgccacgtggtgaccaccaccacccacaagaccctgcggggctgccgggccggcatgatcttctacagaaaaggaggcagtgacaaccacctgatcctggtggacctgcggagcaagggcacagatggcggccgggcagagaaggtgctggaggcctgcagcatcgcctgcaacaagaacacctgccctggggacagaagtgccctgcggcccagcggcctgcggctgggcaccccagccctgaccagccggggcctgctggagaaggacttccagaaggtggcccacttcatccaccggggcatcgagctgaccctgcagatccagagcgacacaggagtgcgggccaccctgaaggagttcaaggagcggctggccggggacaagtaccaggccgctgtgcaggccctgcgggaggaggtggagagctttgccagcctcttccccctgcccggcctgcctgacttctag

SEQ ID NO: 316960 - DNA, 285 bp, Artificial Sequence
  derived and/or modified sequence
atgaccatgcctgtgaatggagcccacaaggatgctgacctgtggagcagccatgacaagatgctggcccagcccctgaaggacagtgatgtggaggtgtacaacatcatcaagaaggagagcaaccggcagagggtgggcctggagctgattgccagcgagaactttgccagcagagctgtgctggaggccctgggcagctgcctgaacaacaagtacagcgagggctacccaggccagcgctacgtgaacatcttcaagggcctggtgctgacccagagctag

SEQ ID NO: 316961 - DNA, 378 bp, Artificial Sequence
  derived and/or modified sequence
atgcggtacctgctgcaggtggcccagctggtgtggctgaccgtggatagccggggaattggagggaccctggatcacgctgggtttagtatctgtattttcaccgtgcctcctttgtccttcttcgggctgtgtgaagctcagacattcggactttccgggtccaaatctccagcccttcatcgctattatggaggcacagagttcattgacgagcttgagaccctgtgccaaaagcgtgccctgcaagcttacaaactggacccacagtgctggggagtcaatgtgccaacacaggtgttagtatcatctatatggcccggcgctgcgtcatcctgcgcatcacctagagctgatatgcatcaggaagagtcctag

SEQ ID NO: 316962 - DNA, 1212 bp, Artificial Sequence
  derived and/or modified sequence
atgaccatgcccgtgaacggcgcccacaaggacgccgacctgtggtcaagccacgataaaatgctggcacagccactgaaggacagtgatgtggaagtctacaacataatcaaaaaggaaagcaaccggcagcgagtggggttagagctaattgcaagtgagaatttcgccagcagggccgtgctggaagcattgggaagctgtttgaataataagtactctgagggctatcccgggcagcggtattacggaggaacagaattcatcgatgaactggaaaccttatgccagaagcgcgccctccaggcgtataagctggatccccagtgctggggcgtcaatgtgcaaccatattcaggtagtcccgccaatttcgcagtctatacggctctggtggagcctcatgggcgcatcatggggctcgacctgccggacggtggccatctgacacatgggtttatgaccgataagaagaagatctccgccacgagcatcttttttgaatccatgccgtataaagtgaatcctgacaccggttacatcaactacgaccagctagaggagaatgctaggctttttcatccaaagcttattattgcaggcacctcatgctactctcggaatcttgaatatgctcgactaagaaagatcgctgatgagaacggcgcctatctgatggcggatatggcccatatctccggtctggtggccgctggcgttgtcccaagcccctttgagcactgccacgtcgttacaaccacaacgcacaagacgttgagaggctgcagagctggcatgattttttatcgtaagggaggatcagataatcatctcattctggtggacctgagatctaagggaactgacggtgggcgtgccgaaaaagtcttagaagcatgcagtatcgcatgtaataagaatacgtgcccaggcgacagaagcgctttaagaccttccggacttaggctgggcacacctgctttaacttctagagggctgttggagaaagactttcaaaaagtggcccacttcatccaccgcggtatcgagttaactctgcagatccagtccgacactggggtacgggctactctcaaggagttcaaggaaaggctggccggggacaaataccaagctgccgtacaagctctacgcgaagaagtcgaaagtttcgcatcccttttcccgctcccgggcctgcccgatttttag

SEQ ID NO: 316963 - DNA, 285 bp, Artificial Sequence
  derived and/or modified sequence
atgaccatgcccgtgaacggcgcccacaaggacgccgacctgtggtcatcccatgacaagatgttggcgcagcctctgaaggactcggatgtggaagtatacaatatcatcaagaaagaatctaaccggcagcgcgtcggactggaactcatcgccagcgaaaacttcgcgtcaagggctgtcctcgaagcgctcggctcttgcctgaacaataaatacagcgagggttacccggggcagagatatgtcaacatcttcaaaggtttagttctaacacagtcatag

SEQ ID NO: 316964 - DNA, 378 bp, Artificial Sequence
  derived and/or modified sequence
atgcgctatcttctccaagtggctcagttggtgtggttgactgtggactcaaggggcatcgggggtactttggatcacgccggtttctctatctgtatatttaccgtcccacctttgagcttttttgggctgtgcgaagcccagacctttgggctgtcaggaagcaagtctccagcactgcatcgctattacgggggtactgagttcatcgacgaactcgagacattgtgccaaaagagagcattgcaggcctataaattggaccctcaatgctggggggtgaacgtgccaactcaggtcctagtcagctctatctggcccggtgctgcctcatcctgtgcttccccaagagcggatatgcaccaggaggaatcttag

SEQ ID NO: 316965 - DNA, 1212 bp, Artificial Sequence
  derived and/or modified sequence
atgaccatgccggtcaatggtgcgcacaaggacgccgacctctggtcgtcgcatgataaaatgctggctcagccattaaaagacagcgatgtggaagtgtacaacattatcaagaaagagtccaataggcagagagtgggacttgaactgatcgcttccgaaaatttcgcaagtagagctgtgctggaagccctgggaagctgtcttaacaacaagtatagtgagggctatccaggccagcgctattatggtgggacagagtttatcgatgaactggagacactgtgccagaagcgggctctccaggcctacaagcttgatcctcagtgctggggagtgaatgtgcagccatattctggctctcctgcgaactttgccgtatatactgctttggtagaacctcacgggaggatcatgggtctcgacctccctgacggcggacacctgacccatggctttatgacagacaaaaagaagatatccgctacgtccattttctttgagtctatgccttacaaggtaaacccggacactggatatataaactacgatcaactcgaggaaaacgcacggctgttccatcccaaactgatcatcgccggaacgtcttgctactcaagaaaccttgagtatgctaggctcaggaaaatagcagatgaaaacggagcctacttgatggcagacatggcccatatctcaggcctggtggcggctggggtggttccaagcccttttgagcattgccacgttgtcacaacaacaacccataagaccctcagaggctgcagagctggcatgatattttaccggaaggggggttcagataaccacctcatcctggtggacctccgatctaaggggaccgacgggggacgcgctgaaaaggtgctagaggcttgctcaatagcgtgtaacaagaacacatgcccaggcgatagaagcgcgctgcgcccatcggggctgcggctaggaacacctgccctcacctctaggggactgctggaaaaggacttccagaaagtagcacactttattcatcgtggcatcgagcttactttgcagattcagagcgacacaggagtgagagcaacactgaaggagtttaaagagcgccttgccggagataagtaccaggcagcagtccaagcattacgggaggaagtggagtccttcgcaagtctgtttcctctgccgggactaccagacttttag

SEQ ID NO: 316966 - DNA, 285 bp, Artificial Sequence
  derived and/or modified sequence
atgacaatgcctgtgaatggagcacacaaggatgctgacctgtggagctcacacgacaagatgctggcacagccgctaaaagacagcgatgtcgaggtatacaatataattaagaaagagtccaaccgtcagagagtgggccttgaactaatcgcctcagagaacttcgcttcaagagcagtacttgaggcactgggctcctgtctgaataataagtactccgaaggttaccccggacaacgttacgtgaatatcttcaaaggcctggtcctaactcagtcttag

SEQ ID NO: 316967 - DNA, 378 bp, Artificial Sequence
  derived and/or modified sequence
atgagatatttgctccaagttgcacagctggtttggttgactgtagattccagaggcattggtggaacacttgatcatgctggcttcagcatctgcattttcactgtcccacccctaagcttctttggcctctgtgaagcacagactttcggtctgagtggatctaagtctcctgctcttcacagatactatggcgggactgagtttattgatgaactggagaccctctgtcagaagcgagccctgcaggcctataagctggacccacagtgctggggggtcaacgtccctactcaggtgcttgtctcatccatatggcctggtgcagcctcttcatgtgcatcccccagggccgacatgcaccaagaagagtcctaa

SEQ ID NO: 316968 - DNA, 2136 bp, Artificial Sequence
  derived and/or modified sequence
ggcaccggcggcggcgtaggacggaggcgtcgctaggcagcttcgaaccagtgcaatgacgatgccagtcaacggggcccacaaggatgctgacctgtggtcctcacatgacaagatgctggcacaacccctcaaagacagtgatgttgaggtttacaacatcattaagaaggagagtaaccggcagagggttggattggagctgattgcctcggagaatttcgccagccgagcagttttggaggccctaggctcttgcttaaataacaaatactctgaggggtacccgggccagagatactatggcgggactgagtttattgatgaactggagaccctctgtcagaagcgagccctgcaggcctataagctggacccacagtgctggggggtcaacgtccagccctactcaggctcccctgcaaactttgctgtgtacactgccctggtggaaccccatgggcgcatcatgggcctggaccttccggatgggggccacctgacccatgggttcatgacagacaagaagaaaatctctgccacgtccatcttctttgaatctatgccctacaaggtgaacccagatactggctacatcaactatgaccagctggaggagaacgcacgcctcttccacccgaagctgatcatcgcaggaaccagctgctactcccgaaacctggaatatgcccggctacggaagattgcagatgagaacggggcgtatctcatggcggacatggctcacatcagcgggctggtggcggctggcgtggtgccctccccatttgaacactgccatgtggtgaccaccaccactcacaagaccctgcgaggctgccgagctggcatgatcttctacaggaaaggtggttctgacaaccatttgatccttgtggatctccgttccaaaggcacagatggtggaagggctgagaaggtgctagaagcctgttctattgcctgcaacaagaacacctgtccaggtgacagaagcgctctgcggcccagtggactgcggctggggaccccagcactgacgtcccgtggacttttggaaaaagacttccaaaaagtagcccactttattcacagagggatagagctgaccctgcagatccagagcgacactggtgtcagagccaccctgaaagagttcaaggagagactggcaggggataagtaccaggcggccgtgcaggctctccgggaggaggttgagagcttcgcctctctcttccctctgcctggcctgcctgacttctaaaggagcgggcccactctggacccacctggcgccacagaggaagctgcctgccggaggacccccacctgagagatggatgagctgctccaaaggggaactgttgacactcgggccctttgagggggtttcttttggacttttttcatgttttcttcacaaatcaaaatttgtttaagtctcattgttagtaattctgggacaggttattaaaggatttaaatttgaacctggctttctcacagctggacataattctaggaaaataaaatactatgtcgccacttggtcataatcatttagatggtggtgtagggcaaagctgttagaaagattgtagcgttttactctccctgggctttcctccgccttgctgcaacagagaggaaatgcccatgtccacagcttgtacacactgccccctcactatcttgttatccagtggcatgccaaaggagaactgaattagcttctgaggcttctgctgtaaatcagaagtgtatgttagtcaagagtaaacaagatgcacccagtatggtgggagggttttgctgtcagtagctcaaagtatggtgtagaaatggcctcctccctccatcctgggaagtcccagtcccatcctggtgtgagaatcaaccaggctttcctgctccacctgagataaccaactccctcccgtaatcaggaagccaaatgtcaccttcccaaagaaattttattttcacgtagctgaagtgcaaaacatagatgaccatttttaataagcacaatcaaatttttaaccacagaatgtctacaagaattatagctttaaaaaatacaaccaatttttatatttcaaaaatatttgaactcaaataaattaatttctt

SEQ ID NO: 316969 - DNA, 570 bp, Artificial Sequence
  derived and/or modified sequence
ctgagctcgagcggtccagcgccaagttcggggtttggggttggagcggctggtcacgtggctggcccgcggcggtgcgcggggcgttgggtcagcgggtctgggactggtggcaccggcggcggcgtaggacggaggcgtcgctaggcagcttcgaaccagtgcaatgacgatgccagtcaacggggcccacaaggatgctgacctgtggtcctcacatgacaagatgctggcacaacccctcaaagacagtgatgttgaggtttacaacatcattaagaaggagagtaaccggcagagggttggattggagctgattgcctcggagaatttcgccagccgagcagttttggaggccctaggctcttgcttaaataacaaatactctgaggggtacccgggccagaggtatgtgaatatcttcaaaggcctggttctgacacagtcatagggagtactcagtcagcctaggacctaaacaatttggaaatttcagaaaacaataagcttcccagctgtaggatttctgttccacgcctgctctctgacagaactcttttattcccagca

SEQ ID NO: 316970 - DNA, 378 bp, Artificial Sequence
  derived and/or modified sequence
atgagatacctgctgcaggtggcccagctggtgtggctgaccgtggacagcagaggcatcggcggcaccctggaccacgccggcttcagcatctgcatcttcaccgtgccccccctgagcttcttcggcctgtgcgaggcccagaccttcggcctgagcggcagcaagagccccgccctgcacagatactacggcggcaccgagttcatcgacgagctggagaccctgtgccagaagagagccctgcaggcctacaagctggacccccagtgctggggcgtgaacgtgcccacccaggtgctggtgagcagcatctggcccggcgccgccagcagctgcgccagccccagagccgacatgcaccaggaggagagctag

SEQ ID NO: 316971 - DNA, 1212 bp, Artificial Sequence
  derived and/or modified sequence
atgaccatgcccgtgaacggcgcccacaaggacgccgacctgtggagcagccacgacaagatgctggcccagcccctgaaggacagcgacgtggaggtgtacaacatcatcaagaaggagagcaacagacagagagtgggcctggagctgatcgccagcgagaacttcgccagcagagccgtgctggaggccctgggcagctgcctgaacaacaagtacagcgagggctaccccggccagagatactacggcggcaccgagttcatcgacgagctggagaccctgtgccagaagagagccctgcaggcctacaagctggacccccagtgctggggcgtgaacgtgcagccctacagcggcagccccgccaacttcgccgtgtacaccgccctggtggagccccacggcagaatcatgggcctggacctgcccgacggcggccacctgacccacggcttcatgaccgacaagaagaagatcagcgccaccagcatcttcttcgagagcatgccctacaaggtgaaccccgacaccggctacatcaactacgaccagctggaggagaacgccagactgttccaccccaagctgatcatcgccggcaccagctgctacagcagaaacctggagtacgccagactgagaaagatcgccgacgagaacggcgcctacctgatggccgacatggcccacatcagcggcctggtggccgccggcgtggtgcccagccccttcgagcactgccacgtggtgaccaccaccacccacaagaccctgagaggctgcagagccggcatgatcttctacagaaagggcggcagcgacaaccacctgatcctggtggacctgagaagcaagggcaccgacggcggcagagccgagaaggtgctggaggcctgcagcatcgcctgcaacaagaacacctgccccggcgacagaagcgccctgagacccagcggcctgagactgggcacccccgccctgaccagcagaggcctgctggagaaggacttccagaaggtggcccacttcatccacagaggcatcgagctgaccctgcagatccagagcgacaccggcgtgagagccaccctgaaggagttcaaggagagactggccggcgacaagtaccaggccgccgtgcaggccctgagagaggaggtggagagcttcgccagcctgttccccctgcccggcctgcccgacttctag

SEQ ID NO: 316972 - DNA, 285 bp, Artificial Sequence
  derived and/or modified sequence
atgaccatgcccgtgaacggcgcccacaaggacgccgacctgtggagcagccacgacaagatgctggcccagcccctgaaggacagcgacgtggaggtgtacaacatcatcaagaaggagagcaacagacagagagtgggcctggagctgatcgccagcgagaacttcgccagcagagccgtgctggaggccctgggcagctgcctgaacaacaagtacagcgagggctaccccggccagagatacgtgaacatcttcaagggcctggtgctgacccagagctag

SEQ ID NO: 316973 - protein, 766 aa, Artificial Sequence
  derived and/or modified sequence
MLAHLSRAAPCPLAAGAVAAVAVAVTRSLTAQSLRTARLGPATVPPSPLPAISSEPHDRAGKTLTDPTSHFIDRITEAWSHVGSHSKAKPEQRPSLHSRGMLDRSRLALCTLVFLCLSCNPLASLLGARGLPSPSDTTSVYHSPGRNVLGTESRDGPGWAQWLLPPVVWLLNGLLVLVSLVLLFVYGEPVTRPHSGPAVYFWRHRKQADLDLARGDFAQAAQQLWLALRALGRPLPTSHLDLACSLLWNLIRHLLQRLWVGRWLAGRAGGLQQDCALRVDASASARDAALVYHKLHQLHTMGKHTGGHLTATNLALSALNLAECAGDAVSVATLAEIYVAAALRVKTSLPRALHFLTRFFLSSARQACLAQSGSVPPAMQWLCHPVGHRFFVDGDWSVLSTPWESLYSLAGNPVDPLAQVTQLFREHLLERALNCVTQPNPSPGSADGDKEFSDALGYLQLLNSCSDAAGAPAYSFSISSSMATTTGVDPVAKWWASLTAVVIHWLRRDEEAAERLCPLVEHLPRVLQESERPLPRAALHSFKAARALLGCAKAESGPASLTICEKASGYLQDSLATTPASSSIDKAVQLFLCDLLLVVRTSLWRQQQPPAPAPAAQGTSSRPQASALELRGFQRDLSSLRRLAQSFRPAMRRVFLHEATARLMAGASPTRTHQLLDRSLRRRAGPGGKGGAVAELEPRPTRREHAEALLLASCYLPPGFLSAPGQRVGMLAEAARTLEKLGDRRLLHDCQQMLMRLGGGTTVTSS

SEQ ID NO: 316974 - DNA, 2301 bp, Artificial Sequence
  derived and/or modified sequence
atgctggcccacctgagcagagccgccccctgccccctggccgccggcgccgtggccgccgtggccgtggccgtgaccagaagcctgaccgcccagagcctgagaaccgccagactgggccccgccaccgtgccccccagccccctgcccgccatcagcagcgagccccacgacagagccggcaagaccctgaccgaccccaccagccacttcatcgacagaatcaccgaggcctggagccacgtgggcagccacagcaaggccaagcccgagcagagacccagcctgcacagcagaggcatgctggacagaagcagactggccctgtgcaccctggtgttcctgtgcctgagctgcaaccccctggccagcctgctgggcgccagaggcctgcccagccccagcgacaccaccagcgtgtaccacagccccggcagaaacgtgctgggcaccgagagcagagacggccccggctgggcccagtggctgctgccccccgtggtgtggctgctgaacggcctgctggtgctggtgagcctggtgctgctgttcgtgtacggcgagcccgtgaccagaccccacagcggccccgccgtgtacttctggagacacagaaagcaggccgacctggacctggccagaggcgacttcgcccaggccgcccagcagctgtggctggccctgagagccctgggcagacccctgcccaccagccacctggacctggcctgcagcctgctgtggaacctgatcagacacctgctgcagagactgtgggtgggcagatggctggccggcagagccggcggcctgcagcaggactgcgccctgagagtggacgccagcgccagcgccagagacgccgccctggtgtaccacaagctgcaccagctgcacaccatgggcaagcacaccggcggccacctgaccgccaccaacctggccctgagcgccctgaacctggccgagtgcgccggcgacgccgtgagcgtggccaccctggccgagatctacgtggccgccgccctgagagtgaagaccagcctgcccagagccctgcacttcctgaccagattcttcctgagcagcgccagacaggcctgcctggcccagagcggcagcgtgccccccgccatgcagtggctgtgccaccccgtgggccacagattcttcgtggacggcgactggagcgtgctgagcaccccctgggagagcctgtacagcctggccggcaaccccgtggaccccctggcccaggtgacccagctgttcagagagcacctgctggagagagccctgaactgcgtgacccagcccaaccccagccccggcagcgccgacggcgacaaggagttcagcgacgccctgggctacctgcagctgctgaacagctgcagcgacgccgccggcgcccccgcctacagcttcagcatcagcagcagcatggccaccaccaccggcgtggaccccgtggccaagtggtgggccagcctgaccgccgtggtgatccactggctgagaagagacgaggaggccgccgagagactgtgccccctggtggagcacctgcccagagtgctgcaggagagcgagagacccctgcccagagccgccctgcacagcttcaaggccgccagagccctgctgggctgcgccaaggccgagagcggccccgccagcctgaccatctgcgagaaggccagcggctacctgcaggacagcctggccaccacccccgccagcagcagcatcgacaaggccgtgcagctgttcctgtgcgacctgctgctggtggtgagaaccagcctgtggagacagcagcagccccccgcccccgcccccgccgcccagggcaccagcagcagaccccaggccagcgccctggagctgagaggcttccagagagacctgagcagcctgagaagactggcccagagcttcagacccgccatgagaagagtgttcctgcacgaggccaccgccagactgatggccggcgccagccccaccagaacccaccagctgctggacagaagcctgagaagaagagccggccccggcggcaagggcggcgccgtggccgagctggagcccagacccaccagaagagagcacgccgaggccctgctgctggccagctgctacctgccccccggcttcctgagcgcccccggccagagagtgggcatgctggccgaggccgccagaaccctggagaagctgggcgacagaagactgctgcacgactgccagcagatgctgatgagactgggcggcggcaccaccgtgaccagcagctag

SEQ ID NO: 316975 - DNA, 2301 bp, Artificial Sequence
  derived and/or modified sequence
atgttggcccatctgtcgcgtgctgccccctgcccgttggcggccggagctgtcgcggccgtggccgtggccgtgactaggtcactcacagcccagtccctacgaacggcacgactcggccctgcaacagtccccccctctcctctgccagcaatctcctctgaacctcatgatagagctggcaagacactgaccgatcccacaagtcatttcatagacaggatcaccgaagcatggtcacatgttgggtcgcattcaaaagcaaagcctgaacaaaggccaagtctgcattcaaggggaatgctggatcggagtcggcttgcattatgcaccctggtttttctgtgcctgtcctgcaatcctcttgccagtctgttaggagcccgcggacttccttccccttctgacaccacatctgtgtatcactctcccggtcggaatgtcctgggaaccgaaagtagagatggccctggttgggcccagtggctgcttcccccagtggtctggcttttgaatggcctcctcgtgttggtttctttggtcttactttttgtttacggggagcctgtgacacgcccgcacagtggccccgcagtttatttctggcgccatagaaagcaggcagacctcgacttagccaggggcgattttgcccaggctgcgcaacagctttggctggctctgagagcactggggagacctctgccaactagtcacctggatctggcttgctccctcctttggaacctcatccggcaccttttgcagcgcctgtgggtcggtcgatggctggctggccgcgctggtggactgcagcaagattgcgcgctccgggtcgatgcctcagctagcgcccgcgacgctgctctcgtctaccataagctccatcagctgcacacaatggggaagcacaccgggggccacctgacagctacaaacttggcacttagcgctttaaatctggctgaatgcgccggagacgctgtaagcgtagcgaccctggctgaaatctatgtggcagctgcgttacgagtgaagacatcactgccccgtgcacttcatttccttactagattttttctctcctccgctcgtcaagcttgtttagcccaatccgggagcgtgcccccagcaatgcagtggctctgccaccctgtgggccatcgattcttcgtggacggggactggtctgttctaagcacaccatgggaatcactgtatagcttggctggtaaccccgtggatcccctggctcaagtgacccagctcttccgggagcatttattggaaagagctctcaactgcgttacccagcccaatccgtcccctggctccgcagacggggacaaagaatttagtgatgccctggggtacctgcaactactcaacagctgctctgatgctgccggagctcccgcctatagcttctccatttctagctccatggccacaactacgggtgtggatccggttgctaaatggtgggcttcactgacggccgtggtgatccactggcttcgccgcgacgaggaagccgcagagcgtctgtgtcccctggttgaacacctgccgagggtcctccaggagtctgagcggccccttcccagggcagcactccacagtttcaaggctgccagggccctactggggtgtgcaaaggcagaatctgggccagcgagcctgaccatctgtgaaaaagcgtctggctatctccaagacagtcttgctaccaccccggcctcatcttctattgacaaagccgtccagttattcctgtgtgacctgctgctggttgtgagaacaagcttgtggcggcaacaacagccgcctgccccggctccggccgcacagggcacatcgagcaggccacaggcctcggctcttgagttaagaggttttcagagggacctttcaagtcttagaaggctcgctcagagtttccgaccggctatgaggagagtctttttgcatgaggctacagccagacttatggctggcgccagccctactcgcacacatcagctgctggatcgatctctccggcgaagagccgggccaggcggcaagggaggagccgtcgccgagctagagccccgacccacacgacgggagcatgccgaggcactgctattggctagttgctacttgcctcccggatttctttcagcccccggtcaacgtgttggtatgctcgccgaagccgcccgaaccctagagaagttgggggatcgacggctcctgcacgactgtcagcagatgctgatgagactgggagggggaactaccgtgacttcatcctag

SEQ ID NO: 316976 - DNA, 2301 bp, Artificial Sequence
  derived and/or modified sequence
atgctggcccacctgagccgggccgccccctgccccctggccgccggggctgtggccgctgtggccgtggccgtgaccaggagcctgacagcccagagcctgaggacagcccggctgggccctgccaccgtgccccccagccccctgcctgccatcagcagcgagccccatgaccgggccggcaagaccctgacagaccccaccagccacttcatcgaccgcatcacagaggcctggagccacgtgggcagccacagcaaggccaagccagagcagaggcccagcctgcacagccggggcatgctggacaggagccggctggccctgtgcaccctggtgttcctgtgcctgagctgcaaccccctggccagcctgctgggcgcccggggcctgcccagccccagcgacaccacctctgtgtaccacagccctggaagaaatgtgctgggcacagagagcagagatggccctggctgggcccagtggctgctgccccctgtggtgtggctgctgaatggcctgctggtgctggtgtccctggtgctgctgtttgtgtatggagagcctgtgacccggccccacagcggccctgctgtgtacttctggaggcacaggaagcaggccgacctggacctggcccggggggactttgcccaggccgcccagcagctgtggctggccctgcgggccctgggccggcccctgcccaccagccacctggacctggcctgcagcctgctgtggaacctgatccgccacctgctgcagaggctgtgggtgggccgctggctggccggccgggccggcggcctgcagcaggactgtgccctgcgggtggatgccagcgccagcgccagagatgctgccctggtgtaccacaagctgcaccagctgcacaccatgggcaagcacactggaggccacctgacagccaccaacctggccctgagcgccctgaacctggctgaatgtgctggagatgctgtgtctgtggccaccctggccgagatctacgtggccgccgccctgcgggtgaagaccagcctgccccgggccctgcacttcctgacccgcttcttcctgagcagcgcccggcaggcctgcctggcccagagcggctctgtgcccccagccatgcagtggctgtgccaccctgtgggccaccgcttctttgtggatggagactggagcgtgctgagcaccccctgggagagcctgtacagcctggccggcaaccctgtggaccccctggcccaggtgacccagctgttccgggagcacctgctggagcgggccctgaactgtgtgacccagcccaaccccagccctggcagcgcagatggagacaaggagttcagtgatgccctgggctacctgcagctgctgaacagctgcagtgatgctgctggggccccagcctacagcttcagcatcagcagctccatggccaccaccaccggggtggaccctgtggccaagtggtgggccagcctgacagctgtggtgatccactggctgcggagagatgaggaggccgctgagcggctgtgccccctggtggagcacctgccccgggtgctgcaggagagcgagcggcccctgcccagggctgccctgcacagcttcaaggccgcccgggccctgctgggctgtgccaaggccgagagcggccctgccagcctgaccatctgtgagaaggccagcggctacctgcaggacagcctggccaccaccccagccagcagcagcattgacaaggctgtgcagctgttcctgtgtgacctgctgctggtggtgaggaccagcctgtggaggcagcagcagcccccagccccagccccagctgcccagggcaccagcagccggccccaggccagcgccctggagctgcggggcttccagagggacctgagcagcctgcggcggctggcccagagcttccggcctgccatgagaagagtcttcctgcacgaggccacagcccggctgatggccggggccagccccaccaggacccaccagctgctggacaggagcctgcggcggcgggccggccctgggggcaaaggaggagctgtggccgagctggagccccggcccacccggcgggagcacgccgaggccctgctgctggccagctgctacctgcccccaggcttcctgagcgcccctggccagagggtgggcatgctggccgaggccgcccggaccctggagaagctgggggaccggcggctgctgcatgactgccagcagatgctgatgaggctgggcggcggcaccaccgtgaccagcagctag

SEQ ID NO: 316977 - DNA, 2301 bp, Artificial Sequence
  derived and/or modified sequence
atgctggcccacctgagccgggccgccccctgccccctggccgccggcgcggtggccgctgtggccgtggcagtcacccgatcattgacggctcaatctctccggaccgccagacttgggcctgcgacggtgccaccttcaccccttcccgcaatcagcagcgaaccacacgatagggccgggaagactctgaccgaccccactagtcattttattgatcgcattaccgaagcctggtcccacgtgggatctcactccaaggccaagccagagcagcgacccagcctacatagccgaggcatgctggaccgttcaagattggctctgtgcactctggtctttttatgtctgagttgcaatcctctggcgagccttttgggagccagggggcttccttccccatcagacacgaccagcgtctaccactctccgggacggaacgtgctaggtacagagtccagggatggccctggctgggcccagtggttgctccctccagtcgtttggcttctcaatggacttctcgttctagtcagtctcgtactgctcttcgtttacggagaacctgtgacacgccctcattcaggccccgccgtgtatttctggcgccatcgtaagcaggccgatctggacctggcaaggggagacttcgctcaggcagcgcaacagctgtggctagctttgagagcacttggccggcccctgccaacctcccaccttgacctggcatgctctctgctgtggaatctcatccgccatctcctgcagcgtctatgggttggtcgttggctggccgggcgcgccgggggactacagcaagattgcgccctgagagttgacgctagtgccagtgcgcgagatgctgcactcgtataccacaagctgcaccagctccacactatggggaaacataccggaggccaccttaccgccacaaacctggctctgtctgcattgaacttagcagaatgcgccggagacgctgtctccgtggctaccctagccgaaatatatgtcgcagcggccttgagggtgaagactagtctgccccgcgcactccacttccttacacgctttttcctgagcagtgcccggcaggcatgcctggctcagtccggcagcgtaccccccgctatgcagtggttatgccaccctgtcgggcacagattcttcgtggacggtgattggagcgtgttgagcaccccctgggagagtttatatagcctggccggcaatcctgtcgatccccttgcccaggtgacccagctttttagagaacaccttcttgagagggcgttgaactgtgtaacccagccaaacccctcccccggctctgcggacggcgataaggagttttccgatgcactgggttatttacagttactcaatagttgcagtgacgcagcgggtgcccctgcttacagtttctccatctcatctagtatggccacgacaacgggtgtagatccagtagcaaaatggtgggccagtctcacagctgtcgtgattcactggctgagacgggatgaggaggccgctgaacgcctctgccctctagtcgagcacctgcccagagtgttgcaggagtctgagcgcccattgcctcgcgccgccctgcacagtttcaaagcagctcgcgcccttctgggctgtgccaaggccgaatctggccccgctagcctgacgatctgtgagaaggcttctggctacttacaggatagtctcgcaacaactcctgcatcctctagcatcgataaggcggttcagctctttctatgcgatctgctgctagtggttaggacctctctatggcggcagcagcagccaccagcacctgcccctgctgcccaggggacaagcagccggccgcaggcctcagccctcgaactcagagggttccaacgtgacttgtctagcttgcgtcggcttgcccagtcatttaggcctgccatgcgccgggtctttctgcacgaagccacagccagactgatggcaggggcttcacctacccggacccaccaattgttggacaggagtctgcggagacgggcaggacccggaggcaagggaggcgcggttgccgagctggaacccagacctaccaggcgggaacacgccgaggctctactcttggcttcttgctatctgcccccgggcttcctgagtgcgccgggccagagggtaggcatgctggctgaggcagcccgcaccctggagaaacttggcgacaggcggcttctgcatgactgccaacaaatgctgatgcgcctgggtgggggcaccaccgtcacctctagctag

SEQ ID NO: 316978 - DNA, 2301 bp, Artificial Sequence
  derived and/or modified sequence
atgttggcacatctgtctcgagccgcaccctgccccctggcggctggcgcagtggccgcagttgccgtggccgttactagatccctcacagcccagagtctcaggacagctagactgggccctgctacggtgcctccgtccccactgcctgccatatcttctgaacctcacgatagggctggaaagaccttgactgaccctacttcccactttattgacagaataaccgaggcttggtcccacgttggtagtcattcaaaggccaagcccgagcaacgccctagcctgcactctcgcggtatgctagacaggtctcgactcgcgctttgtacgttagtttttctgtgcctgtcatgtaatccactagcatccctgctcggcgcacggggtctgccttctcctagtgacactacttctgtgtaccactccccagggagaaacgtgcttggtaccgaatcccgggatgggccaggttgggcccagtggctgctcccccctgtcgtgtggctgttgaacggacttctcgtgcttgtctcacttgtactgctgttcgtgtacggagaacctgtgaccaggccccattcagggccagctgtctatttctggcgccaccggaagcaagccgatcttgatctcgctagaggggactttgcccaggcagcacagcaactgtggctcgccctacgagctttggggcgtccactgcctacgagccatctggacctcgcatgttccctgttgtggaacttgatcaggcacttgctgcagagactctgggtgggcagatggttagcgggtcgagcaggcggtcttcaacaagactgcgcgctgcgcgttgacgcttctgcttccgcccgagatgcagccttggtctaccacaaacttcaccaattacacacaatgggcaagcataccgggggacatctgaccgctaccaacctcgccttgagcgcgctgaacttagcagagtgcgcgggtgacgccgtttccgtcgcaaccctggcagaaatctacgtcgccgctgctctccgtgttaagacatccctcccacgagccttgcactttctgacccgcttcttcctgagcagtgctcggcaggcttgtctggcacaatccggaagtgtgccgccagccatgcagtggctctgtcatccagtaggacatcgctttttcgtggacggagattggagcgtgctgtccaccccctgggaatccctgtacagcttggccggtaatccagttgaccccctggcacaggtgactcagctcttccgcgagcacctgttagagagggcgctgaattgtgtgacgcagcctaatccttctcctggtagcgccgatggtgataaagagttttcagacgccctggggtacctgcagctcctaaatagttgttccgacgcagccggagctccggcttactccttttcaattagctcatctatggccacaaccacaggagttgaccctgtcgccaaatggtgggcctccctcactgccgtggtgatccattggctgcggcgagacgaggaagccgctgaacggctttgtccacttgtggagcatttgccgagggttttacaagagtctgagcggcctctgcctcgagcagcactgcacagcttcaaggcggctcgggctctgctgggctgtgctaaagcagagtccggcccagctagtttgactatctgtgaaaaggcatctgggtatctacaggacagcctggcgactactcccgctagtagtagtattgataaagccgtgcaactctttctctgtgacctcctgctggtggttaggaccagcttgtggcgtcagcagcaacccccagcccctgcgcctgcagcccaaggcactagctctcgcccacaagcctctgcgctggaacttcgaggtttccagcgggatctgtcaagtctccgcaggctagcccaaagcttcagaccagccatgaggcgggtgttcctgcatgaggctacggcacggctgatggccggtgcctcacccacgaggacacatcagctgttggatcggagtctgcgtcggcgagctggcccagggggtaagggaggtgctgtggcagagctcgagcctcgcccaacccggagggagcatgctgaagctctcctgttagcatcatgttatctccctccaggattcctgtcagcgcctggccagagagtcggtatgctggcggaggctgcacggacccttgagaagctaggagaccggcgactgctgcatgattgccagcagatgctaatgcggctcggcggtgggacaaccgttacatcgtcctag

SEQ ID NO: 316979 - DNA, 3026 bp, Artificial Sequence
  derived and/or modified sequence
tctgcaacacagcaaccagaaactcaagcaggagaacctaagtctgcgcactgctgtccacaaaagcaaatctctgaaggatctggtgtcggcctgtggcagtggagggaacacagacgtgctcatggagggcgtgaagactgaggtggaggacacactgaccccacccccctcggatgctggctcacctttccagagcagccccttgtcccttggcagcaggggcagtggcagcggtggcagtggcagtgactcggagcctgacagcccagtctttgaggacagcaaggttgggccctgccacggtgcccccttccccactcccagccatatcctctgagcctcatgacagggccgggaagaccctaacagatcctacctcccatttcatagacagaataactgaggcctggagccacgtggggtcccacagtaaggcaaagccagagcagcggccgtctctgcacagccggggcatgctggaccgctcccgcctggccctgtgcacgctcgtcttcctctgcctgtcctgcaaccccttggcctccttgctgggggcccgggggcttcccagcccctcagataccaccagcgtctaccatagccctgggcgcaacgtgctgggcaccgagagcagagatggccctggctgggcccagtggctgctgcccccagtggtctggctgctcaatgggctgttggtgctcgtctccttggtgcttctctttgtctacggtgagccagtcacacggccccactcaggccccgccgtgtacttctggaggcatcgcaagcaggctgacctggacctggcccggggagactttgcccaggctgcccagcagctgtggctggccctgcgggcactgggccggcccctgcccacctcccacctggacctggcttgtagcctcctctggaacctcatccgtcacctgctgcagcgtctctgggtgggccgctggctggcaggccgggcagggggcctgcagcaggactgtgctctgcgagtggatgctagcgccagcgcccgagacgcagccctggtctaccataagctgcaccagctgcacaccatggggaagcacacaggcgggcacctcactgccaccaacctggcgctgagtgccctgaacctggcagagtgtgcaggggatgccgtgtctgtggcgacgctggccgagatctatgtggcggctgcattgagagtgaagaccagtctcccacgggccttgcattttctgacacgcttcttcctgagcagtgcccgccaggcctgcctggcacagagtggctcagtgcctcctgccatgcagtggctctgccaccccgtgggccaccgtttcttcgtggatggggactggtccgtgctcagtaccccatgggagagcctgtacagcttggccgggaacccagtggaccccctggcccaggtgactcagctattccgggaacatctcttagagcgagcactgaactgtgtgacccagcccaaccccagccctgggtcagctgatggggacaaggaattctcggatgccctcgggtacctgcagctgctgaacagctgttctgatgctgcgggggctcctgcctacagcttctccatcagttccagcatggccaccaccaccggcgtagacccggtggccaagtggtgggcctctctgacagctgtggtgatccactggctgcggcgggatgaggaggcggctgagcggctgtgcccgctggtggagcacctgccccgggtgctgcaggagtctgagagacccctgcccagggcagctctgcactccttcaaggctgcccgggccctgctgggctgtgccaaggcagagtctggtccagccagcctgaccatctgtgagaaggccagtgggtacctgcaggacagcctggctaccacaccagccagcagctccattgacaaggccgtgcagctgttcctgtgtgacctgcttcttgtggtgcgcaccagcctgtggcggcagcagcagcccccggccccggccccagcagcccagggcaccagcagcaggccccaggcttccgcccttgagctgcgtggcttccaacgggacctgagcagcctgaggcggctggcacagagcttccggcccgccatgcggagggtgttcctacatgaggccacggcccggctgatggcgggggccagccccacacggacacaccagctcctcgaccgcagtctgaggcggcgggcaggccccggtggcaaaggaggcgcggtggcggagctggagccgcggcccacgcggcgggagcacgcggaggccttgctgctggcctcctgctacctgccccccggcttcctgtcggcgcccgggcagcgcgtgggcatgctggctgaggcggcgcgcacactcgagaagcttggcgatcgccggctgctgcacgactgtcagcagatgctcatgcgcctgggcggtgggaccactgtcacttccagctagaccccgtgtccccggcctcagcacccctgtctctagccactttggtcccgtgcagcttctgtcctgcgtcgaagctttgaaggccgaaggcagtgcaagagactctggcctccacagttcgacctgcggctgctgtgtgccttcgcggtggaaggcccgaggggcgcgatcttgaccctaagaccggcggccatgatggtgctgacctctggtggccgatcggggcactgcaggggccgagccattttggggggcccccctccttgctctgcaggcaccttagtggcttttttcctcctgtgtacagggaagagaggggtacatttccctgtgctgacggaagccaacttggctttcccggactgcaagcagggctctgccccagaggcctctctctccgtcgtgggagagagacgtgtacatagtgtaggtcagcgtgcttagcctcctgacctgaggctcctgtgctactttgccttttgcaaactttattttcatagattgagaagttttgtacagagaattaaaaatgaaattatttataatctg

SEQ ID NO: 316980 - DNA, 645 bp, Artificial Sequence
  derived and/or modified sequence
ctgatgcccgcctgcctgcccggcaagcacaccggcggccacctgaccgccaccaacctggccctgagcgccctgaacctggccgagtgcgccggcgacgccgtgagcgtggccaccctggccgagatctacgtggccgccgccctgagagtgaagaccagcctgcccagagccctgcacttcctgaccagattcttcctgagcagcgccagacaggcctgcctggcccagagcggcagcgtgccccccgccatgcagtggctgtgccaccccgtgggccacagattcttcgtggacggcgactggagcgtgctgagcaccccctgggagagcctgtacagcctggccggcaaccccgtggaccccctggcccaggtgacccagctgttcagagagcacctgctggagagagccctgaactgcgtgacccagcccaaccccagccccggcagcgccgacggcgacaaggagttcagcgacgccctgggctacctgcagctgctgaacagctgcagcgacgccgccggcgcccccgcctacagcttcagcatcagcagcagcatggccaccaccaccggcgacccctgccccggccagctgtgcacccccagcagactgcccggcccctgctgggccgtgccctag

SEQ ID NO: 316981 - DNA, 645 bp, Artificial Sequence
  derived and/or modified sequence
ctcatgcccgcctgccttccaggcaagcatactggaggacatcttaccgcgacgaatctcgccttatccgcactcaatcttgctgaatgcgctggagatgctgtatccgttgctacccttgccgagatttacgtagctgcagcgctgcgtgtgaagaccagcctaccgcgtgcccttcattttctgacccgtttcttcctgtcatctgctcgtcaagcctgtctcgcccagagtggttccgtgcctcccgccatgcagtggctgtgccatccagtaggacaccggttcttcgtggacggggattggtccgtgctgtctactccctgggaaagtctctactccctagcgggaaatcctgttgacccactggcacaggttacgcagctcttccgcgaacacctgctggagagagctttaaattgcgtgacccaacctaaccccagtcctggatcagctgatggggacaaggagtttagcgacgccctggggtatctgcagttgctcaacagctgttccgacgccgcaggggctcctgcgtactccttttcgataagctcgtccatggcaactaccacgggcgatccctgtcccggtcagctgtgtactccttccagactccctggcccttgctgggctgttccttag

SEQ ID NO: 316982 - DNA, 645 bp, Artificial Sequence
  derived and/or modified sequence
ctgatgcctgcctgcctgcccgggaagcacactggaggccacctgacagccaccaacctggccctgagcgccctgaacctggctgaatgtgctggagatgctgtgtctgtggccaccctggccgagatctacgtggccgccgccctgcgggtgaagaccagcctgccccgggccctgcacttcctgacccgcttcttcctgagcagcgcccggcaggcctgcctggcccagagcggctctgtgcccccagccatgcagtggctgtgccaccctgtgggccaccgcttctttgtggatggagactggagcgtgctgagcaccccctgggagagcctgtacagcctggccggcaaccctgtggaccccctggcccaggtgacccagctgttccgggagcacctgctggagcgggccctgaactgtgtgacccagcccaaccccagccctggcagcgcagatggagacaaggagttcagtgatgccctgggctacctgcagctgctgaacagctgcagtgatgctgctggggccccagcctacagcttcagcatcagcagctccatggccaccaccaccggggacccctgccccggccagctgtgcacccccagccggctgcccggcccctgctgggccgtgccctag

SEQ ID NO: 316983 - DNA, 645 bp, Artificial Sequence
  derived and/or modified sequence
ctgatgcccgcctgcctgcccggcaagcacaccggcggccacctgaccgccacaaatcttgctttgagcgcactgaaccttgcagagtgcgccggagatgcggtctctgtggctactttggctgagatctacgtggcggctgcgctacgagtaaaaacctcactgccccgcgccctgcatttcctgacacgattctttttaagctccgcacgacaggcttgcctggctcagtcaggatcagtgcctcccgctatgcagtggctctgccacccggtgggccaccgcttctttgtagacggcgactggtccgttctaagcaccccgtgggaatcactgtacagtctggctggcaaccctgtcgatccactggctcaggtaacacaactctttcgggaacatctactcgaaagggcacttaattgcgttacacaaccaaaccccagtcctggatccgctgatggggataaggagttcagtgacgcacttggatatctccaactgttaaacagctgtagcgacgcagcaggtgctcccgcctactccttcagtatctccagctcaatggctacaaccacaggtgatccctgtcccgggcagctgtgcactccgtctagactcccagggccctgctgggctgtaccatag

SEQ ID NO: 316984 - DNA, 645 bp, Artificial Sequence
  derived and/or modified sequence
ttgatgccagcgtgtctgccagggaaacacaccgggggtcaccttaccgcgactaatcttgctctgtctgctctcaacctggccgagtgcgccggtgacgccgtgtcggtcgcgaccttagccgaaatttacgtggccgcagccctcagagtcaagacctcgctgcccagagcactacattttctgacccgtttttttttgagctccgcgagacaagcctgccttgcgcaaagcggctcagtccctccagctatgcagtggctttgccaccctgtggggcataggttttttgttgacggagactggtcagtgctgtccacaccctgggagagcctttacagccttgctggaaatccagttgatcccctcgcccaggtgacgcagctgttccgtgagcatctgcttgaacgagccttgaactgtgtgacccagcccaacccaagtcccggatctgccgacggagacaaagagttttctgatgcccttggctacctccagcttttgaactcctgctcagacgctgccggagcaccggcatactctttctctatatcaagcagcatggcaacaaccactggagatccatgcccaggccagctttgcaccccttcccgattgcctgggccatgctgggctgtgccttag

SEQ ID NO: 316985 - DNA, 644 bp, Artificial Sequence
  derived and/or modified sequence
ctcatgcctgcttgccttccagggaagcacacaggcgggcacctcactgccaccaacctggcgctgagtgccctgaacctggcagagtgtgcaggggatgccgtgtctgtggcgacgctggccgagatctatgtggcggctgcattgagagtgaagaccagtctcccacgggccttgcattttctgacacgcttcttcctgagcagtgcccgccaggcctgcctggcacagagtggctcagtgcctcctgccatgcagtggctctgccaccccgtgggccaccgtttcttcgtggatggggactggtccgtgctcagtaccccatgggagagcctgtacagcttggccgggaacccagtggaccccctggcccaggtgactcagctattccgggaacatctcttagagcgagcactgaactgtgtgacccagcccaaccccagccctgggtcagctgatggggacaaggaattctcggatgccctcgggtacctgcagctgctgaacagctgttctgatgctgcgggggctcctgcctacagcttctccatcagttccagcatggccaccaccaccggagacccctgcccagggcagctctgcactccttcaaggctgcccgggccctgctgggctgtgccaag

SEQ ID NO: 316986 - protein, 389 aa, Artificial Sequence
  derived and/or modified sequence
  misc_feature (1)..(1): Xaa can be any naturally occurring amino acid
XSRAAMEMALRGVRKVLCVAEKNDAAKGIADLLSNGRMRRREGLSKFNKIYEFDYHLYGQNVTMVMTSVSGHLLAHDFQMQFRKWQSCNPLVLFEAEIEKYCPENFVDIKKTLERETRQCQALVIWTDCDREGENIGFEIIHVCKAVKPNLQVLRARFSEITPHAVRTACENLTEPDQRVSDAVDVRQELDLRIGAAFTRFQTLRLQRIFPEVLAEQLISYGSCQFPTLGFVVERFKAIQAFVPEIFHRIKVTHDHKDGIVEFNWKRHRLFNHTACLVLYQLCVEDPMATVVEVRSKPKSKWRPQALDTVELEKLASRKLRINAKETMRIAEKLYTQGYISYPRTETNIFPRDLNLTVLVEQQTPDPRWGAFAQSILERGGPTPRNGNK

SEQ ID NO: 316987 - DNA, 1170 bp, Artificial Sequence
  derived and/or modified sequence
tgaagcagagccgccatggagatggccctgagaggcgtgagaaaggtgctgtgcgtggccgagaagaacgacgccgccaagggcatcgccgacctgctgagcaacggcagaatgagaagaagagagggcctgagcaagttcaacaagatctacgagttcgactaccacctgtacggccagaacgtgaccatggtgatgaccagcgtgagcggccacctgctggcccacgacttccagatgcagttcagaaagtggcagagctgcaaccccctggtgctgttcgaggccgagatcgagaagtactgccccgagaacttcgtggacatcaagaagaccctggagagagagaccagacagtgccaggccctggtgatctggaccgactgcgacagagagggcgagaacatcggcttcgagatcatccacgtgtgcaaggccgtgaagcccaacctgcaggtgctgagagccagattcagcgagatcaccccccacgccgtgagaaccgcctgcgagaacctgaccgagcccgaccagagagtgagcgacgccgtggacgtgagacaggagctggacctgagaatcggcgccgccttcaccagattccagaccctgagactgcagagaatcttccccgaggtgctggccgagcagctgatcagctacggcagctgccagttccccaccctgggcttcgtggtggagagattcaaggccatccaggccttcgtgcccgagatcttccacagaatcaaggtgacccacgaccacaaggacggcatcgtggagttcaactggaagagacacagactgttcaaccacaccgcctgcctggtgctgtaccagctgtgcgtggaggaccccatggccaccgtggtggaggtgagaagcaagcccaagagcaagtggagaccccaggccctggacaccgtggagctggagaagctggccagcagaaagctgagaatcaacgccaaggagaccatgagaatcgccgagaagctgtacacccagggctacatcagctaccccagaaccgagaccaacatcttccccagagacctgaacctgaccgtgctggtggagcagcagacccccgaccccagatggggcgccttcgcccagagcatcctggagagaggcggccccacccccagaaacggcaacaagtag

SEQ ID NO: 316988 - DNA, 1170 bp, Artificial Sequence
  derived and/or modified sequence
taaagtagggccgccatggagatggctcttcggggtgtccgaaaagtgttatgcgtggcagagaagaacgacgctgctaaaggcattgcggatctgttgtcaaacgggcgtatgcggaggagggaggggctaagcaagttcaataaaatctacgagtttgactatcacctttacggccaaaatgtgacgatggttatgacttctgtgtcaggccatctcctcgcacacgattttcagatgcagttcaggaagtggcagtcgtgcaacccgttggttttgttcgaggcagaaatcgagaagtattgtcccgagaacttcgtagacattaaaaagaccctcgaaagggagactcgccagtgtcaggctctcgtgatctggacagactgtgaccgagagggtgaaaatataggcttcgagattatccatgtctgtaaagctgtcaaaccaaaccttcaggtcctgagggccaggttcagcgagatcacccctcatgccgtgaggaccgcttgtgagaatctgaccgaaccagatcagagagtctcagatgctgttgacgtgcgtcaggagctggaccttaggattggagcggcctttaccagatttcagacccttcgcttacagagaatttttcctgaggtgctcgccgagcaacttatctcttatgggagctgtcagtttccaacactcggctttgttgtcgagagatttaaagcaatccaggctttcgtccctgagatctttcatcggattaaagtgactcacgatcacaaggacggcatcgtcgagttcaactggaagcggcatcgcttattcaatcacacagcctgcctggtgttgtatcaactgtgcgtcgaggatcccatggcaacagtggtggaggttcggtcaaagccaaagtccaagtggaggccacaggcactggacaccgtggagctcgaaaagttggccagtcgaaaactgagaatcaacgctaaggagacgatgcgaatagctgagaagctgtatacgcagggctacatctcctaccccaggaccgaaacaaacatcttccccagggaccttaacttgacagttttagtcgagcagcaaacccccgatcccagatggggcgcctttgcccagagcatcttggaaagaggaggtcctaccccgcgaaacggtaataagtag

SEQ ID NO: 316989 - DNA, 1170 bp, Artificial Sequence
  derived and/or modified sequence
tgaagccgggccgccatggagatggccctgcggggcgtgaggaaggtgctgtgtgtggccgagaagaatgatgctgccaagggcattgctgacctgctgagcaatggaaggatgagaagaagagagggcctgagcaagttcaacaagatctatgaatttgactaccacctgtatggccagaatgtgaccatggtgatgacctctgtgtctggccacctgctggcccatgacttccagatgcagttcaggaagtggcagagctgcaaccccctggtgctgtttgaggccgagattgagaagtactgcccagagaactttgtggacatcaagaagaccctggagcgggagacccggcagtgccaggccctggtgatctggacagactgtgaccgggagggggagaacatcggctttgagatcatccacgtgtgcaaggctgtgaagcccaacctgcaggtgctgcgggcccgcttcagcgagatcacccctcatgctgtgaggacagcctgtgagaacctgacagagccagaccagagggtgtctgatgctgtggatgtgcggcaggagctggacctgcgcatcggggccgccttcacccgcttccagaccctgcggctgcagaggatcttccctgaggtgctggccgagcagctgatctcctatggcagctgccagttccccaccctgggctttgtggtggagcgcttcaaggccatccaggcctttgtgcctgagatcttccaccgcatcaaggtgacccatgaccacaaggatggcatcgtggagttcaactggaagaggcacaggctcttcaaccacacagcctgcctggtgctgtaccagctgtgtgtggaggaccccatggccaccgtggtggaggtgcgcagcaagcccaagagcaagtggaggccccaggccctggacacagtggagctggagaagctggccagcaggaagctgcgcatcaatgccaaggagaccatgagaattgctgagaagctgtacacccagggctacatctcctaccccaggacagagaccaacatcttcccccgggacctgaacctgactgtgctggtggagcagcagaccccagacccccgctggggcgcctttgcccagagcatcctggagcggggcggccccaccccaagaaatggaaacaagtag

SEQ ID NO: 316990 - DNA, 1170 bp, Artificial Sequence
  derived and/or modified sequence
tgaagccgggccgccatggagatggccctgcggggcgtgcggaaggtactgtgcgtggctgagaaaaatgacgcagccaagggcattgcggatttactgtccaacggacgtatgagaaggcgggagggattatcgaaattcaacaagatctacgagtttgattatcacctgtacgggcaaaacgtgaccatggttatgacttctgtaagcggtcatctgttggcacacgacttccagatgcagttcagaaaatggcagtcatgcaaccccctcgtgctcttcgaagccgagatcgagaagtattgtcctgagaactttgtggacataaagaaaacgctggagagggaaacccggcagtgccaggccttagtgatttggacagattgcgatagagagggtgagaatatcgggtttgagataattcatgtttgcaaggcggtcaagcccaatctgcaggtgcttagagctcgcttcagtgagatcacaccccatgcagtgcggactgcctgtgagaatcttacagaacctgaccaacgagtctctgatgcggtggatgtccgccaggagctcgaccttagaattggcgccgcctttacgcgatttcagaccttgagactgcagaggatatttccggaggtgttagccgagcagttaatcagctatggctcttgccagttcccgactctcggatttgtagtagagagattcaaggcaatccaagctttcgtgcctgagatcttccatcggattaaggttactcacgatcataaagacggaattgtggagttcaactggaagcgacacaggctattcaatcacactgcctgccttgtactctatcaactctgtgtggaagaccctatggctacagtggtcgaggtacggagcaagccaaagtctaaatggcgtccccaagctctggatacggtggaactggagaaactcgcttctcgcaagttgcgcattaatgcaaaggagactatgcgcattgctgaaaagctatatacgcaggggtacattagttaccctaggaccgagaccaatatcttccctcgggacctgaacctgacggtgctggtggagcagcaaacaccagaccccagatggggggcatttgcccagagtatcctggagcggggaggaccaactccacgaaatggtaacaagtag

SEQ ID NO: 316991 - DNA, 1170 bp, Artificial Sequence
  derived and/or modified sequence
tgatcacgtgccgctatggagatggctttgcggggagtcagaaaagttctttgtgtggctgagaaaaacgacgcggcaaaagggatagctgatttgctgtcaaacggcagaatgaggcgtcgagagggactatcgaagttcaataagatttatgagtttgattatcacctatacgggcaaaacgtgaccatggtgatgacctccgtcagcggccaccttctcgcacatgattttcagatgcaattccgtaaatggcagtcatgcaatccgttggtactgttcgaggcagagattgagaaatattgtcctgagaactttgtggatattaagaagacgttggaacgagaaactcggcaatgtcaggcactggtcatctggacggattgcgaccgtgaaggcgagaacatcggtttcgagattatccatgtctgcaaggccgtgaagcccaatcttcaagtgctcagagccaggttttcagagatcacacctcatgccgtgcgcaccgcttgcgaaaatctgaccgagccagaccaaagagtgtcagatgccgtcgacgtgcggcaggagctcgacctgaggatcggcgctgccttcacgcgattccagacgcttcgattgcagaggatctttcccgaagtgttagcggaacagcttatcagctacgggtcttgccaattccctaccctcggatttgtcgtggagagattcaaggctatccaggcgtttgtacctgagattttccataggattaaggtgacacatgatcataaagatggtattgtggagttcaactggaagcgacacaggctctttaaccacactgcctgtctggtgctatatcagctgtgtgttgaggacccgatggctaccgtggtcgaggttcggtctaaacctaagagcaaatggcgcccacaggcactggatacggttgagctagaaaagctggcatctcgtaaactccgcatcaacgccaaagagaccatgaggatagctgagaagctatacacccaaggttacatctcatacccacgaaccgagaccaacatatttccaagggatttaaatttaacagtgttagtagaacagcaaactccggatccacggtggggagcttttgcccagagtattctagagcggggagggccaaccccccgtaacggtaacaaatag

SEQ ID NO: 316992 - DNA, 1581 bp, Artificial Sequence
  derived and/or modified sequence
ttcccgcgccgccatggagatggccctccgaggcgtgcggaaagtcctctgtgtggccgaaaaaaacgacgcggccaaggggatcgccgacctgctgtcaaacggtcgcatgaggcggagagaaggactttcaaaattcaacaagatctatgaatttgattatcatctgtatggccagaatgttaccatggtaatgacttcagtttctggacatttactggctcatgatttccagatgcagtttcgaaaatggcagagctgcaaccctcttgtcctctttgaagcagaaattgaaaagtactgcccagagaattttgtagacatcaagaaaactttggaacgagagactcgccagtgccaggctctggtgatctggactgactgtgatagagaaggcgaaaacatcgggtttgagattatccacgtgtgtaaggctgtaaagcccaatctgcaggtgttgcgagcccgattctctgagatcacaccccatgccgtcaggacagcttgtgaaaacctgaccgagcctgatcagagggtgagcgatgctgtggatgtgaggcaggagctggacctgaggattggagctgcctttactaggttccagaccctgcggcttcagaggatttttcctgaggtgctggcagagcagctcatcagttacggcagctgccagttccccacactgggctttgtggtggagcggttcaaagccattcaggcttttgtaccagaaatcttccacagaattaaagtaactcatgaccacaaagatggtatcgtagaattcaactggaaaaggcatcgactctttaaccacacggcttgcctagttctctatcagttgtgtgtggaggatcccatggcaactgtggtagaggtcagatctaagcccaagagcaagtggcggcctcaagccttggacactgtggagcttgagaagctggcttctcgaaagttgagaataaatgctaaagaaaccatgaggattgctgagaagctctacactcaagggtacatcagctatccccgaacagaaacaaacatttttcccagagacttaaacctgacggtgttggtggaacagcagacccccgatccacgctggggggcctttgcccagagcattctagagcggggtggtcccaccccacgcaatgggaacaagtgatctaccagcctcggcctcccaaagtgctaggattaacaggcaggagccatcacacctggtctcttcccccatttttaaattgtgttgtctgtctttgttgttgagttgtaggagttcttaatagtttctggatatcagatgcctttgtggttttcacatctctgcaggcaactgtgtgtctcaaaagcaaactgcaggattgggctgcaccatggactgggccaggcatctgagatcagacagacccaggctcagctcccacttcctggcctcttctgccaccctgggtgtgcagcctcatccttggagccccagttgcctcatccgtaatggggtgtccttgttcatattgaggctctctagtgaaggcttacggtcaggcacgactgcaaattaaagcttcacaaatcaaa

SEQ ID NO: 316993 - DNA, 1596 bp, Artificial Sequence
  derived and/or modified sequence
atgatcctggccagaaactacctggacgtgtacccctacgaccactggagcgacaagatcctgcccgtgtacgagcagggcagccacttccagcccagcaccgtggagatggtggacggcgagaccagcccccccaagctgctgaccgaggccgacctgatcgccctgatggagaagcacggcatcggcaccgacgccacccacgccgagcacatcgagaccatcaaggccagaatgtacgtgggcctgacccccgacaagagattcctgcccggccacctgggcatgggcctggtggagggctacgacagcatgggctacgagatgagcaagcccgacctgagagccgagctggaggccgacctgaagctgatctgcgacggcaagaaggacaagttcgtggtgctgagacagcaggtgcagaagtacaagcaggtgttcatcgaggccgtggccaaggccaagaagctggacgaggccctggcccagtacttcggcaacggcaccgagctggcccagcaggaggacatctaccccgccatgcccgagcccatcagaaagtgcccccagtgcaacaaggacatggtgctgaagaccaagaagaacggcggcttctacctgagctgcatgggcttccccgagtgcagaagcgccgtgtggctgcccgacagcgtgctggaggccagcagagacagcagcgtgtgccccgtgtgccagccccaccccgtgtacagactgaagctgaagttcaagagaggcagcctgccccccaccatgcccctggagttcgtgtgctgcatcggcggctgcgacgacaccctgagagagatcctggacctgagattcagcggcggcccccccagagccagccagcccagcggcagactgcaggccaaccagagcctgaacagaatggacaacagccagcacccccagcccgccgacagcagacagaccggcagcagcaaggccctggcccagaccctgcccccccccaccgccgccggcgagagcaacagcgtgacctgcaactgcggccaggaggccgtgctgctgaccgtgagaaaggagggccccaacagaggcagacagttcttcaagtgcaacggcggcagctgcaacttcttcctgtgggccgacagccccaaccccggcgccggcggcccccccgccctggcctacagacccctgggcgccagcctgggctgcccccccggccccggcatccacctgggcggcttcggcaaccccggcgacggcagcggcagcggcaccagctgcctgtgcagccagcccagcgtgaccagaaccgtgcagaaggacggccccaacaagggcagacagttccacacctgcgccaagcccagagagcagcagtgcggcttcttccagtgggtggacgagaacaccgcccccggcaccagcggcgcccccagctggaccggcgacagaggcagaaccctggagagcgaggccagaagcaagagacccagagccagcagcagcgacatgggcagcaccgccaagaagcccagaaagtgcagcctgtgccaccagcccggccacaccagacccttctgcccccagaacagatag

SEQ ID NO: 316994 - DNA, 1596 bp, Artificial Sequence
  derived and/or modified sequence
atgatccttgctcgcaattatctcgacgtatacccctacgaccactggagcgataaaatactcccagtttacgaacagggatctcactttcagcccagcacggtcgaaatggtggacggcgaaacatcaccaccaaaactactgacggaggccgaccttatagctctcatggagaaacacgggattggcacagacgcaacacacgccgagcatattgagaccatcaaagccaggatgtatgtaggcctgacgcctgacaaacggtttctacccgggcacctgggaatgggcttggtcgaaggttatgattcaatgggttatgagatgagcaaaccagacctgcgcgcagaattggaagctgaccttaagctcatatgcgacgggaaaaaagacaaattcgtggtcctgaggcagcaggtgcagaagtataagcaggtcttcatagaggcagtggccaaagccaagaagctcgatgaagctttagctcaatattttggcaacggcaccgagttggctcagcaggaggacatctatcctgccatgccggaaccgatccggaaatgcccgcagtgtaataaagacatggtactgaaaacgaaaaaaaacggggggttctatctgtcttgcatgggctttccagagtgccgctcagctgtgtggctgccagattcagtgctggaggcctcaagggattctagtgtctgccccgtttgccagccacacccggtctatcggttgaagcttaaattcaaaagaggtagcttacctcccaccatgcccttagagttcgtatgctgcattggagggtgcgatgatacattgcgcgaaatcctggaccttagattctctggggggccccccagggcttctcagccctccgggagactccaagccaatcagtccttgaaccgtatggataactcacaacacccccaacctgcagattcacgccagacggggtccagcaaagccctcgcgcagacattgcccccacctactgccgccggggagtctaatagtgtcacgtgcaattgtggtcaagaggctgtcttacttacggtgcgcaaagaaggccccaacagaggccggcaattctttaaatgcaatggaggctcctgcaatttctttttgtgggcagattcacccaatcccggcgccggcggcccccctgctttagcatatcggcctctcggcgcttcccttgggtgccctcctggtccagggatccatcttggtggattcggcaaccctggcgatggctccgggagtggtacctcttgtctgtgctcacagcctagtgtgacccggacggtgcaaaaagacggccccaacaaaggccgccaattccacacctgtgcaaagcctagggagcagcagtgtggcttctttcagtgggtggatgagaataccgctcccggtacaagtggagccccttcctggacgggagaccggggtagaacactcgagagtgaggcacgatcaaagcggccgcgcgcctcatcgagcgacatggggtccaccgctaagaaaccacgcaaatgtagcttatgccaccagcctggtcacaccaggcctttctgccctcaaaatagatag

SEQ ID NO: 316995 - DNA, 1596 bp, Artificial Sequence
  derived and/or modified sequence
atgatcctggccaggaactacctggatgtgtacccctatgaccactggagcgacaagatcctgcctgtgtatgagcagggcagccacttccagcccagcacagtggagatggtggatggagagaccagcccccccaagctgctgacagaagctgacctgattgccctgatggagaagcacggcatcggcacagatgccacccatgctgagcacatcgagaccatcaaggccaggatgtatgtgggcctgaccccagacaagcgcttcctgcccggccacctgggcatgggcctggtggagggctatgacagcatgggctatgagatgagcaagccagacctgcgggcagagctggaggccgacctgaagctgatctgtgatggcaagaaggacaagtttgtggtgctgcggcagcaggtgcagaagtacaagcaggtgttcatcgaggccgtggccaaggccaagaagctggatgaggccctggcccagtactttggaaatggaacagagctggcccagcaggaggacatctacccagccatgcctgagcccatcagaaaatgtccccagtgcaacaaggacatggtgctgaagaccaagaagaatggaggcttctacctgagctgcatgggcttccctgagtgccgctctgctgtgtggctgcctgacagcgtgctggaggccagccgggacagctctgtgtgccctgtgtgccagccccaccctgtgtaccgcctgaagctgaagttcaagaggggcagcctgccccccaccatgcccctggagtttgtgtgctgcattggaggctgtgatgacaccctgcgggagatcctggacctgcgcttcagcggcggccccccccgggccagccagcccagcggccgcctgcaggccaaccagagcctgaacaggatggacaacagccagcacccccagcctgctgacagccggcagacaggcagcagcaaggccctggcccagaccctgcccccacccacagctgctggggagagcaacagcgtgacctgcaactgtggccaggaggccgtgctgctgactgtgaggaaggagggccccaacagaggccggcagttcttcaagtgcaatggaggcagctgcaacttcttcctgtgggccgacagccccaaccctggggccggcggccccccagccctggcctaccggcccctgggcgccagcctgggctgccccccaggccctggcatccacctgggcggcttcggcaaccctggagatggcagcggcagcggcaccagctgcctgtgcagccagcccagcgtgaccaggacagtgcagaaggatggccccaacaagggccggcagttccacacctgtgccaagccccgggagcagcagtgtggcttcttccagtgggtggatgagaacacagcccctggcaccagcggggcccccagctggacaggagaccggggccgcaccctggagagcgaggcccggagcaagaggccccgggccagcagcagtgacatgggcagcacagccaagaagcccaggaagtgcagcctgtgccaccagcccggccacacccggcccttctgcccccagaacagatag

SEQ ID NO: 316996 - DNA, 1596 bp, Artificial Sequence
  derived and/or modified sequence
atgatcctggcccggaactacctggacgtgtacccctacgaccactggtcagacaagatcctgccagtgtatgagcagggatctcacttccagccaagtacggtggaaatggtcgatggggaaacctctcccccgaagctgctaactgaggccgacttaattgctttaatggaaaagcacggcattggtactgacgcaacccacgctgaacatatcgagacaatcaaagcgaggatgtatgtcgggctaacacccgacaagaggtttttgccaggtcacctgggtatgggcctcgtagagggctacgatagtatgggatacgagatgagcaaaccagatttgcgcgccgagttagaagctgaccttaagttaatctgtgacggcaagaaagataagtttgttgtgttgagacagcaagttcagaaatacaagcaggtgtttatcgaggctgtcgcaaaggccaagaagctggacgaggctcttgctcagtatttcggaaacgggaccgaacttgcccaacaggaggatatctatccagcaatgcccgaaccaatccgcaaatgcccccagtgcaacaaggatatggtcctgaagacaaaaaagaatgggggcttttatctgagctgcatggggttccccgagtgccgctccgcagtgtggctgcctgattctgtcctggaggcctcacgggattcctcagtatgtcccgtttgtcagccccatcctgtgtatcggctgaagttgaagtttaaacgtggatctctcccccctacgatgcctctcgagttcgtgtgctgtatcggcggctgcgatgatactttgcgagaaattctggacttacgtttctctggtggaccgccacgggcctcccagccatcaggtagattgcaggctaatcagagtttgaatcgaatggacaattcacagcaccctcagccagccgactcgaggcaaaccggctcttccaaagccttggcgcagacgctccctccccctactgctgctggggagtctaactcggtgacgtgtaattgcggacaggaggctgtcctgttgactgttcggaaggagggcccgaacaggggcaggcagtttttcaagtgtaacggcgggagctgtaattttttcctgtgggccgatagtcctaaccctggggccgggggaccccccgctctggcctaccggcccctgggggcttccctggggtgtccgcctggacccggcattcatctaggaggattcggcaaccccggagatggcagcgggagcggaacctcatgtttgtgctctcagccctcagtgaccaggaccgtccagaaggatggtccgaataagggcaggcagttccatacctgcgcaaagcctcgcgaacagcagtgtgggttcttccagtgggtggacgaaaacacagctccaggaacttcaggtgcgccttcctggaccggagatcggggcaggacacttgagtcggaagccagatccaaaaggcctagagcctcctcctccgacatgggctcaaccgcaaaaaaacccagaaaatgcagcctttgccaccagccaggccacacaagacccttctgcccacagaacaggtag

SEQ ID NO: 316997 - DNA, 1596 bp, Artificial Sequence
  derived and/or modified sequence
atgattctggctcggaattacctcgatgtgtacccgtacgatcattggagcgataagattctgcccgtttacgaacagggttctcatttccaaccaagcacagtggagatggtagacggcgaaacctccccgccaaagctcctgaccgaagcggatcttatcgctctgatggagaaacacggtataggcactgacgccacccatgcggaacatatagaaactattaaagcccgtatgtacgtgggtttgactcccgacaagcgttttctgcctgggcaccttgggatgggtctggttgagggatatgactcgatgggctacgaaatgtccaagcccgatctgagggcagaattagaggcggatctgaaactgatatgtgacgggaagaaagacaagttcgtggtgttgaggcagcaagttcagaaatacaaacaggtctttatagaggccgtggccaaggctaaaaagctggacgaagcccttgctcaatactttggcaatggcactgagctcgctcagcaggaggacatctatccagcgatgccagagcccatccgcaagtgtccccagtgcaacaaagatatggttctgaaaaccaagaaaaacggaggtttctacctgtcatgcatgggatttcctgaatgtaggagcgcagtgtggctacctgactccgtcttggaagccagtcgagatagttctgtttgccctgtttgtcagcctcaccctgtgtacaggttaaagttaaagttcaaacggggaagtctgccgcctaccatgccattagagtttgtctgttgcatcgggggatgtgacgatactctccgtgaaatactggatttgaggttctcagggggaccaccgagagctagtcaacccagtggaaggttgcaggctaatcagtcgctgaacagaatggacaattcccagcacccacaacccgcagactcacggcagacagggagctccaaggcactggctcagacactgcccccacctaccgctgcaggcgagtccaattctgtgacatgtaattgcggccaagaggccgttctgctgacagtgcggaaggaaggaccaaacaggggcaggcagttttttaagtgcaacgggggaagctgcaatttcttcctgtgggccgattcacctaacccaggggctggagggccacctgcattggcctatagacctctgggtgccagcttgggatgccctcccggtccaggcatacaccttggagggtttggaaatcccggagatggtagtggctccgggacaagctgtctatgcagccaaccatcagtgactaggactgtacagaaggacggccctaacaagggtcggcaatttcacacctgcgcaaaaccaagggaacagcagtgcgggttttttcagtgggtggatgagaacaccgccccaggcacaagcggtgccccttcttggacaggggaccgcggaagaaccttggaaagtgaagcgcgttccaagcggccacgagctagctcttctgacatgggcagcaccgcaaagaaacccaggaagtgttctctttgtcaccaacccggacacacacggcctttctgtcctcagaatagatag

SEQ ID NO: 316998 - DNA, 606 bp, Artificial Sequence
  derived and/or modified sequence
atgaaggagctgagcctgaaggccagccccctgagaagcgagaccgccgagggcatcgtggtggtgaccacctggatcgagaagatcctgaccgacctgaaggtgcagcacaagagagtgccctgcggcaaggaggaggtgagcctgttcctgaccgccatcgagaacagctggatccacctgagaagaaagaagagagagagagtgagacagctgagagaggtgcccagagcccccgaggacgtgatccaggccctggaggagaagaagcccacccccaaggagagcggcaacagccaggagctggccagaggcccccaggagagaaccccctgcggccccgccctgagagagggcgaggccgccgccgtggagggcccctgccccagccaggagagcctgagccaggaggagaaccccgagcccaccgaggacgagagaagcgaggagaagggcggcgtggaggtgctggagagctgccagggcagcagcaacggcgcccaggaccaggaggcctgctggctgaagctggccccccagctgtggaccgccagcgccagaagcgagggcctgttcgtggagagcggcctgggcagcaccgcctag

SEQ ID NO: 316999 - DNA, 1035 bp, Artificial Sequence
  derived and/or modified sequence
atggccgagggcggcgagctggagttcgtgaagagaatcatccacgacagcctgcagctgaagaagagactgagatggtacagctgcatgctgggcaagaagtgcagcctggcccccctgaaggaggagctgagaatccagggcgtgcccaaggtgacctacaccgagttctgccagggcagaaccatgagatgggccctggcctggagcttctacgacgacgtgaccgtgcccagcccccccagcaagagaagaaagctggagaagcccagaaagcccatcaccttcgtggtgctggccagcgtgatgaaggagctgagcctgaaggccagccccctgagaagcgagaccgccgagggcatcgtggtggtgaccacctggatcgagaagatcctgaccgacctgaaggtgcagcacaagagagtgccctgcggcaaggaggaggtgagcctgttcctgaccgccatcgagaacagctggatccacctgagaagaaagaagagagagagagtgagacagctgagagaggtgcccagagcccccgaggacgtgatccaggccctggaggagaagaagcccacccccaaggagagcggcaacagccaggagctggccagaggcccccaggagagaaccccctgcggccccgccctgagagagggcgaggccgccgccgtggagggcccctgccccagccaggagagcctgagccaggaggagaaccccgagcccaccgaggacgagagaagcgaggagaagggcggcgtggaggtgctggagagctgccagggcagcagcaacggcgcccaggaccaggaggccagcgagcagttcggcagccccgtggccgagagaggcaagagactgcccggcgtggccggccagtacctgttcaagtgcctgatcaacgtgaagaaggaggtggacgacgccctggtggagatgcactgggtggagggccagaacagagacctgatgaaccagctgtgcacctacatcagaaaccagatcttcagactggtggccgtgaactag

SEQ ID NO: 317000 - DNA, 606 bp, Artificial Sequence
  derived and/or modified sequence
atgaaagagttgtccttgaaggcttcccccctgcgttctgaaactgctgaaggtatcgtggtggtcacaacttggatcgagaagatcctgacggatttgaaagttcagcacaaaagagtgccctgcggcaaagaggaggtgtccctgttcctcaccgccattgagaacagctggatccatttgagacgaaaaaaacgagaacgggtccggcagctcagagaagtgccaagagccccagaagacgtcatccaggctcttgaagagaagaagccgactcctaaggaatctggaaactctcaggagctagcccgtgggccacaagagcgcaccccatgcggccccgctttaagggagggcgaagcggccgctgtagaggggccatgcccctcacaggagtcactttcacaagaggaaaaccccgaaccaactgaggatgagcgctctgaagagaaaggaggcgttgaggtactcgaatcttgtcaaggcagtagtaatggagcccaggaccaagaagcatgttggctcaagctcgccccacagctctggaccgcctcagcgagatctgaggggctattcgtcgagtcaggcttaggcagtaccgcgtag

SEQ ID NO: 317001 - DNA, 1035 bp, Artificial Sequence
  derived and/or modified sequence
atggccgaaggaggggaactggaatttgtgaagagaatcatccacgattctctccagctgaaaaaacgtctcaggtggtactcttgcatgctgggaaaaaagtgcagcctcgccccactgaaggaggagctgaggattcagggggttccaaaagtcacatacaccgagttttgccagggaaggacgatgcggtgggccctcgcttggtccttttacgatgatgtcaccgtgccgtctcccccttcaaagcggcggaagctggaaaaaccaagaaagcctataacatttgttgtgctcgcctccgtgatgaaggagctgagcctgaaggcctcacctttgcggtctgagacggccgaaggcatcgtggtcgtaaccacgtggattgagaagatcttgaccgatcttaaggtccagcacaagcgagtgccctgtggcaaggaggaggtgtccttgttcctgactgccattgagaactcttggattcacttaagaagaaagaagcgggagagggttcgtcagttgcgcgaggtacctcgggcaccagaggacgtgatccaggccctggaagagaaaaaacccacaccaaaggagtccgggaactcccaggagctggcccggggaccacaggagcgcaccccttgcggcccagctttgcgcgaaggcgaagccgcagccgttgaggggccttgcccttcccaggaatcactgagtcaggaagaaaaccccgagccgaccgaggacgaacgttctgaagaaaagggaggcgttgaagtccttgagtcgtgccaggggagcagcaacggagctcaggaccaggaggccagcgagcagtttggatcccctgttgctgaacgcggaaagaggttaccaggagtcgcgggacaatatctctttaagtgcctgatcaatgtgaaaaaggaagtggacgatgccctagtggagatgcactgggtcgaagggcagaacagagatctgatgaaccagttatgtacttacatacggaaccagatttttaggctggtggccgtcaactag

SEQ ID NO: 317002 - DNA, 606 bp, Artificial Sequence
  derived and/or modified sequence
atgaaggagctgagcctgaaggccagccccctgcggagtgaaacagctgagggcatcgtggtggtgaccacctggattgagaagatcctgacagacctgaaggtgcagcacaagagggtgccctgtgggaaggaggaggtgtccctcttcctgacagccattgaaaattcctggatccacctgcggaggaagaagcgggagcgggtgcggcagctgcgggaggtgccccgggccccagaagatgtgatccaggccctggaggagaagaagcccacccccaaggagagcggcaacagccaggagctggcccggggcccccaggagaggaccccctgtggccctgccctgcgggagggggaggccgctgctgtggagggcccctgccccagccaggagagcctgagccaggaggagaaccctgagcccacagaagatgagaggtctgaggagaagggcggcgtggaggtgctggagagctgccagggcagcagcaatggagcccaggaccaggaggcctgctggctgaagctggccccccagctgtggacagccagcgcccggtctgagggcctgtttgtggagagcggcctgggcagcacagcctag

SEQ ID NO: 317003 - DNA, 1035 bp, Artificial Sequence
  derived and/or modified sequence
atggccgagggcggggagctggagtttgtgaagaggatcatccatgacagcctgcagctgaagaagaggctgcgctggtacagctgcatgctgggcaagaagtgcagcctggcccccctgaaggaggagctgcgcatccagggcgtgcccaaggtgacctacacagagttctgccagggccgcaccatgcgctgggccctggcctggagcttctatgatgatgtgacagtgcccagcccccccagcaagaggaggaagctggagaagcccaggaagcccatcacctttgtggtgctggcctctgtgatgaaggagctgagcctgaaggccagccccctgcggagtgaaacagctgagggcatcgtggtggtgaccacctggattgagaagatcctgacagacctgaaggtgcagcacaagagggtgccctgtgggaaggaggaggtgtccctcttcctgacagccattgaaaattcctggatccacctgcggaggaagaagcgggagcgggtgcggcagctgcgggaggtgccccgggccccagaagatgtgatccaggccctggaggagaagaagcccacccccaaggagagcggcaacagccaggagctggcccggggcccccaggagaggaccccctgtggccctgccctgcgggagggggaggccgctgctgtggagggcccctgccccagccaggagagcctgagccaggaggagaaccctgagcccacagaagatgagaggtctgaggagaagggcggcgtggaggtgctggagagctgccagggcagcagcaatggagcccaggaccaggaggccagcgagcagtttggcagccctgtggccgagcggggcaagaggctgcccggggtggccggccagtacctgttcaagtgcctgatcaacgtgaagaaggaggtggatgatgccctggtggagatgcactgggtggagggccagaacagagacctgatgaaccagctgtgcacctacatccggaaccagatcttccggctggtggccgtgaactag

SEQ ID NO: 317004 - DNA, 606 bp, Artificial Sequence
  derived and/or modified sequence
atgaaggagctgagcctgaaggccagccccctgcggagcgagaccgctgagggtattgtggtcgtgacaacctggatagaaaaaatcttgacggacctgaaggttcagcataaacgagttccttgcgggaaggaggaagtctcactttttcttacggccattgaaaatagctggatacacctgaggcggaagaaacgcgaaagggtgagacagctcagggaagtccccagggcccctgaggacgtgattcaggcgcttgaggagaaaaaacccacaccgaaggaatctggtaatagccaggagctcgctaggggccctcaggagcggacaccctgcggccccgcacttagggagggggaagcagccgccgtagaaggcccctgccctagtcaggagtccttatcacaagaagaaaatcccgaacccaccgaggatgaacgttcagaagaaaaaggtggcgtggaggtgctggaatcatgtcaggggagctcgaacggtgcccaagaccaggaggcctgttggctgaagctcgcaccccaactgtggaccgcctccgccagatccgaagggttatttgtggagagtggtcttgggtctactgcttag

SEQ ID NO: 317005 - DNA, 1035 bp, Artificial Sequence
  derived and/or modified sequence
atggccgagggcggcgagctggagttcgtgaagcggatcatccacgacagtttacagctcaagaagagactcagatggtattcttgtatgttggggaagaagtgctcgctggctcctctgaaagaagagctgagaatccagggcgtgcctaaggtgacttatacagagttttgtcagggcagaactatgcggtgggcgttggcctggtctttctacgatgacgtgactgtcccttcccctcccagtaagagaaggaaacttgaaaagcctagaaagccaataaccttcgtggtattagccagcgtgatgaaagagctgtctctcaaggcttctcccctcagatccgaaactgctgaagggatcgtggtggtcactacctggattgagaagattttaacggatctgaaggttcagcacaaacgcgtaccgtgtgggaaggaggaggtaagtctttttctgacagccatcgagaatagctggatccacctgcggcggaaaaagagggaacgcgtgagacagctcagagaggtacctcgagcacctgaggacgtgatacaggccctggaggagaagaagccgacacccaaggagtcgggcaacagccaggagctggcccggggcccccaggagaggaccccttgcgggcctgcactgagggagggggaagctgcagccgtggagggcccctgcccatctcaggaaagtctgtctcaagaggagaatccggagcccacagaagacgagcgcagtgaggagaaagggggggtggaggtcctcgagtcctgccaagggagcagcaatggagcacaagatcaggaggcctctgaacagtttggtagcccagtggctgagcgcggaaaacggctgccaggagtggctggtcaatacctgtttaaatgtcttatcaatgtgaaaaaggaagtagacgatgcgctggtcgaaatgcattgggtggaggggcagaacagagacctgatgaatcaactctgtacgtacatccggaaccagatcttccgcttggtggctgttaattag

SEQ ID NO: 317006 - DNA, 1720 bp, Artificial Sequence
  derived and/or modified sequence
atgcggctgctttaagattctagggttgtacaggcccacgccagacacgacgtctggcaggaacctcggcctcagagatggctctgagtaaatcaatgcatgcaagaaatagatacaaggacaaacctcctgactttgcatatctggcatccaaatatccagattttaagcagcatgttcagataaatctgaatggaagagtgagccttaattttaaagaccccgaagcagtcagagctctgacgtgtactctcctaagggaagattttggactttctattgatattccattggagagactaattcccacagttcccttgagactcaactatattcactgggtagaagatctgatcggtcaccaggattctgacaaaagtactctccgaagaggaattgacataggcacgggggcatcttgcatctaccccttacttggagcaaccttgaatggctggtatttcctcgcaacagaagtggatgatatgtgtttcaactatgcaaagaaaaatgtggaacagaataacttatctgatctcataaaagggagtaaactcacgaaatcctcgaagacctccgcctagttctgttaatacaggaggcatcacagagatcatggcagaaggaggtgaattagagtttgttaaaaggatcatccatgacagtctacaacttaaaaaaagattaagatggtatagctgcatgctgggaaagaaatgcagcctggcgcctctgaaggaggagcttcgcatacaaggggttcccaaagtaacgtacactgaattctgtcaaggtcggacaatgagatgggccttagcttggagtttttatgatgatgtcacagtaccatgctgctataggtaaaggaaaaccacctctgagctggccagactgaatgattttccgggcagtgacagaacagcatctgttgcttctcacagttccctcccaggtgtggttggcttcttgttgcctggagattcccagctgaagtgtctgcacacactgcccagcagtcaccaccaagtaagcgaagaaaattagagaaaccgagaaaacccataacattcgtggtgctggcgtccgtgatgaaggaattatccctcaaagcatcacctctgcgctcggagacggcggaaggcatagtcgttgtcacgacatggattgaaaaaattctcactgatttgaaggtccagcataaacgagttccctgtggaaaagaggaagtcagccttttcctaacggccatagaaaactcctggattcatttaaggagaaagaaaagagagcgtgtgagacagctgagagaagttccccgagctcctgaggacgtcattcaggccttggaagagaaaaagcccacccccaaagagtctggcaatagccaagaactggccaggggcccccaggagaggaccccctgtgggcctgctctgcgggaaggcgaggctgccgctgtggagggcccgtgcccgagccaggagtccctgtcccaggaggaaaacccggaacccacggaggatgaaaggagtgaggaaaagggaggggtggaggttttggaaagttgtcaaggctctagcaacggagcccaggaccaagaggcttgctggctcaagctggcccctcagctctggactgcctctgcaaggtcagaagggttgtttgtggagtctgggctgggcagcactgcctagaatatcatgctgtctctgtcacccaa

SEQ ID NO: 317007 - DNA, 606 bp, Artificial Sequence
  derived and/or modified sequence
atgaaagagttgtctctgaaggcaagccccctgcgctcagagaccgccgaggggatcgtcgttgttactacttggattgagaagatcctcaccgacctcaaagtccagcacaaaagagtgccatgtggaaaagaggaggtgtcactgttcttgactgctatagaaaactcctggattcacctgaggagaaagaaacgtgaacgtgttaggcagcttagggaggtgccacgtgcacccgaagacgtaatacaagccctggaagaaaagaagccgaccccaaaagagtctggcaactcccaggaactggctagagggcctcaagaacgtacgccatgcggtcctgctctgcgtgagggagaggcagcagcagtagaaggaccctgcccctcccaagaatccctttctcaggaggagaaccccgaacccactgaggacgaacgctcagaagagaagggtggcgtggaggttctagagtcttgccagggctcatcgaacggtgcacaagaccaagaagcctgttggttaaagctcgcccctcaactttggaccgcttctgctcgcagcgaaggcttgttcgtggagtctgggctgggtagcaccgcctag

SEQ ID NO: 317008 - DNA, 1035 bp, Artificial Sequence
  derived and/or modified sequence
atggctgagggcggtgagctcgaattcgtgaagagaattatccacgatagcctccagttgaagaagcgtctgcgatggtattcctgtatgcttggtaaaaagtgctccctggcccctttgaaagaagaactgcggattcagggcgttcccaaggttacctacaccgagttttgccaaggacgtacaatgagatgggccttagcttggagcttctatgacgacgtaacagtcccaagccctccgtccaaaagacggaaactagagaaaccgagaaagcctatcacattcgttgtgttggccagtgtgatgaaggagcttagccttaaagcatctcctctgcggtcagagactgctgaaggcatcgtcgtggtgacaacttggatcgagaagatactcacagacctgaaggtgcagcataagagggttccttgtggcaaagaggaagtgagcctgtttctcactgctatagaaaattcctggatccatttgcgacgcaagaagcgagagcgggtgcggcagcttagagaagtccctcgagctcctgaggacgtgattcaagcccttgaggagaagaaacctactcccaaagagtcggggaatagtcaggaattggcacggggtccccaggaacgcacgccatgtggaccggcattaagagaaggagaagctgctgctgttgaaggaccctgcccaagtcaagaaagcctctcccaggaggagaaccctgaacccacggaggatgaaagaagcgaggagaagggaggagtcgaagtgttagagtcatgtcagggttccagtaatggtgctcaggatcaagaggccagtgagcagttcggatctcctgtggccgagcgaggtaagcgtctccccggagtggcgggacagtacctttttaaatgtttaatcaacgtaaagaaggaggtagacgacgctcttgtcgagatgcactgggtggaggggcagaaccgggacctaatgaaccagctgtgcacctacatacgcaaccagatattccgtctcgtagctgtgaactag

SEQ ID NO: 317009 - protein, 1031 aa, Artificial Sequence
  derived and/or modified sequence
MAAGRAQVPSSEQAWLEDAQVFIQKTLCPAVKEPNVQLTPLVIDCVKTVWLSQGRNQGSTLPLSYSFVSVQDLKTHQRLPCCSHLSWSSSAYQAWAQEAGPNGNPLPREQLLLLGTLTDLSADLEQECRNGSLYVRDNTGVLSCELIDLDLSWLGHLFLFPRWSYLPPARWNSSGEGHLELWDAPVPVFPLTISPGPVTPIPVLYPESASCLLRLRSHPAVTHVSIIVQVPAQLVWHRALRPGTAYVLTELRVSKIRGQRQHVWMTSQSSRLLLLKPECVQELELELEGPLLEADPKPLPMPSNSEDKKDPESLVRYSRLLSYSGAVTGVLNEPAGLYELDGQLGLCLAYQQFRGLRRVMRPGVCLQLQDVHLLQSVGGGTRRPVLAPCLRGAVLLQSFSRQKPGAHSSRQAYGASLYEQLVWERQLGLPLYLWATKALEELACKLCPHVLRHHQFLQHSSPGSPSLGLQLLAPTLDLLAPPGSPVRNAHNEILEEPHHCPLQKYTRLQTPSSFPTLATLKEEGQRKAWASFDPKALLPLPEASYLPSCQLNRRLAWSWLCLLPSAFCPAQVLLGVLVASSHKGCLQLRDQSGSLPCLLLAKHSQPLSDPRLIGCLVRAERFQLIVERDVRSSFPSWKELSMPGFIQKQQARVYVQFFLADALILPVPRPCLHSATPSTPQTDPTGPEGPHLGQSRLFLLCHKEALMKRNFCVPPGASPEVPKPALSFYVLGSWLGGTQRKEGTGWGLPEPQGNDDNDQKVHLIFFGSSVRWFEFLHPGQVYRLIAPGPATPMLFEKDGSSCISRRPLELAGCASCLTVQDNWTLELESSQDIQDVLDANKSLPESSLTDLLSDNFTDSLVSFSAEILSRTLCEPLVASLWMKLGNTGAMRRCVKLTVALETAECEFPPHLDVYIEDPHLPPSLGLLPGARVHFSQLEKRVSRSHNVYCCFRSSTYVQVLSFPPETTISIPLPHIYLAELLQGGQSPFQATASCHIVSVFSLQLFWVCAYCTSICRQAPGGGWDCRSRGDL

SEQ ID NO: 317010 - DNA, 3096 bp, Artificial Sequence
  derived and/or modified sequence
atggctgcggggcgcgcacaggttccgagtagtgaacaggcttggctggaagatgcacaggtattcatccaaaaaacgttatgtcccgctgtaaaggagcctaatgtacagctgacacccttggtaatagattgcgtgaagaccgtgtggctaagccaaggtcgcaaccaagggtcaacattgcccttatcttatagcttcgtgtctgtgcaggatttaaagacgcatcagagactgccctgttgtagccatctgtcttggtcctcctcggcctaccaggcctgggctcaagaagctggaccgaatggaaatcccttgcctagagagcaattgttactgttgggcactctgacagacttatccgctgacctggaacaggagtgtagaaacgggtccctgtacgttagagacaacaccggagtgctgagctgcgagctgattgacctggatctttcttggctcggccatctgttcctgttcccccgttggagttatctccctcctgctcgctggaacagttcaggcgaaggacatctcgagctctgggatgcgcccgttcctgtgttcccactgacaatttctcctggtccggtcaccccaattcccgtgctgtaccccgagagcgctagctgtctcttgcggctgaggagccaccctgcagtcactcacgtttcgattattgttcaagtccctgcacagcttgtttggcatagagcattgcgccctggtacagcctacgtgctgacagagctgagagttagcaaaattagaggacagcgccagcatgtatggatgacctctcagtcaagcagactgctgctgctgaagcctgaatgtgttcaagagcttgaactcgagctggaaggccctctgcttgaagctgaccccaagccactgcccatgccctcgaacagtgaggacaagaaggacccagagagtctcgtgcgctactcgcgattactgagttattcaggcgccgtgaccggggtcctgaacgagccagcgggcctgtacgagcttgatggccaattggggctgtgcctggcgtaccagcagttccgggggctcagaagagtgatgcgcccgggagtttgcctccagctgcaggatgtgcatctgctacagtctgtcggcggcgggaccagacgcccagtattggctccgtgcttgcgaggcgctgtactgctgcagagcttcagcaggcaaaagccaggagcccattcatctaggcaggcctatggcgcttccctatatgaacagctggtttgggagaggcagcttggattaccactctatttatgggctactaaggcactggaggaactggcttgtaagctgtgccctcatgttttaagacatcaccagtttctgcagcattctagtcccggatcaccctccctcggcctgcagctgctggccccaactcttgatttgctggccccccccggaagccccgtcaggaatgcccataacgaaattctcgaggagccacaccactgccccctgcagaagtacactcggcttcaaacacctagtagcttccccacactggcaactctgaaagaggaagggcagaggaaagcctgggccagctttgaccccaaagcgctcctcccattgccggaagcgtcttacctaccatcttgccagctgaatagacgcctagcctggtcatggctttgcctgctgccgtcggccttttgtcccgctcaagtcctgctcggtgtcctggtggcctcttctcacaaggggtgtcttcagctgagagatcagtccggctcacttccttgtctgcttctggccaaacacagtcagcccctcagcgatccccggcttatcggatgcctggtgcgagctgagagatttcaactgatcgtggagcgtgacgttcgttcttccttccccagttggaaagagctttcgatgccagggttcatccagaagcaacaggcgcgagtgtacgtccagttcttcctcgccgacgctttaattctccctgtgcccaggccttgcttgcactcagcaacgcctagtacgccacaaaccgacccaacaggtcctgaggggccacacctgggacagagccgactattccttctctgccacaaggaagcgttgatgaaacggaacttctgcgtgccgcccggagcatccccagaggtgccaaagccggccctaagtttctacgtgctcggcagctggctggggggcacccaacggaaggaggggaccggatggggcctgcccgagccccaaggaaacgatgataacgaccaaaaagttcacttaattttttttggaagcagtgttaggtggttcgaatttctgcatcctgggcaggtgtataggttgatcgcccccgggcctgctacgcctatgctttttgaaaaggatgggtcctcttgcatatcaagaagaccgcttgaactcgcaggttgcgcctcctgtttaacggtccaagacaactggactcttgagctcgagagctctcaagacatacaggacgtcctggatgccaacaagtcgctgccagagtcaagtctaaccgatctgctctccgataactttactgattctctggtaagcttttctgcagagattttgagtagaacactgtgcgagcccctggtggctagtctatggatgaaattgggtaataccggagctatgagaaggtgtgtcaagctcacagttgcactcgagaccgccgagtgcgaattcccgccacatcttgatgtctacatcgaggatcctcacctgccacccagcctgggcctgctccccggtgctagagtccatttctcacaactcgagaagagggtttcccgttcacacaacgtgtactgctgtttccggagctctacctatgtacaggttttgtctttccccccggagaccaccatatccatccctctacctcacatttacctggctgagctgttacaagggggacagagccctttccaagctacagcgagctgtcacatcgtaagcgtgttctcattacaacttttctgggtatgtgcatattgtacgtcaatttgccggcaggctcccggaggtggttgggattgtcggtccagaggggatctttag

SEQ ID NO: 317011 - DNA, 3096 bp, Artificial Sequence
  derived and/or modified sequence
atggctgctggccgggcccaggtgcccagcagcgagcaggcctggctggaggatgcccaggtgttcatccagaagaccctgtgcccagctgtgaaggagcccaacgtgcagctgacccccctggtgattgactgtgtgaagacagtgtggctgagccagggcaggaaccagggcagcaccctgcccctgagctacagctttgtgtctgtgcaggacctgaagacccaccagaggctgccctgctgcagccacctgtcctggagcagcagcgcctaccaggcctgggcccaggaggccggccccaacggcaaccccctgccccgggagcagctgctgctgctgggcaccctgacagacctgtctgctgacctggagcaggagtgcagaaatggcagcctgtatgtgcgggacaacacaggagtgctgagctgtgagctgattgacctggacctgtcctggctgggccacctgttcctgttcccccgctggagctacctgcccccagcccgctggaacagcagcggggagggccacctggagctgtgggatgcccctgtgcctgtgttccccctgaccatcagccctggccctgtgacccccatccctgtgctgtacccagagagcgccagctgcctgctgcggctgcggagccaccctgctgtgacccacgtgtccatcatcgtgcaggtgcctgcccagctggtgtggcaccgggccctgcggcccggcacagcctacgtgctgacagagctgcgggtgtccaagatccggggccagaggcagcacgtgtggatgaccagccagagcagccggctgctgctgctgaagccagaatgtgtgcaggagctggagctggagctggagggccccctgctggaggccgaccccaagcccctgcccatgcccagcaacagcgaggacaagaaggaccctgagagcctggtgcgctacagccggctgctgagctacagcggggctgtgactggagtgctgaatgaacctgctggcctgtatgagctggatggccagctgggcctgtgcctggcctaccagcagttccggggcctgcggcgggtgatgaggcctggggtgtgcctgcagctgcaggatgtgcacctgctgcagagcgtgggcggcggcacccggcggcctgtgctggccccctgcctgcggggagctgtgctgctgcagagcttcagccggcagaagccaggggcccacagcagccggcaggcctatggagccagcctgtatgagcagctggtgtgggagcggcagctgggcctgcccctgtacctgtgggccaccaaggccctggaggagctggcctgcaagctgtgcccccacgtgctgcggcaccaccagttcctgcagcacagcagccctggcagccccagcctgggcctgcagctgctggcccccaccctggacctgctggcccctcctggcagccctgtgagaaatgcccacaatgagatcctggaggagccccaccactgccccctgcagaagtacacccggctgcagacccccagcagcttccccaccctggccaccctgaaggaggagggccagaggaaggcctgggccagctttgaccccaaggccctgctgcccctgcctgaggccagctacctgcccagctgccagctgaacagaaggctggcctggagctggctgtgcctgctgcccagcgccttctgcccagcccaggtgctgctgggcgtgctggtggccagcagccacaagggctgcctgcagctgcgggaccagagcggcagcctgccctgcctgctgctggccaagcacagccagcccctgagtgacccccggctgattggctgcctggtgcgggcagagcgcttccagctgattgtggagagagatgtgcgcagcagcttccccagctggaaggagctgtccatgcctggcttcatccagaagcagcaggcccgggtgtatgtgcagttcttcctggctgatgccctgatcctgcctgtgccccggccctgcctgcacagcgccacccccagcaccccccagacagaccccactggacctgagggcccccacctgggccagagccgcctcttcctgctgtgccacaaggaggccctgatgaagaggaacttctgtgtgcccccaggggccagccctgaggtgcccaagccagccctgtccttctacgtgctgggctcctggctgggcggcacccagaggaaggagggcaccggctggggcctgcctgagccccagggcaatgatgacaatgaccagaaggtgcacctgatcttcttcggcagctctgtgcgctggtttgagttcctgcaccctggccaggtgtaccgcctgattgcccctggccctgccacccccatgctgtttgagaaggatggcagcagctgcatcagcagaagacccctggagctggccggctgtgccagctgcctgactgtgcaggacaactggaccctggagctggagagcagccaggacatccaggatgtgctggatgccaacaagagcctgcctgagagcagcctgacagacctgctgagtgacaacttcacagacagcctggtgtccttctctgctgagatcctgagcaggaccctgtgtgagcccctggtggccagcctgtggatgaagctgggcaacacaggagccatgagaagatgtgtgaagctgactgtggccctggagacagcagaatgtgagttccccccccacctggatgtgtacatcgaggacccccacctgccccccagcctgggcctgctgcccggggcccgggtgcacttcagccagctggagaagagggtgagccgcagccacaacgtgtactgctgcttccgcagcagcacctacgtgcaggtgctgtccttccccccagagaccaccatcagcatccccctgccccacatctacctggccgagctgctgcagggcggccagagccccttccaggccacagccagctgccacatcgtgtctgtgttcagcctgcagctgttctgggtgtgtgcctactgcaccagcatctgccggcaggcccctgggggcggctgggactgccgcagcagaggagacctgtag

SEQ ID NO: 317012 - DNA, 3096 bp, Artificial Sequence
  derived and/or modified sequence
atggccgccggccgggcccaggtgcccagcagcgagcaggcctggttggaggacgcccaggttttcattcagaagaccctgtgcccagcagtcaaagaacctaacgtgcagctgacaccccttgttatcgactgtgttaagacggtgtggctgtctcagggtcgcaatcagggctccacactcccattgtcatatagtttcgtttctgtgcaggatctgaagacacaccagcgcctaccttgttgttcgcacctaagttggagtagcagcgcttaccaggcatgggctcaggaagccggacccaacgggaacccactgcctcgtgagcagctgctgttgctgggcactctgacagatctgagtgcagacttagagcaggaatgtcgtaacggctcactgtacgtacgtgataacacaggcgtgctcagctgcgagctgatcgatttagacctttcttggcttggccaccttttcttgtttcccaggtggtcctacctaccacctgccaggtggaacagttcaggggaagggcatttggagctctgggacgctcctgttccagtgttccctctgacgatctctccgggcccagttacacccatccccgttctctaccccgaatctgcgagctgcctgttgcgccttaggtctcatccagccgtgacccatgtgtccatcatcgtgcaagtcccagcccagctggtttggcatcgcgccctgagacctggcacggcttacgtgttaactgagcttcgtgtttctaaaatccgcggccagcgacagcacgtgtggatgacatcccaaagctccaggcttttgctgctgaaaccagagtgtgtacaagaactcgagttagaactcgaggggcctctgttggaggcagatcctaaaccgcttccaatgcctagcaacagcgaggataagaaggatccagagagtttggttaggtacagcaggctgctttcatactccggggcggtcactggcgtgctgaacgagcctgctgggttgtacgagctggatggccaattgggtctgtgccttgcctaccagcaattccgagggctcagacgcgtgatgaggccaggcgtctgcctgcagctccaggatgttcacctgctgcagtcggtcggaggtggcaccagaaggccagtactggctccctgcctgagaggtgccgtgctgctgcagtcatttagccgtcaaaaacctggagcccactcaagcagacaggcatacggcgcttccctgtatgagcagctggtctgggagcggcagctgggcttgccactgtacctctgggctacaaaggccctggaggagctggcctgcaaactctgtcctcacgtgcttaggcaccaccagtttctacagcattcctcgcctggctctccctcactagggctacagctcttggcgccgaccctggatttgctggccccaccgggaagtccggtgcggaacgcccacaacgaaattctagaagagccccatcactgcccgctgcaaaaatataccagattgcaaactccaagcagtttcccgacactcgcaactcttaaggaggagggccaacgtaaagcatgggcaagcttcgatcccaaagccctcctccccctcccggaggcctcctatttaccgtcgtgccagctgaatagaaggcttgcttggtcttggctgtgcttactgccttcagccttttgtcccgcccaggttctgctcggggtattggttgccagcagtcacaaaggctgtcttcagctgagagatcagagcggttctctgccctgcctgttgcttgccaagcattctcaaccactttctgatccacgcctcattggctgtctggtcagggccgagaggtttcagctgatcgtggagcgagacgtgaggtccagctttccctcatggaaggaactctctatgcccggcttcattcagaaacaacaggcccgtgtttatgtacagtttttcctcgcagatgccctgattctccccgtgcccaggccctgcctccactccgctacacccagcacgccacagacggaccctaccggaccagaaggccctcacctgggccaatctagactgttccttctgtgtcataaagaggccctcatgaagaggaatttctgcgttcccccaggcgcctcacctgaggtgccgaaacctgccctatccttttatgtgcttgggtcctggctcgggggcacgcaaaggaaggagggcactggatggggcttgccggaaccacagggcaacgacgataacgaccagaaggtgcacctgattttcttcggaagttctgtgcggtggtttgagtttctgcacccaggacaggtttaccggctcattgcaccaggaccagcaacccctatgctgtttgaaaaagacggatctagctgtatatcccggaggcccctggagttagccggatgcgcaagctgccttactgtgcaggacaactggactctggagctggagtccagccaagatatccaggacgtgttggatgctaataagtcacttccagagtcctctctgacagacttactcagtgataatttcaccgattcccttgtctccttcagcgccgaaattctaagtcgtacgttgtgcgaacccctggtcgcaagtctgtggatgaaattggggaatacgggggctatgagaaggtgcgtgaagttgaccgtcgcacttgaaacagctgaatgcgaattcccgccacacttagatgtttacatcgaggacccacacctgccaccaagcctgggattgctgcctggagccagggttcattttagccaactcgagaagcgggtttccagatcccacaacgtgtactgctgttttaggagcagcacatacgtccaggtactctccttcccacccgagacgaccatctcgatccctctgcctcacatctatttggctgaattgcttcagggcggccagagcccctttcaagctacagcctcctgccatatcgttagcgtcttcagtctgcagctgttttgggtgtgcgcgtattgtaccagcatttgtcgccaggcacctgggggcggttgggactgccgttctaggggcgatttgtag

SEQ ID NO: 317013 - DNA, 3096 bp, Artificial Sequence
  derived and/or modified sequence
atggcagccggtcgagcccaggtgccttcctcagagcaggcatggctggaagacgcacaggtcttcattcaaaagactctgtgtccagctgtgaaggagcccaacgtccagctcacacctctagtgatagactgtgtgaagaccgtctggctgtcgcaagggaggaatcagggttctaccctgcccctctcgtatagttttgtgtccgtgcaagacctgaagacccaccaacgactgccctgttgtagccacctgtcttggtcttcgtctgcatatcaggcatgggcccaagaggccggacctaatggcaatcccctgcccagggagcaactgctgttgttgggcaccctgactgatctatcagctgacctcgagcaggaatgtcgaaacggctcactttacgttcgcgataacactggagtgctgtcgtgtgaactaattgacctggacctatcatggctgggacatctatttttattcccaaggtggagctatctcccgccagcccgttggaactcttccggtgagggtcacttagagctctgggatgcccctgtacccgtgtttccacttaccatttcaccagggcctgtgactcctatcccggtgctctaccctgaatctgcgtcctgccttctcagactgagatcccatcccgctgtgacccacgttagcatcatcgtacaagtgcccgctcaactagtgtggcaccgcgcactgcgcccaggaactgcctatgtgctcacagaactacgtgtgtctaagatcagaggccaaagacaacatgtttggatgacatcgcagagcagccgcctcctgttactcaagccagaatgtgtgcaggaactggaattagagctcgaggggccactgctggaggccgatccgaaacccttacctatgccaagcaacagcgaagataaaaaagaccctgagagtctggtacggtactccaggctgctttcgtacagcggggcagtcaccggcgtgttgaatgaacccgcaggcctgtatgaactggacgggcagttgggtctatgtctcgcataccaacaattcaggggactcagaagagtcatgaggccaggggtgtgcctgcagcttcaggatgttcacctcttgcagagtgttgggggaggcacacgtaggccagtgctcgccccttgtcttcggggagcagtgctgctgcagtccttttccaggcagaagcccggtgctcattccagtcgtcaggcctacggtgctagcctgtacgagcagctggtgtgggagagacaacttggtctcccactctacctgtgggccactaaggctttggaagagttggcctgcaagttgtgtccccatgtcctccgtcaccaccagtttctgcagcacagcagtcctggtagtccaagccttggtttgcaacttttggccccaacgttggaccttctagctccccctgggtctcctgtgagaaatgcacacaatgagattctcgaggaacctcatcactgccctctgcaaaaatacactagactgcagactccaagctccttccccacccttgctactctgaaagaggagggacagcggaaggcctgggcctcattcgatcccaaagcgctcctgccattacccgaagcctcatacttgccaagctgccagctcaaccggagacttgcctggtcttggttgtgcctgctgcctagtgctttctgccctgctcaggtattgctgggtgtcttagtagcatcttctcataagggttgcctccagttgcgcgatcaaagtggatcactgccctgtctgctgctggctaagcattctcagcccctttcggatccgcgtctgatcgggtgccttgttcgtgccgagcgctttcagctgatcgtggagcgtgatgtgagatcaagtttccccagctggaaagagcttagcatgccgggatttatccaaaaacagcaggccagggtgtatgtacagttcttcctggcggacgctctgattttacctgtacctagaccctgccttcactctgccacgccaagtactcctcagacggatcccacaggccctgaggggccacatttaggccagagcaggctgtttcttttgtgccataaagaagccctcatgaaacgcaacttttgcgtccctccaggagcgtcaccagaggtgcccaaaccagccttgtccttctacgtgctgggttcttggctgggaggcacccaacggaaggagggcacggggtggggcctgcctgagcctcaggggaatgacgacaatgatcagaaggtccacctgatcttcttcggtagttcagtacgatggttcgaattcctccatccaggacaggtttatcggttgattgccccaggacccgcaacccctatgctgttcgaaaaggacgggtcaagttgtatttcacgtcgaccgctcgaactcgcagggtgcgcttcttgtttgacggtccaggataattggaccctggaattggagtcaagccaggacatccaggacgtgctggatgccaacaaatctctgccggaatcaagcctgacagatttgctatcagataatttcacagattccttggtgtctttcagcgcagagatactatcacgaactctttgcgaaccgctggtggcttccctttggatgaagctgggcaatacgggggctatgcgcaggtgcgtgaaactgacagttgctttggaaacagccgagtgcgaatttcctccccaccttgacgtatatatcgaggatcctcacctccctccaagcctcggtctattaccgggagccagagtccacttcagccagctcgaaaagcgcgtgagccgctcccataacgtgtactgttgcttcaggagcagtacgtatgtccaggtgcttagcttcccccctgagactactataagtatcccactgccccatatctacctcgctgagctcctgcaaggaggccaatctccattccaggcaaccgcctcctgccatatcgtatctgtgtttagcctccaactgttctgggtgtgcgcctactgcactagtatctgtcggcaggctcccggtggcggttgggattgcagaagccggggtgacctgtag

SEQ ID NO: 317014 - DNA, 6901 bp, Artificial Sequence
  derived and/or modified sequence
ccccatccccacccccaagcgagcacctgcccctcccgggggcggagctccggcgcatcatggcggctggccgggcccaggtcccttcctccgaacaagcctggcttgaggatgctcaggtcttcatccaaaagaccctgtgtccagctgtcaaggagcctaatgtccagttgactccattggtaattgattgtgtgaagactgtctggttgtcccagggaaggaaccaaggttctacactgcccctcagctatagcttcgtctcagtacaggacctcaagactcaccagcgtctcccatgctgcagccacctgtcgtggagcagtagtgcataccaggcctgggcccaagaggctggaccaaatgggaaccccctgccccgagagcagctgttacttttagggacactaacagacctatcggcagacttggaacaagagtgcaggaacggaagcctctatgtgagagataacactggcgtcctgagctgtgagctcatagacctggacctttcttggttgggccatctttttctgttcccccgttggagttacctccctcctgccaggtggaattcctcaggggaagggcacttggagctgtgggatgcccctgtgccagtgtttcctttgaccatcagtcctggccccgtcacgcctatccctgtcctctacccagagagtgcttcctgcctgctcaggctcagatcacacccagctgtcacccacgtgtccatcatcgtgcaggtccctgcccagctggtgtggcacagagcccttcggcctggtacagcctatgtgctgacagaactgcgagtgtccaagatccgtggtcagcgccagcatgtttggatgaccagtcagtcctcccgtctgttgctgctgaaaccagaatgtgtgcaggagctggaactggagctggaaggacccctcttagaggctgaccccaagccactccccatgcccagcaactcggaggacaagaaggatccagaaagtcttgtccggtattctagactcctatcctattcgggagcagtcactggcgtgttgaatgagcccgctggcctctatgagctggatgggcagctggggctctgccttgcctaccagcagttccgtggccttaggcgggtgatgcgacctggagtgtgtctgcagctccaggatgttcacctgctccagtcagtgggaggggggacaagaaggccagtgctcgccccctgcctccgtggcgccgttctgcttcaaagcttctctcgtcagaagcctggggctcactcatcccgtcaagcctacggggcctccctgtacgagcagctggtgtgggaacgtcagttaggacttcccctctacctgtgggctaccaaggccctggaggagctggcctgcaagctgtgtccccatgtgctgagacaccaccagttcctgcaacattcctctcctgggagccccagcctgggactgcaactcctggctcctaccctggatcttctagctccgccaggcagccctgttcggaatgcacacaatgagatccttgaagagccacatcactgtcccctccagaaatacactcggctgcagactccctcctccttccccactctggccaccctgaaagaagaaggacagcgtaaggcctgggcctcctttgaccctaaggcccttctgcccctcccggaggcctcctacctgcccagctgccaactcaatcgccgcctggcttggtcctggctctgtctgctgccctctgccttctgcccagcccaggttttacttggggttctggtggcttcatctcataaaggttgtctgcaacttcgggaccaaagtggttccctgccctgcctgctcctggccaagcactctcaacccctcagtgacccacggctgataggctgcctggtgcgggcagagaggtttcagttgatcgtagagagggacgtgagaagcagcttcccttcctggaaggagctgagcatgccaggcttcatccagaagcagcaggccagagtctatgtccagttctttctggctgatgccctgatcctgcctgtgcccagaccctgccttcattcagcaacaccctcaacacctcagacagatcccaccggcccagagggaccccacctaggacagagccggctcttcttgctctgccacaaggaggccctcatgaagcgtaatttttgtgtccccccaggagcaagtccagaggtgcccaagcccgccctcagtttctatgtgttggggagctggcttgggggcacccagaggaaggagggtactggatgggggctgcccgagccccagggaaatgacgacaatgatcagaaggttcacctcattttctttggctcttcagtccgctggtttgagttcttgcacccgggacaggtgtaccgactcatagctcctggccccgctacaccaatgttgtttgaaaaggatggttcatcctgcatatctcggcgtcctctggagttggctggctgtgcatcctgcctcactgtccaggacaactggactctggagcttgaaagctcccaggatatccaagatgtgctggatgcaaacaagtcattgcctgaatcctcactgaccgacctgctcagtgacaatttcacagattccttggtgtctttctccgctgagattttgtcacggacactatgtgaaccccttgtggcgtctctctggatgaaactggggaacacgggggccatgagaaggtgtgtgaagctaacagtcgctcttgagactgctgaatgtgaattcccccctcacctggatgtatatatagaagacccacacttgcctccctcactaggactacttccaggagcccgggtccacttcagccagttggagaaaagggtttccagatctcacaatgtttattgttgtttccggtcatccacttatgtgcaggtcctgagttttccccctgagaccaccatcagcattcccctgccccacatctacctggctgaacttctgcagggtggtcagtccccattccaggccactgcctcttgccatatcgtctctgtcttcagccttcagctcttctgggtgtgtgcttattgtaccagcatctgccggcaggctcctggtggaggatgggactgccgaagccgtggtgacctgtaggaatcaccatgtggcagcagcactagggctgtgtcctagagagtgggcctccctcctagatttcgtccaagtgccaggcagagtggtcttgcagtttgcagggcctggagcccaacttgagtcttcagccagggttgacgagcccatgaccatgttcctctggacactttgtactagcccctctgtcctccgtcctattgtgctttcttttgagctggaaaggaaaccgtcgaagatcgtcccattagaacctcctcggctacagcgattccagtgtggagagctccctttcctgactcacgtgaaccccaggctccgattgtcctgcctttctatccgagagtcagagtactccagctctctggggatccttgcttcctcctgttaactgaactgcaaggatggcctgagagtccttccttgctgaaaacctgaaggcctaggtcctggctcctctccctacttgttctgtgattgaaccaaggactccagattcacaaactgctactccactataatttcccttctttggtgttctggtgccagcctgccttggcaaaattgtggcaacaggaaatcatggccctattaatatgtcctctgattgggacaaggcacctgcattcacaggcggccctgagcacctgggttctgactttgtcgcaggagctgagggaacaaaagacttgctcgctgtggggtgatggtgacaggcctattgacctgcaatgaagccctctggtgtcatttctcactggtactcatctctggggtcccaggcctcctgactcctagttgtccacctcctaggaactcctagtcgttcatcatcatttcagccctttgccgccagggccaaaggtggaaagtgatttggaagagaagagcttttcgtccagcagaagaaatggtaccaaaatcagtctgtaaaggaagtaaattggggagttggcggcaaggcagagagcatagctatgatggtctcagtcagtaaggctgggccctgcaggaagtcaaatatgaatgcctagaggtgttcacaagcacaaagaaggtgtagggggaggcaagtgccaggcacaagcaggggcaggtgaggactctgggtgactgtgctatagggccccaggctacggttagccctgtaggtttcccaagggcctggcctaaggcagatccttgatcgatataccttgagaccagaaggtgctccgaaatcacaaccgtacaattaggggatctaggaacaattctttggagataccaatgcctttggctggtgttgctgcatttctttactggggactgatagatggagaggtggaaagatgagctgaggcacatctttcagagctactgggaggccatttcttcctggctgttaggatttgttcgtgtttgggagacctttagagcgtggttaaacccatatgttgggatttatgctgcttttatggtagcaataccctatattaagatttgaagtagacccggaaagttagtggccggttagctcagttggttagagcgtggtgctaataacgccaaggtcgcgggttcgaaccccgtacgggccagtgggtggcttttttttgtgtgtgttttgttttctgaccctctgctgttatccggaagtttctacccggagccagttgccttctggtaacagaattatattgcacctactgcttcctattccctgaatcactagcgctcccgaaggcttggagggaggagtctctgggcacccgggtgaaaggaaggttcacgtgcaaccgccgcgtctttttttccctgaagcgctttcatggaggcagatgtttgtcagtcaagggaagtaagaaaggcattggatgaaaacgaagccctaagcctcgtagtcgtggccgagtggttaaggcgatggactagaaatccattggggtctccccgcgcaggttcgaatcctgccgactacgtcatatttttttcttcagcatactgaccatatttctctccaggatgggatgatccagtcggcaccctccaaacctctcatctaggaactctagaatcgagaatttgatttagagtctatgattttggtttgaaatctatgattaacgtctttggacattgaaggaaatccgaggaatggacaagtgatgcaagagccagttgagttaccaaattagttctagaaagatctgaaaaagctcggtccgggttcctagctctatattcttgtagatgaatttcaggaacctttatggcagcttcggcgccgtggcttagttggttaaagcgcctgtctagtaaacaggagatcctgggttcgaatcccagcggtgcctttattcaattgaaacagcgtgattttgcggctaaatccacatcctttcatgtattgtttttatatcagaacgcgtaagagtttctgttctgcactcatagcacccacatttcctgcagagtcaagctgccactcccatgagatcgccactctaaaaggtggttctctaacttaggggcagaaatgttgcataggcctaagggtcctttgcttaactgatgccacaccccactggtgcaggtggactgggtcaggcggccgccccaccctcgatggaaggggctgcccaccttccaggcctctttctccaccctaggacgtcccctagaacctgagccactttgttttgtttggctcttcattatagttctttgggtttggtggctcataatgttatatatatagtatataatataaaaatatatatttaaatatacagtatttaaaatttggcacagcttccagatgcggtcctctaactggtctttcacttgcagttacctccatccctctccaccagcgggatgtcagggtaaggagtaagcagggatccggctggcctggcctggcctggcaccaggtttcgtgcagcagggtgcagaagggctgaggccatgtgaacagagtccaagaaagcatcattcgggagtcgctagggatcctggtgtggaagggcagggcacttttctggagcactgaagctaggctggttaaggaagaaataaatgccagagataaggcaagaaataggatctgtgagctcttggcaggacctaaacctccttggaagataggcagaaagctctcgacaccattccatggcccacgaaccaatgtaagatgagcaaatggcttgaaggaattgctacctccaggtcaagccagggatgcagcactgccgagaccacgtttgtgccaagcactgggctggaccctgtgcagaaccaaatgaacaaggcacgttcccctttcagcactaacggcactgtaagaacagggagaagtggaatctaatctggcctgagggtagagggtgatcagctaagtctgaaacaccatgtagaaacttgccatgtatggccgggcgcggtggctcacgcctgtaatcccagcgctttgggaggccaaggtgggcggatcacgaggtcaggagttccagaccagcagcctggccaacatagtgaaacctggtaacatagtgaaacctcgtctctactaaaaatgcaaaaaattagccaggcgtggtggcaggcgcctgcagtcctagctacttgggaggctgaggcaagagaatcgcttcaaccttggaggggggaggaggtgttgtcagccgagatcgcgccactgcatcccagcctgggcaacaagagtgaaactccgtctcaaaaaaatgaaataaaataaacgaatgatc

SEQ ID NO: 317015 - DNA, 3096 bp, Artificial Sequence
  derived and/or modified sequence
atggccgccggcagagcccaggtgcccagcagcgagcaggcctggctggaggacgcccaggtgttcatccagaagaccctgtgccccgccgtgaaggagcccaacgtgcagctgacccccctggtgatcgactgcgtgaagaccgtgtggctgagccagggcagaaaccagggcagcaccctgcccctgagctacagcttcgtgagcgtgcaggacctgaagacccaccagagactgccctgctgcagccacctgagctggagcagcagcgcctaccaggcctgggcccaggaggccggccccaacggcaaccccctgcccagagagcagctgctgctgctgggcaccctgaccgacctgagcgccgacctggagcaggagtgcagaaacggcagcctgtacgtgagagacaacaccggcgtgctgagctgcgagctgatcgacctggacctgagctggctgggccacctgttcctgttccccagatggagctacctgccccccgccagatggaacagcagcggcgagggccacctggagctgtgggacgcccccgtgcccgtgttccccctgaccatcagccccggccccgtgacccccatccccgtgctgtaccccgagagcgccagctgcctgctgagactgagaagccaccccgccgtgacccacgtgagcatcatcgtgcaggtgcccgcccagctggtgtggcacagagccctgagacccggcaccgcctacgtgctgaccgagctgagagtgagcaagatcagaggccagagacagcacgtgtggatgaccagccagagcagcagactgctgctgctgaagcccgagtgcgtgcaggagctggagctggagctggagggccccctgctggaggccgaccccaagcccctgcccatgcccagcaacagcgaggacaagaaggaccccgagagcctggtgagatacagcagactgctgagctacagcggcgccgtgaccggcgtgctgaacgagcccgccggcctgtacgagctggacggccagctgggcctgtgcctggcctaccagcagttcagaggcctgagaagagtgatgagacccggcgtgtgcctgcagctgcaggacgtgcacctgctgcagagcgtgggcggcggcaccagaagacccgtgctggccccctgcctgagaggcgccgtgctgctgcagagcttcagcagacagaagcccggcgcccacagcagcagacaggcctacggcgccagcctgtacgagcagctggtgtgggagagacagctgggcctgcccctgtacctgtgggccaccaaggccctggaggagctggcctgcaagctgtgcccccacgtgctgagacaccaccagttcctgcagcacagcagccccggcagccccagcctgggcctgcagctgctggcccccaccctggacctgctggccccccccggcagccccgtgagaaacgcccacaacgagatcctggaggagccccaccactgccccctgcagaagtacaccagactgcagacccccagcagcttccccaccctggccaccctgaaggaggagggccagagaaaggcctgggccagcttcgaccccaaggccctgctgcccctgcccgaggccagctacctgcccagctgccagctgaacagaagactggcctggagctggctgtgcctgctgcccagcgccttctgccccgcccaggtgctgctgggcgtgctggtggccagcagccacaagggctgcctgcagctgagagaccagagcggcagcctgccctgcctgctgctggccaagcacagccagcccctgagcgaccccagactgatcggctgcctggtgagagccgagagattccagctgatcgtggagagagacgtgagaagcagcttccccagctggaaggagctgagcatgcccggcttcatccagaagcagcaggccagagtgtacgtgcagttcttcctggccgacgccctgatcctgcccgtgcccagaccctgcctgcacagcgccacccccagcaccccccagaccgaccccaccggccccgagggcccccacctgggccagagcagactgttcctgctgtgccacaaggaggccctgatgaagagaaacttctgcgtgccccccggcgccagccccgaggtgcccaagcccgccctgagcttctacgtgctgggcagctggctgggcggcacccagagaaaggagggcaccggctggggcctgcccgagccccagggcaacgacgacaacgaccagaaggtgcacctgatcttcttcggcagcagcgtgagatggttcgagttcctgcaccccggccaggtgtacagactgatcgcccccggccccgccacccccatgctgttcgagaaggacggcagcagctgcatcagcagaagacccctggagctggccggctgcgccagctgcctgaccgtgcaggacaactggaccctggagctggagagcagccaggacatccaggacgtgctggacgccaacaagagcctgcccgagagcagcctgaccgacctgctgagcgacaacttcaccgacagcctggtgagcttcagcgccgagatcctgagcagaaccctgtgcgagcccctggtggccagcctgtggatgaagctgggcaacaccggcgccatgagaagatgcgtgaagctgaccgtggccctggagaccgccgagtgcgagttccccccccacctggacgtgtacatcgaggacccccacctgccccccagcctgggcctgctgcccggcgccagagtgcacttcagccagctggagaagagagtgagcagaagccacaacgtgtactgctgcttcagaagcagcacctacgtgcaggtgctgagcttcccccccgagaccaccatcagcatccccctgccccacatctacctggccgagctgctgcagggcggccagagccccttccaggccaccgccagctgccacatcgtgagcgtgttcagcctgcagctgttctgggtgtgcgcctactgcaccagcatctgcagacaggcccccggcggcggctgggactgcagaagcagaggcgacctgtag

SEQ ID NO: 317016 - protein, 520 aa, Artificial Sequence
  derived and/or modified sequence
MEGGPAVCCQDPRAELVERVAAIDVTHLEEADGGPEPTRNGVDPPPRARAASVIPGSTSRLLPARPSLSARKLSLQERPAGSYLEAQAGPYATGPASHISPRAWRRPTIESHHVAISDAEDCVQLNQYKLQSEIGKGAYGVVRLAYNESEDRHYAMKVLSKKKLLKQYGFPRRPPPRGSQAAQGGPAKQLLPLERVYQEIAILKKLDHVNVVKLIEVLDDPAEDNLYLALQNQAQNIQLDSTNIAKPHSLLPSEQQDSGSTWAARSVFDLLRKGPVMEVPCDKPFSEEQARLYLRDVILGLEYLHCQKIVHRDIKPSNLLLGDDGHVKIADFGVSNQFEGNDAQLSSTAGTPAFMAPEAISDSGQSFSGKALDVWATGVTLYCFVYGKCPFIDDFILALHRKIKNEPVVFPEEPEISEELKDLILKMLDKNPETRIGVPDIKLHPWVTKNGEEPLPSEEEHCSVVEVTEEEVKNSVRLIPSWTTVILVKSMLRKRSFGNPFEPQARREERSMSAPGNLLV

SEQ ID NO: 317017 - protein, 230 aa, Artificial Sequence
  derived and/or modified sequence
MVTRDRAENRDGPKMLKPLVEKRRRDRINRSLEELRLLLLERTRDQNLRNPKLEKAEILEFAVGYLRERSRVEPPAAAAPGVPRSPVQDAEALASCYLSGFRECLLRLAAFAHDASPAARAQLFSALHGYLRPKPPRPKPVDPRPPAPRPSLDPAAPALGPALHQRPPVHQGHPSPRCAWSPSLCSPRAGDSGAPAPLTGLLPPPPPPHRQDGAPKAPLPPPPAFWRPWP

SEQ ID NO: 317018 - DNA, 1682 bp, Artificial Sequence
  derived and/or modified sequence
gaggagcaatggtcacccgggatcgagctgagaatagggacggccccaagatgctcaagccgcttgtggagaagcggcgccgggaccgcatcaaccgcagcctggaagagctgaggctgctgctgctggagcggacccgggaccagaacctccggaacccgaagctggagaaagcggagatattggagttcgccgtgggctacttgagggagcgaagccgggtggagcccccggccgccgcggctccaggggttccccggtccccagtccaggacgccgaggcgctcgccagctgctacttgtccggtttccgcgagtgcctgcttcgcttggcggccttcgcgcacgacgccagcccggccgcccgcgcccagctcttctccgcgctgcacggctatctgcgccccaaaccgccccggcccaagccggtagatccgaggcctccagcgccgcgcccatccctggaccccgccgcaccggcccttggccctgcgctgcaccagcgccccccagtgcaccagggccaccctagcccgcgctgcgcatggtccccatccctctgctccccgcgcgccggggattctggcgcgccggcgcccctcaccggactgctgccgccgccaccgccgcctcacagacaagacggggcgcccaaggccccgctgcccccgccgcccgctttctggagaccttggccctgagccttggggggtggtgggggcggggtctaggggtggggtagagactccagcccgagggcagcagagggacccgggcgtccgggcgagcaggtgttggggagggcagtggggcgcgcgggctcagcgcgcgggtgagatgtggtctatattagagtatctatataaatatatatttccctggttcctgtcccttttccctgccccaacttctcccttgcgtctaggattgtactctctctgcccctcagcccagtcccagtcccttcccgagtccctagtgcatggaataaagtggttattaaatccccgtgtgtccccgagccaggggcctgcctttatctcgacgtccacgcccactttcccttcccttctgtctcccaccctcagtcctgctctccatggcccaagccccggggcagacaggtaagtaaagaagagagcagagcgggaactgagatcgaaattgaaaccaggtggaaagagagagatagggtagggggagaagggatgggggcctttaagaaaaaaacggataaaaaggaaaaattgaaataaaatcgactctggtgggattcgaacccacaacctttgaattgctctattcgtcactagaagtccaatgcgctatccattgcgccacagagccacccgacgaacggcggcgtcttgtagcttacgggtactagagtgggaatggggcagggttggggagcggggctaagggacttgggcgggacatgccaggagggcgcggtttggatctcagaggccaagccaggtagaggtagcgggcgcaaagcatgttagccaggtgagagagagggcgcacatgggtcgaaaaaacagggagggagagcaaccgaaaatggctgagcgagcgagtgcagagctccggctgcccgcttggggggtgtttccggctcaggcgctccccactcccagatatagtcccacccaaataaactagttttgttgtaaatt

SEQ ID NO: 317019 - protein, 661 aa, Artificial Sequence
  derived and/or modified sequence
MLPEAGSLWLLKLLRDIQLAQFYWPILEELNVTRPEHFDFVKPEDLDGIGMGRPAQRRLSEALKRLRSGPKSKNWVYKILGGFAPEHKEPTLPSDSPRHLPEPEGGLKCLIPEGAVCRGELLGSGCFGVVHRGLWTLPSGKSVPVAVKSLRVGPEGPMGTELGDFLREVSVMMNLEHPHVLRLHGLVLGQPLQMVMELAPLGSLHARLTAPAPTPPLLVALLCLFLRQLAGAMAYLGARGLVHRDLATRNLLLASPRTIKVADFGLVRPLGGARGRYVMGGPRPIPYAWCAPESLRHGAFSSASDVWMFGVTLWEMFSGGEEPWAGVPPYLILQRLEDRARLPRPPLCSRALYSLALRCWAPHPADRPSFSHLEGLLQEAGPSEACCVRDVTEPGALRMETGDPITVIEGSPDSTIWKGQNGRTFKVGSFPASAVTLADAGGLPATRPVHRGTPARGDQHPGSIDGDRKKANLWDAPPARGQRRNMPLERMKGISRSLESVLSLGPRPTGGGSSPPEIRQARAVPQGPPGLPPRPPLSSSSPQPSQPSRERLPWPKRKPPHNHPMGMPGARKAAALSGGLLSDPELQRKIMEVELSVHGVTHQECQTALGATGGDVVSAIRNLKVDQLFHLSSRSRADCWRILEHYQWDLSAASRYVLARP

SEQ ID NO: 317020 - DNA, 1986 bp, Artificial Sequence
  derived and/or modified sequence
atgctgcccgaggccggcagcctgtggctgctgaagctgctgagagacatccagctggcccagttctactggcccatcctggaggagctgaacgtgaccagacccgagcacttcgacttcgtgaagcccgaggacctggacggcatcggcatgggcagacccgcccagagaagactgagcgaggccctgaagagactgagaagcggccccaagagcaagaactgggtgtacaagatcctgggcggcttcgcccccgagcacaaggagcccaccctgcccagcgacagccccagacacctgcccgagcccgagggcggcctgaagtgcctgatccccgagggcgccgtgtgcagaggcgagctgctgggcagcggctgcttcggcgtggtgcacagaggcctgtggaccctgcccagcggcaagagcgtgcccgtggccgtgaagagcctgagagtgggccccgagggccccatgggcaccgagctgggcgacttcctgagagaggtgagcgtgatgatgaacctggagcacccccacgtgctgagactgcacggcctggtgctgggccagcccctgcagatggtgatggagctggcccccctgggcagcctgcacgccagactgaccgcccccgcccccaccccccccctgctggtggccctgctgtgcctgttcctgagacagctggccggcgccatggcctacctgggcgccagaggcctggtgcacagagacctggccaccagaaacctgctgctggccagccccagaaccatcaaggtggccgacttcggcctggtgagacccctgggcggcgccagaggcagatacgtgatgggcggccccagacccatcccctacgcctggtgcgcccccgagagcctgagacacggcgccttcagcagcgccagcgacgtgtggatgttcggcgtgaccctgtgggagatgttcagcggcggcgaggagccctgggccggcgtgcccccctacctgatcctgcagagactggaggacagagccagactgcccagaccccccctgtgcagcagagccctgtacagcctggccctgagatgctgggccccccaccccgccgacagacccagcttcagccacctggagggcctgctgcaggaggccggccccagcgaggcctgctgcgtgagagacgtgaccgagcccggcgccctgagaatggagaccggcgaccccatcaccgtgatcgagggcagccccgacagcaccatctggaagggccagaacggcagaaccttcaaggtgggcagcttccccgccagcgccgtgaccctggccgacgccggcggcctgcccgccaccagacccgtgcacagaggcacccccgccagaggcgaccagcaccccggcagcatcgacggcgacagaaagaaggccaacctgtgggacgccccccccgccagaggccagagaagaaacatgcccctggagagaatgaagggcatcagcagaagcctggagagcgtgctgagcctgggccccagacccaccggcggcggcagcagcccccccgagatcagacaggccagagccgtgccccagggcccccccggcctgccccccagaccccccctgagcagcagcagcccccagcccagccagcccagcagagagagactgccctggcccaagagaaagcccccccacaaccaccccatgggcatgcccggcgccagaaaggccgccgccctgagcggcggcctgctgagcgaccccgagctgcagagaaagatcatggaggtggagctgagcgtgcacggcgtgacccaccaggagtgccagaccgccctgggcgccaccggcggcgacgtggtgagcgccatcagaaacctgaaggtggaccagctgttccacctgagcagcagaagcagagccgactgctggagaatcctggagcactaccagtgggacctgagcgccgccagcagatacgtgctggccagaccctag

SEQ ID NO: 317021 - DNA, 1986 bp, Artificial Sequence
  derived and/or modified sequence
atgttacccgaggctggatctctatggctgctgaagctcctgagagacatacagctggctcagttctactggcccattcttgaagaactgaatgtgacacgccctgagcactttgactttgtcaagcctgaagatctggacgggattggaatgggaaggcccgctcagaggaggttgagcgaagccctgaagcgcttgagaagtggtcccaagtcgaaaaactgggtgtataagatactagggggttttgcaccagaacacaaggaaccaacactgcccagcgacagccccaggcacctgcctgagccagagggcggattgaagtgtttaatcccagagggagctgtctgcaggggcgaacttctcggctctggttgtttcggggtggtccaccgtggtctttggactctcccctcaggcaagagtgtccctgtggcagtaaagagtcttagggtcggacctgaaggtcccatgggaactgagctaggcgacttcctgcgagaggtgagcgtgatgatgaatctggaacatccccatgtgctccgtttgcatggcctggtgcttggccaaccactgcaaatggtcatggaactggccccactgggtagcctccacgcgagactcacagcccctgccccaacaccgccactcctggtggccctgctctgtttatttctgcgccagctcgctggagctatggcatacctgggggcccgcggtcttgtccacagggacctggccactaggaatttactgctagcgtctccaagaacaatcaaagtcgctgacttcggtctggtacggcctctaggtggggcacgtggcaggtacgtcatgggcggcccgagacccattccttacgcgtggtgtgcaccagagtctctacgacacggcgctttctcctccgcatccgacgtgtggatgtttggtgtcacactctgggagatgttctctggcggggaggagccctgggctggtgtaccaccatacctgattctacaaagactcgaggaccgagcccgcctaccccgccctcctctctgcagccgagcgctgtacagccttgcccttcgctgctgggccccacaccccgctgatcgtccatccttttcccacctggaggggctgctgcaagaggccggcccttctgaggcttgctgtgttagggatgttaccgagcctggcgctctccggatggagacgggcgatcccatcacggtaatcgagggatccccagattcaaccatctggaaaggccagaatggccggactttcaaagtaggctcttttccagccagcgctgtgaccctggccgatgccggcggacttcccgctacccgacctgtccaccgcggcactcccgccaggggggatcagcatcccggcagtatcgacggagaccgaaagaaagccaacttatgggacgctccgcctgcacgcggtcaaagaagaaacatgccccttgagagaatgaaagggatatcccgcagcctagaatcggtcctctctctcggaccccgtccaacaggcgggggctcttcccccccagagatcagacaagccagggccgtcccccagggccccccaggactgccccccagacccccgttatcctcctccagccctcagccaagtcagccgagtcgcgaaagactcccatggcccaaacgcaagccacctcataaccacccaatgggaatgccgggcgcacgcaaagccgccgctttgtccggcggactactgtccgaccccgagctgcagagaaagatcatggaggtggagctcagcgtccacggggtgacccatcaggagtgccaaacagccctcggtgcgaccggaggagatgtcgtgagtgcaattagaaatctgaaggtggaccagctgtttcacctctctagccgtagtcgcgctgactgctggcggattttggagcattaccagtgggatttgtccgctgcaagcagatatgtgcttgctaggccatag

SEQ ID NO: 317022 - DNA, 1986 bp, Artificial Sequence
  derived and/or modified sequence
atgctgccagaggccggatctttatggcttctgaaactgctccgggacatccagctggcacaattttattggcccatcctggaagagctcaatgtgacaaggcctgaacattttgattttgtaaagccagaggacctggacggcatcggaatgggccgaccagcccagagacgcttatctgaagcactcaagaggcttcgaagcggacctaaatcaaagaactgggtttacaagattctggggggttttgccccagagcacaaggaaccaaccctgccctccgactccccacgccatctgccagagccagagggagggttgaagtgtctgatccccgagggcgcagtgtgccgtggcgaactccttggaagcggctgctttggagtggttcaccggggcttgtggactctgccttccggaaagagcgtccccgttgccgtgaagagcttgcgagtgggccctgagggacccatgggcacggaactgggggacttcctacgggaggtgtctgtgatgatgaaccttgagcacccccacgtccttcgtctgcacggtttggttctgggtcagccactgcagatggtcatggagctcgctcccctcggtagcctccacgccaggctgacagcgcctgcccccacgccgccattgctggttgcactcctttgcttgtttctacgccaacttgcaggggcgatggcatatcttggggccaggggtctggtgcatagggacctggccacacggaaccttttgctcgccagtccgcggacaatcaaagtggccgatttcggactagtcaggcctttgggtggggcccggggcaggtacgtaatgggaggtcctcgccccatcccatacgcttggtgtgcaccagaatccctgcgacatggagcctttagcagtgcttctgatgtatggatgttcggggtgacgctatgggaaatgtttagtggtggggaggagccctgggccggagtgcccccatatctgattctgcaacgcctggaggaccgcgctcgattaccccgtcctcctctgtgttccagggcgctgtattcgctcgcgctccgttgttgggctccccatcccgctgaccgaccttcatttagtcacctggaaggactcctgcaggaggcgggcccatccgaagcctgttgcgtccgtgacgtgaccgagcctggtgctcttagaatggagaccggtgacccaattactgtgatcgagggtagcccagactccactatctggaagggccaaaatgggagaacttttaaagtggggtccttccccgctagcgccgtgacactggccgatgctggtgggctgccagccaccaggccagttcaccggggaacaccagccaggggcgatcagcaccccggtagtatcgatggggatcggaaaaaagccaacctttgggacgctccgcctgcacggggacagcgtcggaatatgccactggagcgcatgaagggcatcagcaggagcctggagagcgttctgagtctcggacctcgacctactggcggagggtcgagtccacccgaaatcagacaggcgcgggcagtacctcagggcccacccggactgcctccgagaccacccttgtcatccagtagtccccagccgtcgcagccatcgcgagaacgcctaccgtggccaaagcgtaaacccccccataatcatccaatgggaatgcccggtgcacgaaaagccgctgcactgagcggtggattactttctgaccccgagttgcagcgaaagataatggaagtagagctttccgttcacggagtcacgcatcaggagtgtcagaccgccttaggcgccacgggtggagacgtggtgagcgccattaggaatctaaaggttgaccagctgtttcacttgagtagcagatcacgggctgattgttggcgcatcctggagcattatcagtgggatttatccgccgcttcccggtacgtgttagcaagaccctag

SEQ ID NO: 317023 - DNA, 1986 bp, Artificial Sequence
  derived and/or modified sequence
atgctgcctgaggccggcagcctgtggctgctgaagctgctgcgggacatccagctggcccagttctactggcccatcctggaggagctgaatgtgaccaggcctgagcactttgattttgtgaagccagaggacctggatggcatcggcatgggccggcctgcccagaggcggctgtctgaggccctgaagaggctgcggagcggccccaagagcaagaactgggtgtacaagatcctgggcggctttgcccctgagcacaaggagcccaccctgcccagcgacagccccaggcacctgcctgagcctgagggcggcctgaagtgcctgatccctgagggcgctgtgtgccgcggggagctgctgggcagcggctgctttggagtggtgcaccggggcctgtggaccctgcccagcggcaagtctgtgcctgtggccgtgaagagcctgcgggtgggccctgagggccccatgggcacagagctgggggacttcctgcgggaggtgtctgtgatgatgaacctggagcacccccacgtgctgcggctgcacggcctggtgctgggccagcccctgcagatggtgatggagctggcccccctgggcagcctgcacgcccggctgacagccccagcccccaccccacccctgctggtggccctgctgtgcctcttcctgcggcagctggccggggccatggcctacctgggcgcccggggcctggtgcaccgggacctggccaccaggaacctgctgctggccagccccaggaccatcaaggtggccgactttggcctggtgcggcccctgggcggggcccggggccgctacgtgatgggcggcccccggcccatcccctatgcctggtgtgcccctgagagcctgcggcatggagccttcagcagcgccagtgatgtgtggatgtttggagtgaccctgtgggagatgttcagcggcggggaggagccctgggccggcgtgcccccctacctgatcctgcagaggctggaggaccgggcccggctgcccaggcctcccctgtgcagccgggccctgtacagcctggccctgcgctgctgggccccccaccctgctgaccggcccagcttcagccacctggagggcctgctgcaggaggccggccccagcgaggcctgctgcgtgagagatgtgacagagcccggggccctgaggatggagactggagaccccatcaccgtcatcgagggcagcccagacagcaccatctggaagggccagaatggaagaaccttcaaggtgggcagcttccctgccagcgctgtgaccctggctgatgctgggggcctgcctgccaccaggcctgtgcaccggggcaccccagcccggggggaccagcaccctggcagcattgatggagacaggaagaaggccaacctgtgggatgcccccccagcccggggccagaggaggaacatgcccctggagaggatgaagggcatcagccgcagcctggagagcgtgctgagcctgggcccccggcccactggaggcggcagcagccccccagagatccggcaggcccgggctgtgccccagggccccccaggcctgccccccaggcctcccctgagcagcagcagcccccagcccagccagcccagccgggagcggctgccctggcccaagaggaagccaccccacaaccaccccatgggcatgcctggggccaggaaggccgccgccctgagcggcggcctgctgagtgaccctgagctgcagaggaagatcatggaggtggagctgtctgtgcacggcgtgacccaccaggagtgccagacagccctgggcgccactggaggagatgtggtgtctgccatccggaacctgaaggtggaccagctgttccacctgagcagccgcagcagagctgactgctggaggatcctggagcactaccagtgggacctgtctgctgccagccgctacgtgctggcccggccctag

SEQ ID NO: 317024 - DNA, 1986 bp, Artificial Sequence
  derived and/or modified sequence
atgctgcccgaggccggcagcctgtggctgctgaagctgctgcgggatatacagctggctcaattctactggcccatcctggaggagctaaatgtgacacgccccgaacacttcgacttcgtaaagccagaagacctagacggcatagggatgggccggcctgctcagcgtcggttaagtgaagccctgaaacgactacgctccggtcctaaaagtaagaactgggtgtataaaatcttagggggtttcgcccccgagcacaaagagcccaccctgcccagtgacagcccaagacacttacccgaaccggaggggggcctcaaatgcctcatcccagagggcgcagtgtgtcggggtgagctgctggggtctggttgtttcggggtggtgcatcgtggcctctggactctgccctccggcaaatccgttccagtagccgtaaagtcgcttagagtgggccctgaaggtcccatgggcacagagctgggtgacttcctgagagaggtgtccgtgatgatgaacctagaacacccacacgtcctgcggttacatgggctcgtgctgggccaaccactacagatggtgatggaacttgcccccctcggatctctacacgcacgcctcaccgcaccagcgcccacgcctcccttattagtcgccctgctttgcttgtttctgagacagctcgctggggccatggcatacctgggcgctagggggctggtgcatcgcgacctagcaacaaggaatctcttgctagcatccccacgcacgattaaagttgcggattttggcctggttagacctctcggaggcgcccggggaagatacgtgatgggagggccccggcctattccatatgcctggtgcgcccccgaatccctgagacacggtgcgttcagcagtgctagcgatgtttggatgtttggagtcacattatgggaaatgttctccggaggggaagagccatgggccggcgtgcccccctacctcatacttcagcggttagaggatcgggccagattacccaggcctccactgtgttcgagggccttatactcccttgccctgcggtgttgggcccctcaccctgcagataggccctctttcagtcacctggaaggattgctgcaggaagctggcccctcggaagcttgctgcgtcagggatgtcaccgaacccggggcgctgcgaatggaaactggggatccaataactgtcattgagggtagccctgactctaccatttggaagggacagaatggcagaacgtttaaggttggcagttttccagcttcagccgttacactggcagatgcgggcggactgcctgccacccgacctgttcacaggggtacacccgcccgaggagaccaacacccagggtcgatcgacggggataggaaaaaggctaatctatgggacgcaccacctgccaggggtcagcggcggaatatgcctctggaacgcatgaaggggattagcagaagcctggagtctgtgctgtccctgggtccccgtcctactggcggcgggtcaagtcctcccgagatacggcaggccagggcagtcccgcaaggaccaccaggtttaccacctcgacccccactgtcctcctcctcaccacagccaagccagccctcccgtgaacggctgccatggcctaaacgcaagccaccccacaatcatcctatggggatgcctggggcacgaaaggccgctgcattaagcggcggtttgctcagtgatcccgagcttcagagaaagattatggaagtggaactgtccgtccatggagtgacccaccaggaatgtcagactgcactcggagccactggaggagatgtcgttagcgcaataagaaacctgaaagtggaccagctgtttcatctcagctcacggtccagggcagattgttggaggatcctggagcactaccagtgggacctgagcgctgctagccgatacgtccttgctagaccgtag

SEQ ID NO: 317025 - DNA, 1986 bp, Artificial Sequence
  derived and/or modified sequence
atgctgcccgaggccggcagcctgtggctgctgaagctgctgcgggacatccagctcgcacagttctattggccaatcctggaagaactaaatgtgactcggcctgaacacttcgattttgtgaaacctgaagacctggacggcattggaatgggccggcctgcacagcggagattatccgaggctctgaagaggctccgctctggacccaaaagcaagaactgggtgtacaagatacttggaggcttcgcccccgagcacaaagagcccactttgcccagcgacagcccccgccacctgcccgaacccgagggaggtctgaagtgtctgatcccagagggggctgtgtgtagaggggagttgctgggctctggttgctttggcgtggtgcatcgtggcctttggaccctgccctcgggtaagagcgtgcctgtcgccgtgaaatctctgagagtggggcccgagggtcctatgggtacagagctaggcgacttcctgcgggaggtaagtgtgatgatgaacctggagcacccacatgtgcttcgcttgcacgggctcgtgctgggacagccactgcaaatggtaatggagctggctcctctgggcagcctccatgctaggctgacagccccagccccgacaccaccgctcctggttgcactgctttgcctgttcctgagacagctcgctggcgcaatggcatatcttggggcccgcgggttggtgcaccgagacctagcaaccaggaacctgctcttggcatcacctagaaccattaaggtagccgacttcggactggttagacccctgggcggtgcgagaggacgatacgtaatgggcggacccagaccaataccgtatgcctggtgtgcccccgagtctcttcgtcatggagcattcagctctgcctccgacgtgtggatgtttggagttacactctgggagatgttttctgggggcgaagagccatgggccggggtcccgccctatcttattctacagcgcctggaagacagggcgcgactcccaaggcctcccctctgcagcagggcgctctactccctggcgctacggtgttgggccccccacccagccgatcggcccagttttagtcacctcgaggggttactgcaagaagccggaccaagcgaagcatgttgcgtgcgggacgtgacagaacctggagcactcagaatggaaaccggcgatccaatcaccgtgatcgaggggtcgcccgactctacaatctggaagggccagaacggcagaactttcaaagtggggagttttcccgcgtctgccgttaccctggccgacgcggggggattacctgccaccagacccgtacaccgaggaacacctgcacgcggggaccagcaccctggcagtatcgacggggatagaaagaaggccaacctgtgggatgccccccctgctcgaggccagcggcgcaacatgcccctcgaacgtatgaagggaatctcacgctccctagaaagcgtacttagcctcgggcccaggccaacaggaggggggtcttcaccccctgaaattcgacaggccagagctgtccctcaagggccccctggcttgccccctagacctccactcagtagcagttccccccagccttcgcaaccatcgcgcgagcgtttaccatggccaaagcggaaaccaccccataatcaccctatggggatgcccggggccaggaaggctgcagctctgagcggcggcctgttaagcgatccggaacttcaaaggaagattatggaagtggagctgtccgtccacggcgtcacgcaccaggagtgtcagactgccctgggcgccacaggaggggatgtggtttccgcaatccgtaatctaaaggtggatcagctattccacctctctagccgctctagagccgactgctggcgcatccttgaacattaccaatgggatctctctgctgcaagtcggtacgtcttggcaaggccatag

SEQ ID NO: 317026 - DNA, 1986 bp, Artificial Sequence
  derived and/or modified sequence
atgctccccgaagcaggatctttatggctgcttaagttattaagggacattcagctcgcacagttctactggcccatcttggaagagctgaatgtgacccgtcccgagcattttgattttgtaaaacctgaggatctggacggcatcgggatggggcgaccagcacaaagacgcctctctgaagccctgaaaaggctgagaagtggcccaaagagtaagaattgggtatataagattctgggagggtttgcacctgagcacaaggagccaactctgccttccgacagccctagacacctgccagagccggaggggggactaaaatgtctcatccctgaaggagcagtttgtcgaggggagctgctggggtccggatgttttggtgtggtgcaccgcggactgtggacactacccagtggcaagtccgtccctgtggcagtgaaatctctgcgagtggggccagaggggccaatggggaccgagctgggcgacttccttagggaggtgtccgtgatgatgaacctcgagcacccgcacgttctgcgcctgcatgggctcgtgctcggtcagccactgcagatggtcatggaacttgcacctctgggttccctccacgcgcgtctaacagcaccagctcctaccccccctctgctggtcgcgctcttgtgcttgttcctgagacaactcgccggtgccatggcctacctgggggcaagaggcttggtgcatcgggatcttgctacacggaacctgttgctggcctcgccaaggaccataaaagtggcagacttcggtttggtgagaccgctggggggagctaggggtagatatgttatgggcggtccgaggcccatcccctatgcatggtgcgcacctgagtccctgcgccacggagctttttcatcagccagtgatgtctggatgttcggcgtgactctctgggaaatgttctcaggaggggaggaaccctgggctggggtgcctccatacttgatcttgcagcgtctggaagaccgcgcacgtctgcctcgtcctccactttgctcccgggctctgtactctctggctctgaggtgttgggcaccgcatccggctgaccgtccctcttttagccatctggaagggctcctgcaggaggccggtccttccgaggcgtgctgcgttcgtgatgtgaccgagcctggagcgctgcgcatggagactggcgaccctattacagtaatcgagggaagtcctgacagcaccatctggaagggccagaatggaagaaccttcaaagtaggctcctttcccgcttctgctgtaaccctggctgatgccggaggattaccggctacccgccctgtgcatagaggaaccccagcaagaggcgatcagcacccaggcagtatcgacggggatcgcaagaaagctaatctctgggacgctccgccagcacggggtcagcgtagaaatatgcccctggaacgaatgaaagggatctcgaggagcctggaatcggtgttaagtcttggacctcgaccgacagggggaggttcgtccccacctgaaatccgccaagcgagggcggttccgcagggaccaccgggactccctccaaggccccctctgtctagctcctccccgcaaccatcacagccctcaagagaaaggctgccttggcccaaacggaagccaccccacaatcaccccatgggcatgcctggtgcaagaaaggccgctgccctgagtgggggtctcctgtccgatccagagctacagaggaagatcatggaggtagagctttctgtgcatggcgttactcatcaggagtgtcagactgctctgggtgcaactggaggagacgtggtgtccgcgattcggaatctgaaagtggatcaactcttccaccttagtagtcggtccagggccgattgttggagaatcctggagcattaccagtgggacctgtccgccgcttctaggtacgtgctcgctcgcccttag

SEQ ID NO: 317027 - DNA, 1986 bp, Artificial Sequence
  derived and/or modified sequence
atgctgccggaagcgggatccctgtggctgctcaagttgttgcgggatatccagcttgcacagttttactggccgatcctggaggaattgaatgtgacccggccagagcacttcgattttgtcaagcccgaggacctcgatgggattgggatgggcagacctgctcagcggcgactttctgaagccctcaagcgccttcggtctggtccaaagtccaagaattgggtatacaagatcctgggcggattcgccccagagcataaagagcctaccctccccagcgatagcccgaggcacctacccgagcctgaaggcggtttgaagtgccttattcccgagggggctgtgtgtaggggggagctcctcggttctggatgctttggagttgtccaccgtggactttggactttgccctctgggaagtctgtgcctgtggctgttaagtcgctgagagtggggcctgagggccctatggggacagaactgggggatttcctgagggaagtgtctgtaatgatgaacctggagcatccacacgtcctgagacttcacggtctggttctggggcaacctctacagatggtcatggagcttgctcccttggggtccttacacgctcggcttaccgccccagccccaacccccccactgctggtggcgctgctgtgcctgttcttaagacagttagcgggtgccatggcttacctcggcgcaaggggcctcgtgcaccgtgatctggccactaggaatctactactggcctcacctcgcaccataaaagtcgcagacttcggccttgtccggccactgggtggagcgagaggccgatacgtgatggggggacccaggccaattccatacgcttggtgtgcaccagagtcactgagacatggcgctttttccagcgcttctgacgtgtggatgtttggtgtcacgctgtgggagatgttcagtgggggtgaagagccttgggctggagtgcctccatacctgatccttcagaggcttgaagacagggctagattaccacgtccaccgctctgtagccgcgcactgtattccttagctctgagatgttgggcccctcaccccgcagaccgccctagcttctcccacctggagggcctcttacaggaggcagggccatctgaggcctgctgtgtgcgagatgtgactgaaccaggcgcactgaggatggagaccggggaccctattacagtgattgaaggctccccagattccacgatttggaaggggcagaacggtagaacatttaaggttggttcttttccagccagtgccgtgacgcttgcagatgccggaggcttgcccgcaaccagacccgtgcaccgcggtaccccggctcgcggtgaccagcacccaggcagcatcgacggcgacaggaaaaaagccaacttgtgggatgccccacccgctcgtgggcaaaggcgcaacatgccactggagcgaatgaagggaatatcacgatccctggaaagcgtgctgtcgctgggccctcgtcctacggggggtggctcaagtccaccagaaattcgacaggcacgggctgtgccccagggtcctccagggctaccaccccgtcctccacttagcagctcatctcctcagccgagccagccaagtcgcgagcgcctcccctggcccaaaagaaagccacctcacaaccacccaatgggcatgccaggggctagaaaggctgccgcacttagtggcggtcttttatcagatcctgaacttcagagaaaaattatggaggtagagctgtccgtccacggcgttacacatcaggagtgtcagaccgcactcggtgccacgggaggcgacgtagtgtccgccattcgcaacctgaaagtggatcagctgttccatctgtctagtcgctctcgtgccgactgctggcgaattctggagcactaccagtgggacctgtcagcagcctcccgatatgttctggcgagaccctag

SEQ ID NO: 317028 - DNA, 3122 bp, Artificial Sequence
  derived and/or modified sequence
aacagcttcaactgtagactctgtctaggccagggccaactctccgtaccagcatcaacatctctctgccctggccccattccagggttcattaagtaaagcctgctaggaagctctgaaccccctgccatggggcaggaactgtgtcctatttagccttatattccctgtgcgtggacaggatagctctatcgggcgcttattcatgtaagagggaactcggggtgcggccctcgccggccccgggccagcggccaggtccccgccctccgcgggatttactcctgtcccgcctcctcggatttagcccaggcagcctgggaggttccgcagtcgccgcttccgccttgaccaggtggagctggagacctggtctctctagggcctaccctgagctcaccatctgaaggagagtgccatcatccttaggaactccttctccagacatgcttcctgaggctggctccctgtggctactgaagctgctccgggacatccagttggcccagttttactggcccatccttgaggagcttaatgtcactcggccagagcacttcgactttgtaaagcctgaggacctggacggcattggcatgggccggcctgcccagcgcagactgtccgaagctctgaaaaggctacgttctgggcctaagtctaagaactgggtctacaagatccttggaggttttgcccctgagcacaaggagcccaccctgccctcggacagcccacggcacctccctgagccagaggggggcctcaagtgtctgatcccagagggtgctgtttgcagaggggagctgctgggttcaggctgcttcggtgtggtgcaccgagggctgtggacgctgcccagtggcaagagtgtcccagtggctgtcaagtccctccgggtaggtcccgaaggcccgatgggcacagaactgggggacttcctgcgagaggtatcggtcatgatgaacttggagcacccacacgtgctgcgtctgcacggccttgtactgggccagcctctgcagatggtgatggagctggcgccactgggctccctgcacgcgcgcctaacggccccggccccgacacccccgctgctcgtggccctgctctgcctcttcctgcggcagctggcgggagccatggcgtacctgggggcccgcgggctggtgcaccgagacctcgctacgcgcaacctactgctggcgtcgccgcgcaccatcaaggtggctgacttcgggctggtgcggcctctgggcggtgcccggggccgctacgtcatgggcgggccccgccctatcccctacgcctggtgtgccccagagagcctgcgccacggagccttctcgtctgcctcggacgtgtggatgtttggggtgacgctgtgggagatgttctccgggggcgaggaaccctgggccggggtcccaccgtacctcatcctgcagcggctggaggacagagcccggctgcctaggcctcccctctgctccagggccctctactccctcgccttgcgctgctgggccccccaccctgccgaccggcctagcttttcccacctggaggggctgctgcaagaggccgggccttcggaagcatgttgtgtgagggatgtcacagaaccaggcgccctgaggatggagactggtgaccccatcacagtcatcgagggcagccccgactccacaatctggaagggccagaatggtcgcaccttcaaagtgggcagcttcccagcctcggcagtgacgctggcagatgcggggggcttgccagccacccgtccagtccacagaggcacccctgcccggggagatcaacacccaggaagcatagatggagacagaaagaaggcaaatctttgggatgcgcccccagcacggggccagaggaggaacatgcccctggagaggatgaaaggcatttccaggagtctggagtcagttctgtccctcggtcctcgtcccacagggggtggttcaagcccccctgaaattcgacaagccagagctgtgccccagggacctccaggcctgcctccacgcccacctttatcctctagctctcctcagcccagccagccctctagggagaggcttccctggcccaaaagaaaacccccacacaatcaccccatgggaatgcctggagcccgtaaagccgctgccctctctggaggcctcttgtccgatcctgagttgcagaggaagattatggaggtggagctgagtgtgcatggggtcacccaccaggagtgccagacagcactaggagccactgggggagatgtggtttctgccatccggaacctcaaggtagatcagctcttccacctgagtagccggtccagagctgactgctggcgcatcctggagcattaccagtgggacctctcagctgccagccgctatgtcctggccaggccctgagctcagcttctgcgggcacagacaccagcatgaaaagcctaggcccctgagggcctggccacatgggaccaagcggaaccagaacaaggtcccgacaggggtagacgttccacctggggagatcccacctgccgtaggcacatggaggaggagcccagagttgggcactggcaaatgtctcctccctcccatgctccttggcttctgaaggctgaagctcctttggctgggccaagaaggatctagtctgcccactacattctcaaacaagaggacttggaagaaaagagctgctatacatcatatgcagaggaagcttctacgcgctagagaggatcaaggggccacactggaccatgtgaacagccatcctgaactgccatcagctaccacactggactctgcagggcagccatcctggatgatggaagccaccatattgacttggggtataggcccaaactgccttcgtttggtccagggccatcgtgggtgatgacgattgctctcttgcactcaaggacatttgatgctggtagtatggattatgagatggactagcccctgccccagcccagctctcacattcccctttgttttttcccataccaactgcttctaccctcccctattacatacatctttcaatgtccaaaaagttacaaagtttatatgaatgtaacatataaa

SEQ ID NO: 317029 - DNA, 2835 bp, Artificial Sequence
  derived and/or modified sequence
gtcccgcctcctcggatttagcccaggcagcctgggaggttccgcagtcgccgcttccgccttgaccaggtggagctggagacctggtctctctagggcctaccctgagctcaccatctgaaggagagtgccatcatccttaggaactccttctccagacatgcttcctgaggctggctccctgtggctactgaagctgctccgggacatccagttggcccagttttactggcccatccttgaggagcttaatgtcactcggccagagcacttcgactttgtaaagcctgaggacctggacggcattggcatgggccggcctgcccagcgcagactgtccgaagctctgaaaaggctacgttctgggcctaagtctaagaactgggtctacaagatccttggaggttttgcccctgagcacaaggagcccaccctgccctcggacagcccacggcacctccctgagccagaggggggcctcaagtgtctgatcccagagggtgctgtttgcagaggggagctgctgggttcaggctgcttcggtgtggtgcaccgagggctgtggacgctgcccagtggcaagagtgtcccagtggctgtcaagtccctccgggtaggtcccgaaggcccgatgggcacagaactgggggacttcctgcgagaggtatcggtcatgatgaacttggagcacccacacgtgctgcgtctgcacggccttgtactgggccagcctctgcagatggtgatggagctggcgccactgggctccctgcacgcgcgcctaacggccccggccccgacacccccgctgctcgtggccctgctctgcctcttcctgcggcagctggcgggagccatggcgtacctgggggcccgcgggctggtgcaccgagacctcgctacgcgcaacctactgctggcgtcgccgcgcaccatcaaggtggctgacttcgggctggtgcggcctctgggcggtgcccggggccgctacgtcatgggcgggccccgccctatcccctacgcctggtgtgccccagagagcctgcgccacggagccttctcgtctgcctcggacgtgtggatgtttggggtgacgctgtgggagatgttctccgggggcgaggaaccctgggccggggtcccaccgtacctcatcctgcagcggctggaggacagagcccggctgcctaggcctcccctctgctccagggccctctactccctcgccttgcgctgctgggccccccaccctgccgaccggcctagcttttcccacctggaggggctgctgcaagaggccgggccttcggaagcatgttgtgtgagggatgtcacagaaccaggcgccctgaggatggagactggtgaccccatcacagtcatcgagggcagccccgactccacaatctggaagggccagaatggtcgcaccttcaaagtgggcagcttcccagcctcggcagtgacgctggcagatgcggggggcttgccagccacccgtccagtccacagaggcacccctgcccggggagatcaacacccaggaagcatagatggagacagaaagaaggcaaatctttgggatgcgcccccagcacggggccagaggaggaacatgcccctggagaggatgaaaggcatttccaggagtctggagtcagttctgtccctcggtcctcgtcccacagggggtggttcaagcccccctgaaattcgacaagccagagctgtgccccagggacctccaggcctgcctccacgcccacctttatcctctagctctcctcagcccagccagccctctagggagaggcttccctggcccaaaagaaaacccccacacaatcaccccatgggaatgcctggagcccgtaaagccgctgccctctctggaggcctcttgtccgatcctgagttgcagaggaagattatggaggtggagctgagtgtgcatggggtcacccaccaggagtgccagacagcactaggagccactgggggagatgtggtttctgccatccggaacctcaaggtagatcagctcttccacctgagtagccggtccagagctgactgctggcgcatcctggagcattaccagtgggacctctcagctgccagccgctatgtcctggccaggccctgagctcagcttctgcgggcacagacaccagcatgaaaagcctaggcccctgagggcctggccacatgggaccaagcggaaccagaacaaggtcccgacaggggtagacgttccacctggggagatcccacctgccgtaggcacatggaggaggagcccagagttgggcactggcaaatgtctcctccctcccatgctccttggcttctgaaggctgaagctcctttggctgggccaagaaggatctagtctgcccactacattctcaaacaagaggacttggaagaaaagagctgctatacatcatatgcagaggaagcttctacgcgctagagaggatcaaggggccacactggaccatgtgaacagccatcctgaactgccatcagctaccacactggactctgcagggcagccatcctggatgatggaagccaccatattgacttggggtataggcccaaactgccttcgtttggtccagggccatcgtgggtgatgacgattgctctcttgcactcaaggacatttgatgctggtagtatggattatgagatggactagcccctgccccagcccagctctcacattcccctttgttttttcccataccaactgcttctaccctcccctattacatacatctttcaatgtccaaaaagttacaaagtttatatgaatgtaacatataa

SEQ ID NO: 317030 - protein, 1089 aa, Artificial Sequence
  derived and/or modified sequence
MPQRLPHARQHTPLPLGSADYRRVVSVRPQGPHRDPKDSRDAAKREQGSLAPRPVPASRGGKTLCKGYRQAPPGPPAQFQRPICSASPPWASRFSTPCPGGAVREDTYPVGTQGVPSLALAQGGPQGSWRFLEWKSMPRLPTDLDIGGPWFPHYDFEWSCWVRAISQEDQLATCWQAEHCGEVHNKDMSWPEEMSFTANSSKIDRQKVPTEKGATGLSNLGNTCFMNSSIQCVSNTQPLTQYFISGRHLYELNRTNPIGMKGHMAKCYGDLVQELWSGTQKSVAPLKLRRTIAKYAPKFDGFQQQDSQELLAFLLDGLHEDLNRVHEKPYVELKDSDGRPDWEVAAEAWDNHLRRNRSIIVDLFHGQLRSQVKCKTCGHISVRFDPFNFLSLPLPMDSYMDLEITVIKLDGTTPVRYGLRLNMDEKYTGLKKQLRDLCGLNSEQILLAEVHDSNIKNFPQDNQKVQLSVSGFLCAFEIPVPSSPISASSPTQIDFSSSPSTNGMFTLTTNGDLPKPIFIPNGMPNTVVPCGTEKNFTNGMVNGHMPSLPDSPFTGYIIAVHRKMMRTELYFLSPQENRPSLFGMPLIVPCTVHTRKKDLYDAVWIQVSWLARPLPPQEASIHAQDRDNCMGYQYPFTLRVVQKDGNSCAWCPQYRFCRGCKIDCGEDRAFIGNAYIAVDWHPTALHLRYQTSQERVVDKHESVEQSRRAQAEPINLDSCLRAFTSEEELGESEMYYCSKCKTHCLATKKLDLWRLPPFLIIHLKRFQFVNDQWIKSQKIVRFLRESFDPSAFLVPRDPALCQHKPLTPQGDELSKPRILAREVKKVDAQSSAGKEDMLLSKSPSSLSANISSSPKGSPSSSRKSGTSCPSSKNSSPNSSPRTLGRSKGRLRLPQIGSKNKPSSSKKNLDASKENGAGQICELADALSRGHMRGGSQPELVTPQDHEVALANGFLYEHEACGNGCGDGYSNGQLGNHSEEDSTDDQREDTHIKPIYNLYAISCHSGILSGGHYITYAKNPNCKWYCYNDSSCEELHPDEIDTDSAYILFYEQQGIDYAQFLPKIDGKKMADTSSTDEDSESDYEKYSMLQ

SEQ ID NO: 317031 - protein, 27 aa, Artificial Sequence
  derived and/or modified sequence
MDMVENADSLQAQERKDILMKYDKGHR

SEQ ID NO: 317032 - protein, 57 aa, Artificial Sequence
  derived and/or modified sequence
MDMVENADSLQAQERKDILMKYDKGHRAGLPEDKGSPLESTAALIVLAFCMRRSCLL

SEQ ID NO: 317033 - protein, 786 aa, Artificial Sequence
  derived and/or modified sequence
MDMVENADSLQAQERKDILMKYDKGHRAGLPEDKGPEPVGINSSIDRFGILHETELPPVTAREAKKIRREMTRTSKWMEMLGEWETYKHSSKLIDRVYKGIPMNIRGPVWSVLLNIQEIKLKNPGRYQIMKERGKRSSEHIHHIDLDVRTTLRNHVFFRDRYGAKQRELFYILLAYSEYNPEVGYCRDLSHITALFLLYLPEEDAFWALVQLLASERHSLPGFHSPNGGTVQGLQDQQEHVVPKSQPKTMWHQDKEGLCGQCASLGCLLRNLIDGISLGLTLRLWDVYLVEGEQVLMPITSIALKVQQKRLMKTSRCGLWARLRNQFFDTWAMNDDTVLKHLRASTKKLTRKQGDLPPPAKREQGSLAPRPVPASRGGKTLCKGYRQAPPGPPAQFQRPICSASPPWASRFSTPCPGGAVREDTYPVGTQGVPSLALAQGGPQGSWRFLEWKSMPRLPTDLDIGGPWFPHYDFEWSCWVRAISQEDQLATCWQAEHCGEVHNKDMSWPEEMSFTANSSKIDRQKVPTEKGATGLSNLGNTCFMNSSIQCVSNTQPLTQYFISGRHLYELNRTNPIGMKGHMAKCYGDLVQELWSGTQKSVAPLKLRRTIAKYAPKFDGFQQQDSQELLAFLLDGLHEDLNRVHEKPYVELKDSDGRPDWEVAAEAWDNHLRRNRSIIVDLFHGQLRSQVKCKTCGHISVRFDPFNFLSLPLPMDSYMDLEITVIKLDGTTPVRYGLRLNMDEKYTGLKKQLRDLCGLNSEQILLAEVHDSNIKISPLHHLQMECSP

SEQ ID NO: 317034 - DNA, 2361 bp, Artificial Sequence
  derived and/or modified sequence
atggacatggtggagaacgccgacagcctgcaggcccaggagagaaaggacatcctgatgaagtacgacaagggccacagagccggcctgcccgaggacaagggccccgagcccgtgggcatcaacagcagcatcgacagattcggcatcctgcacgagaccgagctgccccccgtgaccgccagagaggccaagaagatcagaagagagatgaccagaaccagcaagtggatggagatgctgggcgagtgggagacctacaagcacagcagcaagctgatcgacagagtgtacaagggcatccccatgaacatcagaggccccgtgtggagcgtgctgctgaacatccaggagatcaagctgaagaaccccggcagataccagatcatgaaggagagaggcaagagaagcagcgagcacatccaccacatcgacctggacgtgagaaccaccctgagaaaccacgtgttcttcagagacagatacggcgccaagcagagagagctgttctacatcctgctggcctacagcgagtacaaccccgaggtgggctactgcagagacctgagccacatcaccgccctgttcctgctgtacctgcccgaggaggacgccttctgggccctggtgcagctgctggccagcgagagacacagcctgcccggcttccacagccccaacggcggcaccgtgcagggcctgcaggaccagcaggagcacgtggtgcccaagagccagcccaagaccatgtggcaccaggacaaggagggcctgtgcggccagtgcgccagcctgggctgcctgctgagaaacctgatcgacggcatcagcctgggcctgaccctgagactgtgggacgtgtacctggtggagggcgagcaggtgctgatgcccatcaccagcatcgccctgaaggtgcagcagaagagactgatgaagaccagcagatgcggcctgtgggccagactgagaaaccagttcttcgacacctgggccatgaacgacgacaccgtgctgaagcacctgagagccagcaccaagaagctgaccagaaagcagggcgacctgcccccccccgccaagagagagcagggcagcctggcccccagacccgtgcccgccagcagaggcggcaagaccctgtgcaagggctacagacaggccccccccggcccccccgcccagttccagagacccatctgcagcgccagccccccctgggccagcagattcagcaccccctgccccggcggcgccgtgagagaggacacctaccccgtgggcacccagggcgtgcccagcctggccctggcccagggcggcccccagggcagctggagattcctggagtggaagagcatgcccagactgcccaccgacctggacatcggcggcccctggttcccccactacgacttcgagtggagctgctgggtgagagccatcagccaggaggaccagctggccacctgctggcaggccgagcactgcggcgaggtgcacaacaaggacatgagctggcccgaggagatgagcttcaccgccaacagcagcaagatcgacagacagaaggtgcccaccgagaagggcgccaccggcctgagcaacctgggcaacacctgcttcatgaacagcagcatccagtgcgtgagcaacacccagcccctgacccagtacttcatcagcggcagacacctgtacgagctgaacagaaccaaccccatcggcatgaagggccacatggccaagtgctacggcgacctggtgcaggagctgtggagcggcacccagaagagcgtggcccccctgaagctgagaagaaccatcgccaagtacgcccccaagttcgacggcttccagcagcaggacagccaggagctgctggccttcctgctggacggcctgcacgaggacctgaacagagtgcacgagaagccctacgtggagctgaaggacagcgacggcagacccgactgggaggtggccgccgaggcctgggacaaccacctgagaagaaacagaagcatcatcgtggacctgttccacggccagctgagaagccaggtgaagtgcaagacctgcggccacatcagcgtgagattcgaccccttcaacttcctgagcctgcccctgcccatggacagctacatggacctggagatcaccgtgatcaagctggacggcaccacccccgtgagatacggcctgagactgaacatggacgagaagtacaccggcctgaagaagcagctgagagacctgtgcggcctgaacagcgagcagatcctgctggccgaggtgcacgacagcaacatcaagatcagccccctgcaccacctgcagatggagtgcagcccctag

SEQ ID NO: 317035 - DNA, 174 bp, Artificial Sequence
  derived and/or modified sequence
atggacatggtggagaacgccgacagcctgcaggcccaggagagaaaggacatcctgatgaagtacgacaagggccacagagccggcctgcccgaggacaagggcagccccctggagagcaccgccgccctgatcgtgctggccttctgcatgagaagaagctgcctgctgtag

SEQ ID NO: 317036 - DNA, 2361 bp, Artificial Sequence
  derived and/or modified sequence
atggatatggtcgagaacgccgatagcctgcaggctcaagagaggaaagatattcttatgaaatatgataaaggccatcgagccggactgcccgaggacaagggaccagaacccgtcgggatcaactcatctatcgatagattcggcatcttacacgaaactgagctgcccccagtcacggccagagaagctaaaaagatccgccgggagatgacccggacgtcaaagtggatggagatgctcggggagtgggaaacctacaaacactctagcaagctcatcgatagagtctacaaggggatcccaatgaacatcagaggccccgtctggagtgtattgctgaacatccaggaaataaagctgaaaaatcccggtcggtatcagattatgaaagaacggggaaaacgcagctctgagcatattcaccacattgacttggatgtccgtacaacattgagaaaccatgtcttctttagagaccggtacggagctaagcagagagaactattctacatactcctggcatattccgagtataatcccgaagtgggatattgccgcgatctttcccatattactgctttgtttcttttgtatctgccagaggaagacgcattctgggcgctcgtgcagttgctggcatccgaacgtcactctctcccaggatttcactctcctaacgggggcacagtgcagggcctgcaggatcagcaggagcacgtagtacctaaatctcaacctaagactatgtggcaccaggataaggaaggactctgcggccagtgcgcctcccttggatgccttctgcggaatcttatcgacggcattagcctgggcttgaccctcaggctttgggacgtgtacctggtggagggagaacaggttctgatgccgataaccagtattgcattgaaggtccaacagaaaagacttatgaagacctcccggtgcgggctttgggccaggctgcgcaaccagttttttgacacctgggcaatgaacgacgacacagtgctcaaacacctgagagcttcgaccaagaagctcacccgtaaacagggtgacctcccacctcctgcgaagagagagcagggctctctcgcccccaggcccgtgcctgccagtaggggtggaaagacactgtgcaaggggtacaggcaagcccccccgggccctcccgcacaattccagagacctatctgcagtgcaagcccaccgtgggcctcccgattttccacaccgtgcccaggtggtgcagttcgggaggatacataccctgtgggcacacagggggtgccttctctggccctcgcccagggcggccctcaaggtagctggcgctttctggagtggaaaagcatgcccagactgcccacagatcttgacatcggaggcccttggtttccacattacgacttcgaatggagttgctgggtacgtgccataagccaggaagaccaactcgccacatgttggcaggctgaacattgcggtgaagtgcacaacaaggacatgtcctggcctgaagaaatgagtttcaccgcgaactcctcaaagattgaccgtcagaaggtgccaaccgagaaaggagcaactggcctctccaatttaggaaacacatgctttatgaacagtagcattcaatgcgtgagtaacactcagcccctgactcaatatttcatctcagggcggcacttatatgagttgaaccgtacgaacccaatcggaatgaaaggacacatggctaagtgttatggagacctcgtccaagagctatggtcgggtactcagaaatccgtcgcaccccttaaactacgacgaacaatagcaaagtacgctcctaagtttgatgggtttcagcagcaagacagtcaggagctgttagcatttctcctggacgggctgcacgaagaccttaaccgcgttcacgagaagccatatgtagaactcaaagattccgatgggcgacccgactgggaggtggctgccgaggcatgggataatcacctccgacgaaaccggagcatcatcgtcgacctgtttcacggacagctccgcagccaggtcaaatgtaagacttgtggtcacatctcagttcgcttcgacccgttcaactttctgagcctgcctctgcctatggactcttacatggacctcgaaattaccgttataaaactggacggcactacacctgttcgctatggtctcagactgaacatggacgaaaagtacacagggctaaagaagcaattacgcgatctctgcggtctaaacagtgaacagatcctgctggcggaggtacacgattcaaatatcaagattagcccacttcaccacctgcagatggagtgttccccctag

SEQ ID NO: 317037 - DNA, 174 bp, Artificial Sequence
  derived and/or modified sequence
atggacatggtcgagaacgccgatagtctacaggcacaggagaggaaggacattctgatgaagtatgacaagggccatcgggctggactgcccgaagataaggggtcacctctggagagcaccgccgccctaatcgtgctagcattttgcatgcggcgatcctgtctcctgtag

SEQ ID NO: 317038 - DNA, 2361 bp, Artificial Sequence
  derived and/or modified sequence
atggacatggtggagaatgctgacagcctgcaggcccaggagaggaaggacatcctgatgaagtatgacaagggccaccgggccggcctgcctgaggacaagggccctgagcctgtgggcatcaacagcagcattgaccgcttcggcatcctgcacgagacagagctgccccctgtgacagcccgggaggccaagaagatccggcgggagatgaccaggaccagcaagtggatggagatgctgggggagtgggagacctacaagcacagcagcaagctgattgacagagtgtacaagggcatccccatgaacatccggggccctgtgtggagcgtgctgctgaacatccaggagatcaagctgaagaaccctggccgctaccagatcatgaaggagcggggcaagaggagcagcgagcacatccaccacatcgacctggatgtgaggaccaccctgagaaatcatgtgttcttccgggaccgctacggggccaagcagcgggagctgttctacatcctgctggcctacagcgagtacaaccctgaggtgggctactgccgggacctgagccacatcacagccctcttcctgctgtacctgcctgaagaagatgccttctgggccctggtgcagctgctggccagcgagcggcacagcctgcccggcttccacagccccaatggaggcaccgtgcagggcctgcaggaccagcaggagcacgtggtgcccaagagccagcccaagaccatgtggcaccaggacaaggagggcctgtgtggccagtgtgccagcctgggctgcctgctgaggaacctgattgatggcatcagcctgggcctgaccctgcggctgtgggatgtgtacctggtggagggggagcaggtgctgatgcccatcaccagcatcgccctgaaggtgcagcagaagaggctgatgaagaccagccgctgtggcctgtgggcccggctgaggaaccagttctttgacacctgggccatgaatgatgacacagtgctgaagcacctgcgggccagcaccaagaagctgaccaggaagcagggcgacctgcccccaccagccaagcgggagcagggcagcctggcccccaggcctgtgcctgccagcagaggaggcaagaccctgtgcaagggctaccggcaggcccctcctggccccccagcccagttccagaggcccatctgcagcgccagccccccctgggccagccgcttcagcaccccctgccctgggggcgctgtgcgggaggacacctaccctgtgggcacccagggcgtgcccagcctggccctggcccagggcggcccccagggctcctggaggttcctggagtggaagtccatgccccggctgcccacagacctggacattggaggcccctggttcccccactatgactttgagtggagctgctgggtgcgggccatcagccaggaggaccagctggccacctgctggcaggccgagcactgtggggaggtgcacaacaaggacatgtcctggccagaggagatgtccttcaccgccaacagcagcaagattgaccggcagaaggtgcccacagagaagggggccaccggcctgagcaacctgggcaacacctgcttcatgaacagcagcatccagtgtgtgagcaacacccagcccctgacccagtacttcatcagcggccgccacctgtatgagctgaacagaaccaaccccatcggcatgaagggccacatggccaagtgctatggagacctggtgcaggagctgtggagcggcacccagaagtctgtggcccccctgaagctgcggaggaccatcgccaagtatgcccccaagtttgatggcttccagcagcaggacagccaggagctgctggccttcctgctggatggcctgcacgaggacctgaacagagtgcatgagaagccctacgtggagctgaaggacagtgatggccgcccagactgggaggtggccgctgaggcctgggacaaccacctgcggaggaacagaagcatcatcgtggacctcttccacggccagctgcggagccaggtgaagtgcaagacctgtggccacatctctgtgcgctttgaccccttcaacttcctgagcctgcccctgcccatggacagctacatggacctggagatcaccgtcatcaagctggatggcaccacccctgtgcgctatggcctgcggctgaacatggatgagaagtacacaggcctgaagaagcagctgcgggacctgtgtggcctgaacagcgagcagatcctgctggccgaggtgcatgacagcaacatcaagatcagccccctgcaccacctgcagatggagtgcagcccctag

SEQ ID NO: 317039 - DNA, 174 bp, Artificial Sequence
  derived and/or modified sequence
atggacatggtggagaatgctgacagcctgcaggcccaggagaggaaggacatcctgatgaagtatgacaagggccaccgggccggcctgcctgaggacaagggcagccccctggagagcacagctgccctgattgtgctggccttctgcatgaggaggagctgcctgctgtag

SEQ ID NO: 317040 - DNA, 2361 bp, Artificial Sequence
  derived and/or modified sequence
atggacatggtggagaacgccgacagcctgcaggcccaggagcggaaggatatcctgatgaagtatgataaaggccaccgggccggtttacctgaggacaaaggaccagagcccgtggggataaacagttcgatcgataggttcggcattttgcatgagaccgaactccccccagtgacggcccgcgaggcaaagaaaatccgaagggaaatgactcgtacgagcaagtggatggaaatgttaggggagtgggaaacttacaaacatagttcgaagctcatcgacagggtgtacaagggaattcccatgaacatccgaggcccagtttggtccgtccttcttaatattcaggagatcaagctgaaaaatcccgggaggtaccagattatgaaggagcgcggcaaacgatctagcgaacacatccatcatattgacctggacgtgagaactacactgagaaaccacgtcttctttcgggaccgatacggggccaagcaacgggagctcttctatatactcctggcatacagcgaatacaacccagaagtgggttactgccgggacctgagccacatcaccgcgctgttcctactgtacctcccagaagaggatgccttttgggctctcgtgcagctcctagcctcagaaagacacagtctgccgggcttccactctcctaatggcgggactgttcaaggactgcaggaccaacaggagcatgtcgttccaaaatcacaacccaaaacgatgtggcaccaggacaaagaggggctgtgcggacagtgcgccagtctgggctgtttactgcggaaccttatcgacgggattagcctggggctaaccttgcgcctctgggatgtgtaccttgtggaaggcgaacaggttcttatgcctattacttcaatcgctctgaaggtgcaacagaagcgactgatgaagacatcccggtgtgggctttgggccagattgcgaaatcagttctttgacacgtgggcaatgaacgacgacaccgtactgaagcatctcagagctagtacgaagaagttgacacggaagcagggtgatctgccccccccagcaaaaagggaacagggtagtctcgcaccacgcccggtcccagcaagtcgagggggtaagacgctgtgcaaggggtatcgacaagctccccccggaccccccgcacagtttcaacgccctatctgctccgcctcccccccctgggccagccggttctccactccttgccccggtggagccgttagagaggacacttaccctgttggcacacaaggtgttccatcactcgcattagcccaaggaggaccacaggggtcatggcgtttcctggagtggaagtcaatgcctagacttcctaccgaccttgatatcggcgggccctggtttccccattacgacttcgagtggtcatgttgggtgcgggctatcagccaggaagaccagcttgcaacatgctggcaggccgagcactgtggggaggtccacaataaggatatgtcctggcctgaagagatgtctttcactgcaaattcaagcaagatcgatagacagaaggtcccgacggaaaagggcgcaacaggactgtcaaatctgggtaatacttgtttcatgaatagttctatccagtgcgtgtcaaacacccagccgctcacacagtactttatctctggcagacatctatatgaactcaacagaacgaatccaatcggtatgaaggggcacatggcgaaatgctatggggacctggtgcaggagctctggtccggcacacagaagagtgttgctcccctgaagcttcggagaacaatcgccaaatacgctccaaaatttgacggattccaacagcaggatagtcaagagctcctcgcctttctgctcgacggtctccacgaggacctgaatcgcgtacacgaaaagccatacgtggaactgaaggactctgatgggagaccagattgggaggtggcggcagaagcgtgggacaatcaccttaggcgtaaccggtcgatcatcgtcgacctcttccacggtcagttgaggtcccaagtaaagtgtaagacctgtggccacattagcgtcagattcgatcccttcaactttctgtccctgccactgccgatggacagctatatggacctggagattactgtgataaagctggacggtacaacgcccgtgagatatggccttcgtctgaacatggatgaaaagtacacagggctcaaaaaacaacttcgggacctctgtggcctgaacagcgagcagattctgctcgctgaggtgcatgattctaatatcaagatttctcctctgcaccacctccaaatggagtgctcaccatag

SEQ ID NO: 317041 - DNA, 174 bp, Artificial Sequence
  derived and/or modified sequence
atggacatggtggagaacgccgacagcctgcaggcccaggagcggaaggacatcctgatgaaatatgataagggccacagggccggactgccagaagacaaaggctcccctttagaatccactgcagcactgatcgttctggcgttttgtatgcgcaggtcctgcctcttgtag

SEQ ID NO: 317042 - DNA, 2361 bp, Artificial Sequence
  derived and/or modified sequence
atggatatggttgaaaatgctgactctctgcaggctcaggagcggaaagatatacttatgaaatatgacaaagggcaccgcgcaggactccctgaggacaaaggacctgagccggttggtattaactcctccattgaccgattcggcatattgcacgaaacagaactaccgccagtcaccgcacgcgaagccaagaagatacgcagggaaatgaccaggacatctaagtggatggaaatgttgggcgagtgggaaacatacaagcacagcagtaagttgatcgatcgtgtgtacaaggggatcccaatgaacattcgcggaccggtctggtctgtcttacttaacatccaggagatcaaactgaaaaaccccggaagataccaaatcatgaaagagcgcggtaaacgatcttccgaacacattcaccacatcgacctggacgtccggactacccttagaaatcacgtatttttccgggacagatacggtgccaagcagcgcgaactgttttacattctgttggcatactctgagtataaccccgaagtggggtactgcagggacctttctcacattactgctctgtttctactttatttgcctgaggaggacgccttctgggccttagtgcagctcctagccagcgagcgccattcccttccagggtttcactctccgaacggtggcactgtgcaggggttgcaagatcagcaggagcatgtcgtgccaaagagtcaaccaaaaacgatgtggcatcaggataaagaggggctgtgcggccagtgtgccagcctgggctgtcttctacggaaccttattgatggtatcagcctggggctgacactccggctgtgggatgtataccttgtcgagggtgaacaggtactgatgccgatcacgtccatcgccctgaaagtgcagcagaagaggctgatgaagacgtctcgatgtggcctttgggctcgtcttagaaaccaattttttgacacttgggccatgaatgatgacaccgtgttgaagcacctgcgggcttccaccaaaaaattaacccgcaaacagggagatctaccgccacctgcaaagagagagcagggctccctggcccctcgtcccgtacccgctagccggggaggtaagaccctgtgtaaaggataccgccaggctccacccggaccacccgctcagttccagcggcctatctgtagcgcgtcccccccatgggcatccagattctccacaccatgcccagggggtgccgttagagaggatacatatcctgtagggactcagggcgtgccttccctcgcacttgctcagggcggacctcagggcagttggcggttcttagagtggaaaagtatgccaaggttgcctacagatctggatatcggaggaccatggttcccccattatgatttcgagtggagttgctgggttcgggctatcagccaggaggaccagctcgccacatgctggcaggccgaacactgcggggaggtgcacaacaaagacatgtcttggcccgaagagatgtcctttactgcgaacagctctaagatcgaccggcaaaaggtaccaacagagaagggggctacaggactgagtaatctgggtaatacatgctttatgaattcctccatccagtgtgtctctaacactcaaccactgactcaatatttcatctcagggagacatctctatgagctgaaccggactaatcctatcggaatgaaagggcatatggctaagtgctacggtgatctggtgcaggaactatggagcggtacacagaagtctgtggccccactcaagctccgacgcactattgcgaaatatgcccctaaattcgacggcttccagcaacaagactcgcaggaactgttagctttcttgcttgatggcctccatgaagatctgaatcgcgtacacgaaaagccttatgtcgagctcaaggactctgacgggagacctgactgggaagtggccgctgaggcttgggataaccaccttaggcgcaataggtctattattgttgatctcttccatgggcagttaagaagtcaagtcaaatgcaaaacatgtggacatatctctgtgcggttcgatcctttcaattttctgagcttgcctctacccatggatagttatatggatctggagattacagttatcaagctggatgggacgacccccgtgcggtatggcttgcgcctaaatatggatgaaaagtacactggtctcaagaagcagctcagagacctgtgcggcctgaactctgagcaaatcctgctggctgaagttcatgactctaacataaagatcagtcctctgcatcacctacagatggagtgtagcccatag

SEQ ID NO: 317043 - DNA, 174 bp, Artificial Sequence
  derived and/or modified sequence
atggatatggtggaaaacgccgactctttgcaagctcaagagaggaaggacatcctgatgaaatatgacaaaggacatcgcgcaggcctgcccgaggacaaaggatccccactggagagcacagctgcgctgatcgtgctcgctttctgcatgaggcgaagttgtctgctgtag

SEQ ID NO: 317044 - DNA, 8351 bp, Artificial Sequence
  derived and/or modified sequence
gccgccgtctcgtgtggtgtctgaggggcgtctacctggagtcactgagccgacgaaagggaaaaggccagtgcctgtccgggaagagctcagcctagtggggcgggcgacaagttacagttgctgccttacgatggccgtggcccgtggaggcactagaccctcaccaggggtctgtcaggaaaggcgggcagatacgtgaggcctgaacaggaaggaactgggagacccaagactgtaccgccaagaccgctttcgagtcgggccgaccggaatttgaattcgtttcttcacttactagttgatttttttccttgattccttcgtgggactcaagacaggggtgccctgtttactcagcccactgtgctcaacctcttgcaggagtgtgcaggaaatgaaggccctttgaggtcaggtggatgaggatgtcagtgtgaagatggacactgtgcctggagtgaacctgagctggatcctgaatgagatgcatgaccaggacaagaaattggtggagaagagctacaaggatgccaagggctgtttcttcagcatgagagaggggctgaactgcgaggtggccaccaacacagaggccctgcagagcggcaggatagagatatggagctctacatctctgtgcagaacctgagccatcccagctcagcaaggtagggcctctgtcccctccccaccctgtacctatcaccccagggtgagcccagccttatagacccctgcttggaggtgtgttacgggacccaactggcccagctgcaggggctcatcagaagcatggagcagcagctgtgcgagctctgctgcgacgcggagcaccaggaccatgagcaccaggtccttctggacgtgaagacacggctggagcaggagatcgccacctacagccgcttgctagaggttgaggacgctcaagtcacagggagaagacgtccacccacacatcaggagacaggcctggaacagagccttcctgcacagcctcagaagggacccaccctggtgacaccttgatcttggactgacactcatgacctccagtactgtgagacagtaacattctgttgttgaaggtgcccagtctgtggtactgtaaaacagccctgggaaactaacgcagcctgttagcccacagatggtgaagggatggaatgctccacggagctccaggcttactatctacagcccccaaagtgtgctgcgggacccttgggtgggtgtaggtatgcaaggtaattttgggtggttcaaggtgaataatttcaattgacataataatgtatttatcttgctgggtaaatgagggatacccaactgttaggaaccaggcaacacagcaggaggtgagcagccagccagtgagcaaagcttcatctgtagaaacagccacttcccatccctcgcattaccgcatgagctctgcctcctgtcagatgagcggtgccgttagattctcacagaagcatgaaccctactgtgaactgcgcatgccagggatctagattgcgtgctccttatgagaacctaatgcctgatgatctgtgactgtctcatcactgccagatggaaccacgtagttgcaggaaaacaagttcagggctcccactgattctacattatggctggagtgcaatggcgcaatctcggctctctgcaacttccgcctcctgggttcaagcaattctcctgcctcagcctcccgagtagctgggactacaggcatgtgccaccatgcctggggctgtcattgggacagtctgagatggggagtcgggggagacaatggatgaatggatggatgaatggacagcagtccagggagatgtccctgtgtgtcctgaactgggcccttcctccagtgagaagccttcctgagctgacttggggacagtggctatggtatgggcggtgttggcctctgggcagctacagaggagggtcatccctgagcactcaccgggcgcccgttctacactgcccatgtagacgattttctctttcgtcttcatggtggcttcgtagagtgggtgctgttcccgaatgtacccattcgacaggaaactgggcatctctgtggccctgaacatcccaggaggccgatcgtacagagacctctggtgcctgaccgcagttcacatccacatccctggaatagaccatcacaggctcttcacccttggcaggtggacaccattcaacctgccggggcaggatggacatggtagagaatgcagatagtttgcaggcacaggagcggaaggacatacttatgaagtatgacaagggacaccgagctgggctgccagaggacaaggggcctgagcccgttggaatcaacagcagcattgatcgttttggcattttgcatgagacggagctgcctcctgtgactgcacgggaggcgaagaaaattcggcgggagatgacacgaacgagcaagtggatggaaatgctgggagaatgggagacatataagcacagtagcaaactcatagatcgagtgtacaagggaattcccatgaacatccggggcccggtgtggtcagtcctcctgaacattcaggaaatcaagttgaaaaaccccggaagataccagatcatgaaggagaggggcaagaggtcatctgaacacatccaccacatcgacctggacgtgaggacgactctccggaaccatgtcttctttagggatcgatatggagccaagcagagggaactattctacatcctcctggcctattcggagtataacccggaggtgggctactgcagggacctgagccacatcaccgccttgttcctcctttatctgcctgaggaggacgcattctgggcactggtgcagctgctggccagtgagaggcactccctgccaggattccacagcccaaatggtgggacagtccaggggctccaagaccaacaggagcatgtggtacccaagtcacaacccaagaccatgtggcatcaggacaaggaaggtctatgcgggcagtgtgcctcgttaggctgccttctccggaacctgattgacgggatctctctcgggctcaccctgcgcctgtgggacgtgtatttggtggaaggagaacaggtgttgatgccaataaccagcattgctcttaaggttcagcagaagcgcctcatgaagacatccaggtgtggcctgtgggcacgtctgcggaaccaattcttcgatacctgggccatgaacgatgacaccgtgctcaagcatcttagggcctctacgaagaaactaacaaggaagcaaggggacctgccacccccagccaaacgcgagcaagggtccttggcacccaggcctgtgccggcttcacgtggtgggaagaccctctgcaaggggtataggcaggcccctccaggcccaccagcccagttccagcggcccatttgctcagcttccccgccatgggcatctcgtttttccacgccctgtcctggtggggctgtccgggaagacacgtaccctgtgggcactcagggtgtgcccagcctggccctggctcagggaggacctcagggttcctggagattcctggagtggaagtcaatgccccggctcccaacggacctggatatagggggcccttggttcccccattatgattttgaatggagctgctgggtccgtgccatatcccaggaggaccagctggccacctgctggcaggctgaacactgcggagaggttcacaacaaagatatgagttggcctgaggagatgtcttttacagcaaatagtagtaaaatagatagacaaaaggttcccacagaaaagggagccacaggtctaagcaacctgggaaacacatgcttcatgaactcaagcatccagtgcgttagtaacacacagccactgacacagtattttatctcagggagacatctttatgaactcaacaggacaaatcccattggtatgaaggggcatatggctaaatgctatggtgatttagtgcaggaactctggagtggaactcagaagagtgttgccccattaaagcttcggcggaccatagcaaaatatgctcccaagtttgatgggtttcagcaacaagactcccaagaacttctggcttttctcttggatggtcttcatgaagatctcaaccgagtccatgaaaagccatatgtggaactgaaggacagtgatggccgaccagactgggaagtagctgcagaggcctgggacaaccatctaagaagaaatagatcaattattgtggatttgttccatgggcagctaagatctcaagtcaaatgcaagacatgtgggcatataagtgtccgatttgaccctttcaattttttgtctttgccactaccaatggacagttacatggacttagaaataacagtgattaagttagatggtactacccctgtacggtatggactaagactgaatatggatgaaaagtacacaggtttaaaaaaacagctgagggatctctgtggacttaattcagaacaaatcctactagcagaagtacatgattccaacataaagatttctcctcttcaccatctacaaatggaatgttcaccctaactaccaatggggacctacccaaaccaatattcatccccaatggaatgccaaacactgttgtgccatgtggaactgagaagaacttcacaaatggaatggttaatggtcacatgccatctcttcctgacagcccctttacaggttacatcattgcagtccaccgaaaaatgatgaggacagaactgtatttcctgtcacctcaggagaatcgccccagcctctttggaatgccattgattgttccatgcactgtgcatacccggaagaaagacctatatgatgcggtttggattcaagtatcctggttagcaagaccactcccacctcaggaagctagtattcatgcccaggatcgtgataactgtatgggctatcaatatccattcactctacgagttgtgcagaaagatgggaactcctgtgcttggtgcccacagtatagattttgcagaggctgtaaaattgattgtggggaagacagagctttcattggaaatgcctatattgctgtggattggcaccccacagcccttcaccttcgctatcaaacatcccaggaaagggttgtagataagcatgagagtgtggagcagagtcggcgagcgcaagccgagcccatcaacctggacagctgtctccgtgctttcaccagtgaggaagagctaggggaaagtgagatgtactactgttccaagtgtaagacccactgcttagcaacaaagaagctggatctctggaggcttccacccttcctgattattcaccttaagcgatttcaatttgtaaatgatcagtggataaaatcacagaaaattgtcagatttcttcgggaaagttttgatccgagtgcttttttggtaccacgagacccggccctctgccagcataaaccactcacaccccagggggatgagctctccaagcccaggattctggcaagagaggtgaagaaagtggatgcgcagagttcggctggaaaagaggacatgctcctaagcaaaagcccatcctcactcagcgctaacatcagcagcagcccaaaaggttctccttcttcatcaagaaaaagtggaaccagctgtccctccagcaaaaacagcagccctaatagcagcccacggactttggggaggagcaaagggaggctccggctgccccagattggcagcaaaaataagccgtcaagtagtaagaagaacttggatgccagcaaagagaatggggctgggcagatctgtgagctggctgacgccttgagccgagggcatatgcgggggggcagccaaccagagctggtcactcctcaggaccatgaggtagctttggccaatggattcctttatgagcatgaagcatgtggcaatggctgtggcgatggctacagcaatggtcagcttggaaaccacagtgaagaagacagcactgatgaccaaagagaagacactcatattaagcctatttataatctatatgcaatttcatgccattcaggaattctgagtgggggccattacatcacttatgccaaaaacccaaactgcaagtggtactgttataatgacagcagctgtgaggaacttcaccctgatgaaattgacaccgactctgcctacattcttttctatgagcagcaggggatagactacgcacaatttctgccaaagattgatggcaaaaagatggcagacacaagcagtacggatgaagactctgagtctgattacgaaaagtactctatgttacagtaaagctaccactctggctgctagacagcttggtggcgagggagatgactccttgtagctgatacttggcaaaagtgtcactgaaagacaagctaaatgtagttattttatcctgttagaacaaaaattctaattaaaatagttaacttgaagagtagaaacaattgtattttgaagtctcatacaagctgtctgatagagaactttcaggcagatcccaccattagcctgtaaacaaaaggtgtggcaccagccacctgggaccaaataagaattgaattgtgcttgtccagatatgaacaaatatgtagtgagtatagagtttaccaataatcataacaaatattaaagatttccttggagtcagaggaaaaaacaaacaattataatgttgtctagggacgacatgatacgctacctcctttttcctgaagttttattccattatattgacaagatggagaaagcaagatcatgaaggtgtgcaaatgattcttacggcatggacaaggatttttcaatttattttttaaactgtttccataccctttctttttcttgctttttgtttttgccattgtgtttacgtttgagacacaaccagtcattggtggcaggggcatagagtggtcagtctgaaagggaggctctcttaagagctatgtgccttccaaccagagggagacccagtagaaagaaaaacatcctgggaaatccagctaccagggccctcccagtggaggcatcttacatttaggctacttcaagtatcctcagaaatgtattctgcacccccggccccgcccatgctgagggaaggggagcagttgccaatatttgcaccatcttcacatgcacatgttgcaacaagagcttctgggaaggtaagcggcatcggagctagatcacgtttcacaattagtggttattcttttctgtgtttgttttgcactttaaaaaagagagaacacatgcaaatgaacttgcttgtgtgtatttgatggctctaagggctataaattacaaacaaaacacatcccagacattaggagttcataagtatatttaatgaaattggtggttttaggaagtcaactttagttttgctttgtttgcatgtccactggtttttttattttgatatttgtctttttttaaattttacagtagtcattgaaagttatgtttctttgcttacttcattttttccctctaattatttaagattggaacaaaagtataaatattatttatttgaggtagaatttttttcatgtagtttcttaatatatacttgaaggaaatgtttcaccttatttttggtctttgtttattcatttagaccctgcaagttgattctcattgccagattccattaccctttcttcctcataggtagtaattaccaatgtaactaagcatttgtgttctgatatctgaggccagtaactattaatatctagttctcagagcatttggaaaggttatcttaaatggctacctaaattgaaatccttttcagaaaaaatataattgcaagtaggtaggagtggcctaaattgtctaatgtaataaagtcagacaaaatgcacactttatagtttcaagattttcagtaaataaaatctgtccattcctacctggacatgtcccattaaaaagtggaagattttaaataatttctttacagatgttttatttaaacaggtagcacaatctactaatgttgtgtgatttgtgttatactggttgtaattaatttttttaattcatgaactagcggaaaatttattaaattaactattaactacattcaccttgtaaattactgtataaaacttgttgacaatgcactgactttagaaagatgttaatgtacataaatagagtgtaaataaaatagtgttgatgtactgaaatatgaactgtatcaaaagtattggtaattgtatatggggtgtacctgtttatctgttaactattatccaaacaaattaaatactgtggttgcctct

SEQ ID NO: 317045 - DNA, 576 bp, Artificial Sequence
  derived and/or modified sequence
gtctgtgttctacggcagttacacacacgcagtggtattcacaagcggttttgtggactcaaaggttttctccctgagaggcataacccaggccagctgattcatcagaatcaggaaactgggcatctctgtggccctgaacatcccaggaggccgatcgtacagagacctctggtgcctgaccgcagttcacatccacatccctggaatagaccatcacaggctcttcacccttggcaggtggacaccattcaacctgccggggcaggatggacatggtagagaatgcagatagtttgcaggcacaggagcggaaggacatacttatgaagtatgacaagggacaccgagctgggctgccagaggacaaggggcctgagcccgttggaatcaacagcagcattgatcgttttggcattttgcatgagacggagctgcctcctgtgactgcacgggaggcgaagaaaattcggcgggagatgacaccgtgctcaagcatcttagggcctctacgaagaaactaacaaggaagcaaggggacctgccacccccagccaaacgcgagcaagggtcctt

SEQ ID NO: 317046 - protein, 208 aa, Artificial Sequence
  derived and/or modified sequence
MWRSCLRLRDGGRRLLNRPAGGPSASMSPGPTIPSPARAYAPPTERKRFYQNVSITQGEGGFEINLDHRKLKTPQAKLFTVPSEALAIAVATEWDSQQDTIKYYTMHLTTLCNTSLDNPTQRNKDQLIRAAVKFLDTDTICYRVEEPETLVELQRNEWDPIIEWAEKRYGVEISSSTSIMGPSIPAKTREVLVSHLASYNTWALQGMD

SEQ ID NO: 317047 - protein, 205 aa, Artificial Sequence
  derived and/or modified sequence
MWRSCLRLRDGGRRLLNRPAGGPSASMSPGPTIPSPARAYAPPTERKRFYQNVSITQGEGGFEINLDHRKLKTPQAKLFTVPSEALAIAVATEWDSQQDTIKYYTMHLTTLCNTSLDNPTQRNKDQLIRAAVKFLDTDTICYRVEEPETLVELQRNEWDPIIEWAEKRYGVEISSSTSIMGPSIPAKTREVLVSHLASYNTWALQ

SEQ ID NO: 317048 - protein, 1029 aa, Artificial Sequence
  derived and/or modified sequence
MRSAAKPWNPAIRAGGHGPDRVRPLPAASSGMKSSKSSTSLAFESRLSRLKRASSEDTLNKPGSTAASGVVRLKKTATAGAISELTESRLRSGTGAFTTTKRTGIPAPREFSVTVSRERSVPRGPSNPRKSVSSPTSSNTPTPTKHLRTPSTKPKQENEGGEKAALESQVRELLAEAKAKDSEINRLRSELKKYKEKRTLNAEGTDALGPNVDGTSVSPGDTEPMIRALEEKNKNFQKELSDLEEENRVLKEKLIYLEHSPNSEGAASHTGDSSCPTSITQESSFGSPTGNQMSSDIDEYKKNIHGNALRTSGSSSSDVTKASLSPDASDFEHITAETPSRPLSSTSNPFKSSKCSTAGSSPNSVSELSLASLTEKIQKMEENHHSTAEELQATLQELSDQQQMVQELTAENEKLVDEKTILETSFHQHRERAEQLSQENEKLMNLLQERVKNEEPTTQEGKIIELEQKCTGILEQGRFEREKLLNIQQQLTCSLRKVEEENQGALEMIKRLKEENEKLNEFLELERHNNNMMAKTLEECRVTLEGLKMENGSLKSHLQGEKQKATEASAVEQTAESCEVQEMLKVARAEKDLLELSCNELRQELLKANGEIKHVSSLLAKVEKDYSYLKEICDHQAEQLSRTSLKLQEKASESDAEIKDMKETIFELEDQVEQHRAVKLHNNQLISELESSVIKLEEQKSDLERQLKTLTKQMKEETEEWRRFQADLQTAVVVANDIKCEAQQELRTVKRKLLEEEEKNARLQKELGDVQGHGRVVTSRAAPPPVDEEPESSEVDAAGRWPGVCVSRTSPTPPESATTVKSLIKSFDLGRPGGAGQNISVHKTPRSPLSGIPVRTAPAAAVSPMQRHSTYSSVRPASRGVTQRLDLPDLPLSDILKGRTETLKPDPHLRKSPSLESLSRPPSLGFGDTRLLSASTRAWKPQSKLSVERKDPLAALAREYGGSKRNALLKWCQKKTQGYAKRNLLLAFEAAESVGIKPSLELSEMLYTDRPDWQSVMQYVAQIYKYFET

SEQ ID NO: 317049 - DNA, 3090 bp, Artificial Sequence
  derived and/or modified sequence
atgagaagcgccgccaagccctggaaccccgccatcagagccggcggccacggccccgacagagtgagacccctgcccgccgccagcagcggcatgaagagcagcaagagcagcaccagcctggccttcgagagcagactgagcagactgaagagagccagcagcgaggacaccctgaacaagcccggcagcaccgccgccagcggcgtggtgagactgaagaagaccgccaccgccggcgccatcagcgagctgaccgagagcagactgagaagcggcaccggcgccttcaccaccaccaagagaaccggcatccccgcccccagagagttcagcgtgaccgtgagcagagagagaagcgtgcccagaggccccagcaaccccagaaagagcgtgagcagccccaccagcagcaacacccccacccccaccaagcacctgagaacccccagcaccaagcccaagcaggagaacgagggcggcgagaaggccgccctggagagccaggtgagagagctgctggccgaggccaaggccaaggacagcgagatcaacagactgagaagcgagctgaagaagtacaaggagaagagaaccctgaacgccgagggcaccgacgccctgggccccaacgtggacggcaccagcgtgagccccggcgacaccgagcccatgatcagagccctggaggagaagaacaagaacttccagaaggagctgagcgacctggaggaggagaacagagtgctgaaggagaagctgatctacctggagcacagccccaacagcgagggcgccgccagccacaccggcgacagcagctgccccaccagcatcacccaggagagcagcttcggcagccccaccggcaaccagatgagcagcgacatcgacgagtacaagaagaacatccacggcaacgccctgagaaccagcggcagcagcagcagcgacgtgaccaaggccagcctgagccccgacgccagcgacttcgagcacatcaccgccgagacccccagcagacccctgagcagcaccagcaaccccttcaagagcagcaagtgcagcaccgccggcagcagccccaacagcgtgagcgagctgagcctggccagcctgaccgagaagatccagaagatggaggagaaccaccacagcaccgccgaggagctgcaggccaccctgcaggagctgagcgaccagcagcagatggtgcaggagctgaccgccgagaacgagaagctggtggacgagaagaccatcctggagaccagcttccaccagcacagagagagagccgagcagctgagccaggagaacgagaagctgatgaacctgctgcaggagagagtgaagaacgaggagcccaccacccaggagggcaagatcatcgagctggagcagaagtgcaccggcatcctggagcagggcagattcgagagagagaagctgctgaacatccagcagcagctgacctgcagcctgagaaaggtggaggaggagaaccagggcgccctggagatgatcaagagactgaaggaggagaacgagaagctgaacgagttcctggagctggagagacacaacaacaacatgatggccaagaccctggaggagtgcagagtgaccctggagggcctgaagatggagaacggcagcctgaagagccacctgcagggcgagaagcagaaggccaccgaggccagcgccgtggagcagaccgccgagagctgcgaggtgcaggagatgctgaaggtggccagagccgagaaggacctgctggagctgagctgcaacgagctgagacaggagctgctgaaggccaacggcgagatcaagcacgtgagcagcctgctggccaaggtggagaaggactacagctacctgaaggagatctgcgaccaccaggccgagcagctgagcagaaccagcctgaagctgcaggagaaggccagcgagagcgacgccgagatcaaggacatgaaggagaccatcttcgagctggaggaccaggtggagcagcacagagccgtgaagctgcacaacaaccagctgatcagcgagctggagagcagcgtgatcaagctggaggagcagaagagcgacctggagagacagctgaagaccctgaccaagcagatgaaggaggagaccgaggagtggagaagattccaggccgacctgcagaccgccgtggtggtggccaacgacatcaagtgcgaggcccagcaggagctgagaaccgtgaagagaaagctgctggaggaggaggagaagaacgccagactgcagaaggagctgggcgacgtgcagggccacggcagagtggtgaccagcagagccgcccccccccccgtggacgaggagcccgagagcagcgaggtggacgccgccggcagatggcccggcgtgtgcgtgagcagaaccagccccaccccccccgagagcgccaccaccgtgaagagcctgatcaagagcttcgacctgggcagacccggcggcgccggccagaacatcagcgtgcacaagacccccagaagccccctgagcggcatccccgtgagaaccgcccccgccgccgccgtgagccccatgcagagacacagcacctacagcagcgtgagacccgccagcagaggcgtgacccagagactggacctgcccgacctgcccctgagcgacatcctgaagggcagaaccgagaccctgaagcccgacccccacctgagaaagagccccagcctggagagcctgagcagaccccccagcctgggcttcggcgacaccagactgctgagcgccagcaccagagcctggaagccccagagcaagctgagcgtggagagaaaggaccccctggccgccctggccagagagtacggcggcagcaagagaaacgccctgctgaagtggtgccagaagaagacccagggctacgccaagagaaacctgctgctggccttcgaggccgccgagagcgtgggcatcaagcccagcctggagctgagcgagatgctgtacaccgacagacccgactggcagagcgtgatgcagtacgtggcccagatctacaagtacttcgagacctag

SEQ ID NO: 317050 - DNA, 3090 bp, Artificial Sequence
  derived and/or modified sequence
atgagatctgccgcgaaaccctggaaccctgcaatccgggccggcgggcacgggccagacagggtccgccccctacctgcggcctcctctggaatgaaaagcagtaaatcctccaccagcttagcgtttgaatccagactgtcccgactgaaaagggcctcttcagaagacacactgaataaacctggcagtaccgcagcctccggcgttgtaagactgaagaaaaccgccactgcgggcgccatatccgaattgactgaatcgagactgcgatctggcacgggagcttttaccactaccaagcgcaccggaattcctgcccccagagagttctcagtgaccgttagcagagagcgcagcgtgccccgtggcccttccaaccccagaaaaagcgtgtccagccccacctccagcaatacccccaccccgactaagcacctgcggaccccttcaaccaagcctaaacaggagaatgagggcggtgagaaggccgcactggaatctcaggtcagagagctgctggcagaagcgaaggccaaagactctgagataaacaggctgcgctcggagttgaagaagtataaggaaaagagaacgctgaacgctgaggggacagacgcactcggccctaatgtggacggaacaagcgtcagccccggggataccgagcctatgatccgcgctctggaggagaagaacaaaaacttccagaaggagctcagcgatctggaggaagagaatagagtgttgaaagagaagctgatatacctggagcattcccctaatagcgagggggctgcgagccacaccggggattcaagctgcccgacatcaattacgcaagagagctctttcggctctccaactgggaaccagatgtcaagtgacattgacgagtataagaagaatatccacggcaacgccctcagaacgagcggcagttcctcgagcgacgtgaccaaggcctctctaagtcctgacgcaagcgatttcgagcatatcacggctgagaccccctcccgcccattgtcaagcaccagtaatcctttcaagagcagtaaatgctcaaccgctggctcatcacctaacagtgtatcagagctctccctggccagtctcaccgaaaaaattcagaaaatggaagagaatcaccattcgaccgcagaagagctacaagcgaccctgcaggagctctcagaccaacagcagatggtccaagagcttacggcggaaaatgagaaattggttgatgagaaaaccattcttgaaacaagttttcatcagcacagggagagagcagaacaactgtctcaggagaatgagaagctgatgaacctgctgcaagagagggtgaagaacgaggaacccacaacccaggagggcaaaatcattgaacttgagcagaagtgtacaggaattcttgagcagggacgcttcgagcgcgagaaactccttaacatccagcagcaattaacttgcagcctcagaaaagtggaagaagaaaatcagggcgccttagagatgatcaagcgcctcaaagaggaaaacgagaaacttaacgaattcttggagcttgagcgtcacaataacaatatgatggcaaaaacactggaggagtgtcgcgtcacactggagggattgaagatggagaatggatcgctaaagtctcatctgcagggcgaaaaacagaaagccaccgaggccagtgcagtcgaacaaaccgcagagtcttgcgaagtgcaagaaatgctaaaggtggccagagcggaaaaagatcttttggagctgtcatgcaatgagctccgccaggagctccttaaggctaatggagaaatcaagcatgttagcagtctcctggccaaagttgagaaggactactcctatctgaaggagatttgcgaccaccaggcagagcagctgtcccgaaccagccttaagcttcaggagaaggcatctgagtccgacgccgaaatcaaggatatgaaggagaccatctttgagttagaggaccaagtcgaacagcacagggcagtgaagctgcataataaccagctgattagtgaactggagtcttccgtaataaagcttgaagaacagaagtcagacctcgaaaggcagttaaaaactctgactaaacagatgaaagaggaaaccgaggaatggcgacggttccaggccgacttgcagactgctgtagtcgttgccaacgacatcaaatgtgaggcccagcaggagctgcggactgtgaagagaaagctgttggaggaggaggaaaagaacgcccgcctgcagaaggagctcggggacgttcagggacatggccgggtggtgacctcaagggcggccccaccccccgtcgacgaggagcctgaatcatctgaggtggacgccgccggcagatggccaggcgtctgcgtgtctcgcacatctcctactccccccgaatccgccacgaccgtgaagtcccttattaagagctttgacctcggacggcccggcggagccggacagaatatctccgtccataaaacaccaagatcacccctgtcaggcatacctgtgcggaccgcaccagccgctgcggtgtcacctatgcagagacactccacttattcatctgtgcggcccgcctctcggggtgtgacccagaggctggatctgcccgacttgccactctctgatatccttaagggcaggaccgagactttaaagcctgatcctcatctgcgaaaatcaccgagcctggagtcgctgtccaggccgccctcgttgggctttggcgatacaagactgctgagcgctagcacccgggcctggaaacctcagagcaaactcagcgtggagcggaaggaccccctggctgcacttgctcgagagtacgggggctctaagaggaacgccctcttaaagtggtgtcagaagaagacacaggggtatgctaaaagaaaccttctgcttgcattcgaggcggcagagagtgtaggcatcaagccatcactggaattgtccgagatgctgtacactgacagaccagactggcaatctgtaatgcagtacgttgcacagatctacaaatactttgagacctag

SEQ ID NO: 317051 - DNA, 3090 bp, Artificial Sequence
  derived and/or modified sequence
atgaggtctgctgccaagccctggaacccagccatccgggccggcggccacggccctgacagagtgcggcccctgcctgctgccagcagcggcatgaagagcagcaagagcagcaccagcctggcctttgagagccggctgagccggctgaagagggccagcagcgaggacaccctgaacaagccaggcagcacagctgccagcggcgtggtgcggctgaagaagacagccacagctggggccatcagcgagctgacagagagccggctgcggagcggcaccggggccttcaccaccaccaagaggacaggcatcccagccccccgggagttctctgtgacagtgtcccgggagaggtctgtgccccggggccccagcaaccccaggaagtctgtgagcagccccaccagcagcaacacccccacccccaccaagcacctgcggacccccagcaccaagcccaagcaggagaatgaaggaggagagaaggccgccctggagagccaggtgcgggagctgctggccgaggccaaggccaaggacagcgagatcaaccggctgcggtctgagctgaagaagtacaaggagaagaggaccctgaatgctgagggcacagatgccctgggccccaacgtggatggcacctctgtgtcccctggggacacagagcccatgatccgggccctggaggagaagaacaagaacttccagaaggagctgagtgacctggaggaggagaacagagtgctgaaggagaagctgatctacctggagcacagccccaacagcgagggcgccgccagccacactggagacagcagctgccccaccagcatcacccaggagagcagctttggcagccccactggaaaccagatgagcagtgacattgatgagtacaagaagaacatccatggaaatgccctgcggaccagcggcagcagcagcagtgatgtgaccaaggccagcctgagcccagatgccagtgactttgagcacatcacagctgagacccccagccggcccctgagcagcaccagcaaccccttcaagagcagcaagtgcagcacagctggcagcagccccaacagcgtgtctgagctgagcctggccagcctgacagagaagatccagaagatggaggagaaccaccacagcacagctgaggagctgcaggccaccctgcaggagctgagtgaccagcagcagatggtgcaggagctgacagcagaaaatgagaagctggtggatgagaagaccatcctggagaccagcttccaccagcaccgggagagagctgagcagctgagccaggagaatgagaagctgatgaacctgctgcaggagcgggtgaagaatgaggagcccaccacccaggagggcaagatcatcgagctggagcagaagtgcaccggcatcctggagcagggccgctttgagcgggagaagctgctgaacatccagcagcagctgacctgcagcctgaggaaggtggaggaggagaaccagggcgccctggagatgatcaagaggctgaaggaggagaatgagaagctgaatgagttcctggagctggagcggcacaacaacaacatgatggccaagaccctggaggagtgccgggtgaccctggagggcctgaagatggagaatggcagcctgaagagccacctgcagggcgagaagcagaaggccacagaggccagcgctgtggagcagacagctgagagctgtgaggtgcaggagatgctgaaggtggcccgggcagagaaggacctgctggagctgagctgcaatgagctgcggcaggagctgctgaaggccaatggagagatcaagcacgtgagcagcctgctggccaaggtggagaaggactacagctacctgaaggagatctgtgaccaccaggccgagcagctgagcaggaccagcctgaagctgcaggagaaggccagcgagagtgatgctgagatcaaggacatgaaggagaccatctttgagctggaggaccaggtggagcagcacagagctgtgaagctgcacaacaaccagctgatcagcgagctggagagcagcgtcatcaagctggaggagcagaagagtgacctggagcggcagctgaagaccctgaccaagcagatgaaggaggagacagaggagtggaggcgcttccaggccgacctgcagacagctgtggtggtggccaatgacatcaagtgtgaggcccagcaggagctgaggacagtgaagaggaagctgctggaggaggaggagaagaatgcccggctgcagaaggagctgggagatgtgcagggccacggccgggtggtgaccagcagagctgcccctcctcctgtggatgaggagcctgagagcagcgaggtggatgctgctggccgctggccaggagtgtgtgtgtccaggaccagccccaccccacctgagagcgccaccaccgtgaagagcctcatcaagagctttgacctgggccggcctgggggcgccggccagaacatctctgtgcacaagacccccaggagccccctgagcggcatccctgtgaggacagccccagctgctgctgtgagccccatgcagaggcacagcacctacagctctgtgcggcctgccagccggggcgtgacccagaggctggacctgcctgacctgcccctgagtgacatcctgaagggccgcacagagaccctgaagccagacccccacctgaggaagagccccagcctggagagcctgagcaggcctcccagcctgggctttggagacacccggctgctgagcgccagcacccgggcctggaagccccagagcaagctgtctgtggagaggaaggaccccctggccgccctggcccgggagtatggaggcagcaagagaaatgccctgctgaagtggtgccagaagaagacccagggctacgccaagaggaacctgctgctggcctttgaggccgctgagagcgtgggcatcaagcccagcctggagctgtctgagatgctgtacacagacagaccagactggcagagcgtgatgcagtatgtggcccagatctacaagtactttgagacctag

SEQ ID NO: 317052 - DNA, 3090 bp, Artificial Sequence
  derived and/or modified sequence
atgcggagcgccgccaagccctggaaccccgccatccgggccggcgggcacggcccagatcgcgtgcgaccccttcccgccgcttctagcggaatgaaatcttctaaatcctctacgtcactggcttttgagagcagactaagcaggctgaaacgcgcatcgtctgaggatactttgaataagcctggcagtacagctgcgagcggagtagttagactaaaaaagacggccaccgcaggagctatcagtgagttaaccgagtctagactgaggtctggaacaggcgcatttactactacaaagcggaccgggatccctgccccaagagaattttcggtcaccgtgagccgagagcgctccgtgccccgcggcccctctaaccccagaaaaagtgtgagctcccctactagttctaacacaccgaccccaacaaagcatctccggactccgtcaacaaaaccgaagcaagagaatgaaggcggtgaaaaggcagccctggagtctcaagttcgagagctgctcgcagaagccaaggcaaaggattccgaaattaatcggctgcgttccgaactgaaaaaatataaggaaaaaagaacgctgaacgcggaaggcacagatgccctcggtccaaatgttgacggcacgagtgttagccccggagacaccgagcccatgataagagcacttgaggaaaagaataaaaattttcagaaggagctctccgacctggaggaagagaaccgcgtacttaaagaaaaactgatctatctggagcacagtcctaattctgagggcgctgcctctcataccggggacagcagctgccccacgagtattacacaggaatcatctttcggaagccccacagggaatcagatgagttccgatatagacgaatacaaaaaaaatatacacgggaacgccctgaggacatcaggctcctcgtcttcagatgtgaccaaggcatccctgtccccagacgcgagcgacttcgaacacatcacagcagagactccaagccggcccctcagcagcacctcgaatccctttaaatcatcaaagtgctcaacagcaggttcctcccccaactcagtaagcgaactctccctggcctctctcactgagaagatacagaaaatggaagagaaccaccacagcactgcagaggagctgcaagcaaccttgcaggagttgtctgatcaacagcaaatggttcaggagctgaccgccgagaacgagaagctggttgacgaaaaaacaattctggagactagcttccaccagcacagagagagggcggaacagctgtcccaagaaaacgagaagttgatgaacttgcttcaggaacgggtgaagaacgaggagcctactacacaagagggaaaaatcatcgagctggagcagaagtgcaccggtatcctcgagcaaggcaggttcgaaagagagaaacttctcaatatacagcaacagctaacctgttcccttcgaaaagtcgaagaggagaaccagggcgccctggagatgatcaagcgtctgaaggaagagaatgagaagctgaacgaattccttgaactggaaaggcataacaataacatgatggctaagaccctcgaagagtgtagggttacactggaagggttaaagatggagaatggatccttgaaaagccatttacaaggtgagaagcaaaaagcaacagaagcctccgcggtcgaacagaccgccgaaagttgcgaggtccaagagatgttgaaagtggccagggctgagaaggatctgcttgagctgtcttgcaacgaactgcgccaggagcttctaaaggctaacggagaaatcaaacacgtaagtagccttctcgctaaggtcgagaaagactactcatatttgaaagagatctgcgaccatcaagccgaacagttgagtaggacatctctgaagcttcaggagaaggcctcagaaagcgatgctgagattaaagacatgaaggaaactatctttgagcttgaagaccaggtcgagcagcatagagccgtaaaacttcataacaatcagctcatatctgagctggagtcctccgtcatcaaactggaggagcagaaatccgatctggagagacagcttaagacgctgacgaagcagatgaaagaggaaacagaagagtggcgccgtttccaagctgaccttcagactgccgtcgttgtcgcgaacgatattaagtgcgaggcacagcaagagctcagaacagtgaaacggaagctccttgaggaggaagagaaaaacgctcgcctacagaaagagctgggagacgttcagggtcatggcagggtggtgacaagccgggccgcacctcccccggtggacgaagagcctgaaagtagtgaagtggacgccgctggacgctggcccggtgtttgtgtaagtagaaccagcccaacaccccccgagagtgccacaactgtgaaatctttgattaaatccttcgacctgggcagacccggtggtgcgggacagaatatctctgttcataaaactccgcgttcacctctctctggaattcctgtgagaacggccccagccgcagctgtgagtccaatgcagcggcattctacatactcctccgtacgcccggcgagtcggggggtgacgcagaggctggacctgccagacttaccgctttcagacattctaaaaggaaggaccgaaacactcaagcctgacccacatttgcgtaagtcgccaagcttagaaagcttgagtcgccccccatcactaggcttcggcgatacacggcttctgagcgcaagtacaagggcttggaaaccccagtcaaaactctccgtcgagcgaaaagatccactagccgctctggcaagggagtacggggggagcaagcgaaacgctcttctaaaatggtgccagaagaagactcaggggtacgccaagcgtaacttactgcttgcgtttgaggccgcggaatccgtcggcataaaacccagcttggagttgtctgaaatgctgtacaccgaccggcctgactggcagagcgtgatgcaatatgtggctcagatttataagtatttcgaaacttag

SEQ ID NO: 317053 - DNA, 3090 bp, Artificial Sequence
  derived and/or modified sequence
atgagaagtgccgctaaaccctggaacccagcaatacgggcagggggacacggccctgatagggtgcggccactaccagccgcatcatctggtatgaaaagttccaagagtagtacatccttggcctttgaatccaggctctctcgcctcaaaagggctagttcggaagatacactcaacaaaccaggtagcaccgctgcctccggtgttgtcaggctcaaaaaaacagctacggccggagcgatttccgagcttacagagtcccggctgcgatctgggacgggggctttcaccacaacaaaaaggactggtataccagcccctcgcgaattttctgttactgtaagccgagaacgcagcgtacctagggggccatcgaaccctcggaaatccgtcagctctccaacctcctctaatacacccacacccaccaagcacctgagaacaccaagtaccaagcctaagcaggaaaacgagggcggagaaaaagccgcactggaatctcaggtgagagagttgttagctgaagccaaggccaaagatagtgaaatcaataggcttcgtagcgagttaaaaaagtacaaggaaaagcgcaccctgaatgctgaagggaccgacgccctggggcctaatgttgatggaaccagcgttagcccaggagatactgaacccatgatcagggccctcgaggaaaagaacaagaattttcagaaggagttgtcggacctcgaggaggagaatcgggtgctcaaggaaaagctcatttacctcgagcacagcccaaatagcgagggagccgcatcccataccggggactcctcttgcccgacaagcattacccaagagagcagcttcggctctcctacaggtaaccagatgagctccgatattgacgaatacaagaagaatattcatggcaatgctctgagaactagtggctccagctcgtccgatgtaactaaagcttcactgagcccggacgcctcagacttcgagcatatcactgctgaaacgccatctaggcctctgagctcaacgtcaaaccccttcaaatcaagcaagtgttccactgccggatcctctcccaatagcgtgagcgaactctcgttggcgtccctgacagagaagattcaaaagatggaggaaaaccatcacagcacagcagaagaattgcaggcaacacttcaggaattaagcgaccaacaacagatggtgcaggagctcactgcggagaacgagaagctggtcgacgagaagactattctggaaacttctttccaccagcaccgagagcgggcagagcagctgagccaggaaaatgagaaactcatgaacttactgcaggaaagggtgaagaatgaggaacccaccactcaagagggcaaaattatagaactggagcagaaatgcaccggtatactggagcagggccgtttcgagcgggagaaactgctcaacattcagcagcaactcacttgctctctcagaaaggtcgaagaggaaaatcagggagctctcgagatgatcaaaaggctaaaggaggaaaacgaaaagctgaatgaatttctcgagcttgagcggcacaataataatatgatggcgaagactctggaggagtgtagagtcacattagaggggttgaaaatggaaaacggctctctcaagtctcacctccaaggcgagaaacagaaggctacggaggccagcgccgtggagcagaccgcagagtcgtgtgaggtccaagaaatgctgaaagtggctcgggctgaaaaggacttgctcgaactgtcctgtaacgagcttaggcaagagcttctcaaagctaatggagagataaaacacgtatcaagcctgcttgcaaaggtggagaaggattatagctatcttaaggaaatctgcgatcatcaggccgaacagctttcccgtacctctctgaagttgcaggagaaggcctcggagagcgacgcggaaatcaaagacatgaaagaaacaatctttgaactagaggatcaggtcgagcagcatagggctgtgaagctccataataatcaattgatatctgaattggaatcttctgtcattaagttggaggagcagaaatcagacttagaaaggcaactgaagacgctgacaaagcagatgaaggaggaaaccgaagagtggcggcgatttcaagccgatttgcagactgcagtggtggtcgcgaacgacattaaatgcgaagcccagcaagagttacgaactgtgaaacgaaagctgctggaagaagaagagaagaatgccagacttcagaaggaactcggcgacgtacaagggcatggaagagtcgtcactagccgagccgctcctcctcctgtcgacgaggaacctgagtcaagtgaggtggatgccgcaggaagatggcctggtgtgtgtgtgtcccggacctcaccgactccccctgagtccgctaccactgtgaaatcgttgatcaaaagttttgaccttgggcgacccggaggggctggacagaatatttcagtgcacaagacccctcgatctccgctgtccggtattcctgtgcggaccgcacccgctgctgctgtgtcccccatgcagagacattccacctattcttccgtgcggccagcctccaggggtgtaactcaaagactggacttgcccgatctgcctctgtctgacattctcaaggggagaacagaaacccttaaacctgatccacaccttcgcaagagtccatcattagagagccttagccggccaccatctctgggtttcggggatacaaggcttctgagcgcctcgaccagggcctggaagccacagagcaagctctcagttgaacggaaggaccctcttgctgccttagcccgagaatatggtggtagtaagagaaacgccttgctcaagtggtgccagaagaagactcagggatacgctaagaggaaccttcttttggcattcgaggctgcggagtctgtcgggatcaagccatcccttgagctgtccgaaatgctatacacagatcggccagactggcaaagtgtgatgcagtacgtggcccagatatacaagtattttgaaacatag

SEQ ID NO: 317054 - DNA, 8196 bp, Artificial Sequence
  derived and/or modified sequence
gcgctcgccccctggcggcgatggctggaggcgccggcggagcgcgggtccctctcctgagcatcagtgagcgcccggagccgtggccgctgggggttgcggcggcgctgagccagcggggccggacagacccacgaagtcaagcatgcggagtgcagccaagccctggaacccagccatcagagcagggggccacggcccagaccgggtgcggcctctgcctgcagcctcttccggcatgaagagttctaagtcttcaacttccttggcttttgagtcccgactcagcaggctcaagagggccagcagtgaggacacgctcaacaagccaggaagtaccgctgcatcgggggtggttcgcctgaagaagaccgccactgccggagccatctcggagctcacggagagccgcctgaggagcggcacaggggcctttacaacaactaaacggacaggcattccagccccacgggaattttcagtaactgtctcaagagagaggtctgtgccacgtggtccctccaaccccaggaaatcagtgtccagtccaacttcttccaacactcccactcctacgaaacacctgaggaccccttccacaaagcccaagcaagagaatgaaggtggagaaaaggctgcgcttgagtcccaagttcgggaacttttggcagaagccaaagcaaaagatagtgaaattaacaggcttcgaagtgaactaaagaaatacaaagagaaaaggactctgaacgctgaggggactgatgctttgggcccaaatgtcgatggaacatcagtctccccaggtgacacggaacctatgataagagctcttgaggagaagaacaagaactttcagaaagagctttccgatctagaggaagaaaaccgggtcctgaaggagaaactgatctatcttgagcactccccaaattcagaaggggcagcaagtcacactggcgacagcagctgcccaacatccataactcaagagtcaagcttcggaagcccaactggaaatcagatgtccagtgacattgatgagtataaaaaaaacatacatggaaatgcattacggacatcaggctcctcaagtagcgatgttaccaaagcttctttgtcgccagatgcttccgactttgagcacattacagcagagacaccctcaaggcccctgtcctccaccagtaacccctttaagagttcaaagtgttctactgctgggagttccccaaacagcgtaagtgaattgtccctggcttccctcacagagaagatacaaaagatggaagaaaaccaccatagcactgcagaagaactacaggctactctacaagaattatcagaccagcaacaaatggtacaggaattgacagctgaaaatgagaagctggtggatgaaaagacgattttagagacatcctttcatcagcatcgagagagggcagagcagctaagtcaagaaaatgagaagctgatgaatcttttacaagagcgagtaaagaatgaagagcccaccactcaggaaggaaaaattattgaactggagcagaagtgcacaggtattcttgaacagggccgctttgaaagagagaagctactcaacattcagcagcagttgacctgtagcttgcggaaggttgaggaagaaaaccaaggagctttagaaatgattaaacgtctgaaggaagaaaatgaaaaactgaatgagtttctagaactggaacggcataataataacatgatggccaaaactttggaagagtgtagagttaccttggaagggctaaaaatggagaatggatctttgaagtctcatttgcagggtgagaagcagaaagccacagaggccagtgctgtggagcagacggcagagagctgcgaagttcaagaaatgttgaaagtagcccgagcagagaaagatctactggaactgtcttgcaatgagctcagacaagaattactaaaggcaaacggtgaaattaaacatgtttccagtctgctggccaaggtggaaaaggattattcatacctgaaggagatatgtgatcaccaagccgaacagctgagcagaaccagcctaaagctgcaagaaaaagcatcagagagtgatgcagagatcaaagacatgaaagaaaccatatttgaattggaagatcaggtggaacagcaccgggctgtcaagttacacaataatcaactcatcagtgagctagaaagtagtgtgatcaagctggaggaacagaagtcagacctggagaggcagctgaagactctgaccaagcagatgaaggaggagaccgaggaatggaggcggttccaggcggatctgcagaccgcagtggtggtggccaatgacatcaagtgtgaggcccagcaggagctgcgcaccgtgaagaggaaactgctggaggaggaggagaagaatgcccggttgcagaaggagctgggggatgtgcagggccacggcagggtggtcaccagcagagccgcccctccacctgtggatgaagagccagagtcctctgaggtcgatgctgctggtcggtggcctggtgtctgtgttagcagaacatctccaacacccccagagtcggcaaccaccgttaagtcacttatcaagtcatttgacttgggacgcccaggtggagctggacagaatatttctgtccataagacccccagaagtcccctaagtgggataccagtgaggactgctccagcagctgctgtctctccaatgcagaggcattcgacttacagcagtgtgcggccagccagcagaggggtgactcaacgcttggaccttcctgaccttcccctctcagatattctaaagggaaggactgagaccctgaagccagacccccacctccgcaagagtccctcactagagtcactgagcagacccccgtctctgggctttggggacacaagactgctgagtgcttccacccgggcatggaaaccacaaagcaaactcagtgtggaaagaaaagaccctctggcagccttggcccgggaatacggtggttccaagcgcaatgctctactgaaatggtgccagaagaagacacaaggttatgcgaagaggaatctcttgttggcatttgaagcggctgaaagtgtaggcatcaaacccagcctggaactcagcgagatgctgtacacagaccggcccgactggcagagtgtgatgcagtacgtggcccaaatctacaagtactttgagacgtaaccctggagggcctggggcagccaccattgccacctactgcagcttttcctggaagcgcctgattactgtccactgaccctgctctgcccaccacccagctgcctagacttcaaagacaggctcaatccaagtggaccaacacccaaataagaaacagagtgggtcccacgatgtacctgtctgaaatgcaaatgcagctggactgtaaattggggactctttgatctcttgtgggatgcttctaaagagggcagcctccctccttccagaccaagaccccacacccaggcttgttttgctgattatattgggtggctgaacgaacacattatctgcagaaattcagacaaagaacatctccaaatcagtcttttggttgctgttgttaaaaatatcccggctttgcctttatgaaacctttgcccttggctgggtgtggtagctcgtggctgtaatcccagcactttaggaagccaaggcagtaggatcgtttgagcccaggagttcgaggctgcagtgagctatgagcataccactgcactccagcctgtgtgaaagagccagaccctgtctcaaaaaaatgataaaacccaaaactttgcccttgtgaaccctcccttcccccctccccccccaaaaaaaaacaacaaaacacaaaaaataaacatttgttccagggcaacctggaaacgtgcgtgcgcactcagccttttggggaaaaatgggagttctaggtaacaatgttaacacctggaacttgattcacttttagctctcaccatcccttatttgatttattgtagcaaaaggaaagcctgtgagaatgcaagggagcccctggctgctttgctggagtccctgggaggtgccccacacctctgccaccaaagtctgtgtgctcctgagcagctcgcggctttcacagtagggaaaccgcagtcctcgtcacctgcgcctttgtcctcccattcgtttaccctcccgttcacatccacacaggcttgtaccccacagaacttgacaggaggtcacatgtgtgaatggcctgtgtctgctttacagggttgagcaggctgagggtgtgtgcctctggggatgctgggctgacagcaaatcccaacagtatttcggctctggactgatttggcctttagtgcttccccaggcctctttcatcggcatgggaaaagcccttaggggtgggcggtgagggcacatttataactaacaaagaagaatgcagttgccccagcatcctactggtcaccttaagtggcagcagagccctccccagcggtgccccagtccctcagaagtgctcagtccggcccgagtgcccatctggtggctctgccgtgttcttctgggcggatctgtgtgcactacacagcgagtgagggcgtggctcacacagttgtttgagggaaatgggtaatgcccatcccttgctgttttaagtgccaaatagcgtgttagcgcccctccaacaaaggatcatccttccagtgagtcaccgagaatgacagtgactgccattactattcaaagtacatctctgattgctgatctgagccactggttcagagccaggttctagaggctgcaggtccagccccttaccattcctggagaggtaggagctcagtcccttcctccaagccagacctttgcagaggtggcaactgggctgcacgggtcagcagatccctgattctcaagccaccttgagacaagaactccgcccccctgttagtgcatcccagctgcagctctgcatcagaacctacagtggacccttttgaaaacactcttggctgccctagttggttaacttcagaatgtctggaatgggaccagagatgcagttcacatgttttgtaagttctttaggcgactgaagcacagctgcttggagaaccactgaggggtggacaccttcccctggcagccacaaggcaggcagcctgcgggagctcctgagcagctgttgggcgatggtcattacatcacccatgcctttgtatttaaatgaaactcgacacatagaaccaattcaacctgaaagttactacttctgctgattcaggcacttgtttgaagcattttttttttattaaccctgtacttcttctttgcccaccattaaagtgggggaaagtaatatcccaagtagttgagttgagctgttggttgttagatttaagctggaattagtccagggttttatgtggggaggcagttgctgtcttgggatacccggagtgggagtgggtgttttctgtgattggttctgttttttatttttacttatttattttgagatggagtttcatccttattgcccaggctggagggcaatagcaccgtctcagctcactgcaacctccgccgcccgtgtttaagcgattctcctgcctcagcctcccatgtggctgggattacaggtgcccatcaccacacccagctaatgtttttgtatttttagtaaagagggggtttcaccatgttggcccggctggtctcgaactcctgatggcaaggtgatctgcctgcctcagcctcccaaagtgctgggattacaggcatgagccactgagcccggctgtttttttgtgttttttttgttgttgtttgtttgtttttttttttgagacagagtcttgctctgtcgcccaggctggagtgccagtggcgcgatttcagctcactcaggagtgagccaccacacctggcctgtgattggctctattttgagtgattacgtgtaaatcatctagaaccagctctgagcaatggcgttgcggtgtccctccctccccgctggggccataccagcccctctccactgggagcccaagttgccaatgactgtggccaaactcccccatttttgtctgtatcctgctctctttaggttaaaaagaaggaaagaaacatgaaaggccatgtacaatttatttttacaactccaggagtttccccgactaccattttttttttttttatttgccagtggtgtgcatgtagaagaggaatgccatgtcctgtccatagaaatacacatggtggtcaggcatggtggctcatgcctataatcccagcactttgggaggctgaggtgggaggattgcttgagcccaggagtttgagaccagcctgggcaacatggcaagacctctgactctataaaaaaatttttttttttttttttttttgagagagcgtctcacttctctgtcacccaggctagagtagtgtgatcttggcttattacaacttccgcctcccaggttcaagagattctcctgccttagcctcctaagtagctgggattataggcacatgccaccatgcctggcatatttttgtatttttagtagaaacagtttcaccatgttggccaggctggtcttgaactcctgacctcaagtgataagcctgcctcaacctcccaaagtgctgggactacaggggtaagccaccgcgcctggcccaaaattttgttttttaattagctgggtacaatgataggcacctgtaatctcagctgcttgggaggctgaggtgggagcatcacttgagcccaggagtttgaggctgcagtaagctgtgtttgtgccactgcactctggcctgggccaaagagcaagaccctgtcacacacacacacaaaaaaaagaaatacaggtggtgttttggggaagggaaggttctgctggggtcctggaactgtgactgatggcctcaggagtccaggaataggccttctagcacagcagctagtagggctcccccaagccatccgctggcgtgtggaggtgcaggacctgggggaggcagtccccaacccagctaggccaaggggtagggtttttaggtctgtttttaacagagctcagagcaccaggtgaaggtggaaagttggcaggaaaacaaggtcagcatcttattttttctatactcagcagagtgtgccattcccagtttctgtcctgaggatttcaaagaccacaacagccacatttctttccatcttccctcagccagtagtcatttaaaattcttcagttgttctgaagatcctttttttaatgtatcatttttacatgaaagacagctgcaaaatgcaagccccagtagagttggagagtttttcaaggtgagaagtcgctgttctctgcattgaacatggattgaattttccttgtctgatggtaacccatggcccccgccctgcggggataacattctcaggagcttctcttgtcctagccccttctcatttcaaaaatattagtcttttattttcctttttcattcagtttttgttttacagcttttgtagagaccaacccaagtagatgcaggtgggtgttagataaaaacacacatccccaggggacaagccatccagcggtgaggaatctctgccatgttctcttccctgctgcccacaaacgttacggagactcccttagcctccccctcctcttccccactgaggggcagcttgtggagatggaggactcgggcccatagatgcagaccccctaccaaatctagcaatagttctcacccttccaaagctcgagtgccattttgagatgacctaccaatgacatgcagtaaaggacataacctcacagcctttttagaagcatttcgaatatctacagttgcctcaattcacggggcatttcactcctctgatccaggttagaattttgctaaatctgtagcatcctgaatagcacactaatttttttttttagcacactaactttaactacattagttgagtgtagttgatacatctgtggcctcgtgtctataaagagcacactagattgtacccagcacttttggatatgacatgctaattagatgtatttaactattcataggaaagtgtatgataaatgactgtaatatttctaataaatatattttgtttctaatta

SEQ ID NO: 317055 - protein, 408 aa, Artificial Sequence
  derived and/or modified sequence
MKETIFELEDQVEQHRAVKLHNNQLISELESSVIKLEEQKSDLERQLKTLTKQMKEETEEWRRFQADLQTAVVVANDIKCEAQQELRTVKRKLLEEEEKNARLQKELGDVQGHGRVVTSRAAPPPVDEEPESSEVDAAGRWPGVCVSRTSPTPPESATTVKSLIKSFDLGRPGGAGQNISVHKTPRSPLSGIPVRTAPAAAVSPMQRHSTYSSVRPASRGVTQRLDLPDLPLSDILKGRTETLKPDPHLRKSPSLESLSRPPSLGFGDTRLLSASTRAWKPQSKLSVERKDPLAALAREYGGSKRNALLKWCQKKTQGYANIDITNFSSSWSDGLAFCALLHTYLPAHIPYQELNSQEKKRNLLLAFEAAESVGIKPSLELSEMLYTDRPDWQSVMQYVAQIYKYFET

SEQ ID NO: 317056 - DNA, 1725 bp, Artificial Sequence
  derived and/or modified sequence
cctttctttgactggagcggacccgccggacgcaaccgcctcgccagccggagccagcgcgagctcggcacggtggacacccggtccgaggccggcaagccggctggtgcccgagtcggccaagcatgggcaaccactcaggacggcccgaggatccggaaccaggtggaaaaggattattcatacctgaaggagatatgtgatcaccaagccgaacagctgagcagaaccagcctaaagctgcaagaaaaagcatcagagagtgatgcagagatcaaagacatgaaagaaaccatatttgaattggaagatcaggtggaacagcaccgggctgtcaagttacacaataatcaactcatcagtgagctagaaagtagtgtgatcaagctggaggaacagaagtcagacctggagaggcagctgaagactctgaccaagcagatgaaggaggagaccgaggaatggaggcggttccaggcggatctgcagaccgcagtggtggtggccaatgacatcaagtgtgaggcccagcaggagctgcgcaccgtgaagaggaaactgctggaggaggaggagaagaatgcccggttgcagaaggagctgggggatgtgcagggccacggcagggtggtcaccagcagagccgcccctccacctgtggatgaagagccagagtcctctgaggtcgatgctgctggtcggtggcctggtgtctgtgttagcagaacatctccaacacccccagagtcggcaaccaccgttaagtcacttatcaagtcatttgacttgggacgcccaggtggagctggacagaatatttctgtccataagacccccagaagtcccctaagtgggataccagtgaggactgctccagcagctgctgtctctccaatgcagaggcattcgacttacagcagtgtgcggccagccagcagaggggtgactcaacgcttggaccttcctgaccttcccctctcagatattctaaagggaaggactgagaccctgaagccagacccccacctccgcaagagtccctcactagagtcactgagcagacccccgtctctgggctttggggacacaagactgctgagtgcttccacccgggcatggaaaccacaaagcaaactcagtgtggaaagaaaagaccctctggcagccttggcccgggaatacggtggttccaagcgcaatgctctactgaaatggtgccagaagaagacacaaggttatgcgaacattgacatcaccaatttcagcagcagctggagcgatggcctggccttctgtgctctgctccacacctacctgcctgcccacatcccctaccaggagctgaatagtcaggagaaaaagaggaatctcttgttggcatttgaagcggctgaaagtgtaggcatcaaacccagcctggaactcagcgagatgctgtacacagaccggcccgactggcagagtgtgatgcagtacgtggcccaaatctacaagtactttgagacgtaaccctggagggcctggggcagccaccattgccacctactgcagcttttcctggaagcgcctgattactgtccactgaccctgctctgcccaccacccagctgcctagacttcaaagacaggctcaatccaagtggaccaacacccaaataagaaacagagtgggtcccacgatgtacctgtctgaaatgcaaatgcagctggactgtaaattgggga

SEQ ID NO: 317057 - DNA, 237 bp, Artificial Sequence
  derived and/or modified sequence
atgagaagcgccgccaagccctggaaccccgccatcagagccggcggccacggccccgacagagtgagacccctgcccgccgccagcagcggcatgaagagcagcaagagcagcaccagcctggccttcgagagcagactgagcagactgaagagagccagcagcgaggacaccctgaacaagcccggcagcaccgccgccagcggcgtggtgagactgaagaagaccgccacctag

SEQ ID NO: 317058 - DNA, 237 bp, Artificial Sequence
  derived and/or modified sequence
atgcgctctgccgctaagccttggaaccccgccatccgggcaggaggccatgggcctgatcgggttagaccattgcccgctgctagtagcggtatgaagagtagtaagtcatcaacctctctggcatttgaaagccgcttgagccgtctgaagagagccagcagcgaggacactcttaataaacctggctcaactgccgccagcggtgtggtacgcttgaagaagactgctacctag

SEQ ID NO: 317059 - DNA, 237 bp, Artificial Sequence
  derived and/or modified sequence
atgaggtctgctgccaagccctggaacccagccatccgggccggcggccacggccctgacagagtgcggcccctgcctgctgccagcagcggcatgaagagcagcaagagcagcaccagcctggcctttgagagccggctgagccggctgaagagggccagcagcgaggacaccctgaacaagccaggcagcacagctgccagcggcgtggtgcggctgaagaagacagccacctag

SEQ ID NO: 317060 - DNA, 237 bp, Artificial Sequence
  derived and/or modified sequence
atgcggagcgccgccaagccctggaaccccgccatccgggccggcggacatggtccagaccgggtccgccccttaccagccgccagctcaggaatgaagtcaagcaagtcctcaacatcgctggcctttgagtccagattaagtaggcttaaaagagcatcatccgaggatacgctcaacaaaccgggcagcaccgccgcctctggggtggttagactaaagaagaccgccacctag

SEQ ID NO: 317061 - DNA, 237 bp, Artificial Sequence
  derived and/or modified sequence
atgcggagcgcagccaagccttggaaccccgctataagggccggtggccacggtcctgaccgggtcagacccctcccagccgcttcctctggtatgaagtcttcaaagtcaagtactagccttgcttttgagagccgcctgtcaaggctgaagcgggcttcatcagaggacactcttaacaagcctggaagtaccgccgcttctggcgtcgtaaggctgaagaaaacagcaacatag

SEQ ID NO: 317062 - DNA, 324 bp, Artificial Sequence
  derived and/or modified sequence
aatagagtggctgacttgctgattgaggtcggcagctcccgagaagcaggagaagcagagtttttgcagacagacccacgaagtcaagcatgcggagtgcagccaagccctggaacccagccatcagagcagggggccacggcccagaccgggtgcggcctctgcctgcagcctcttccggcatgaagagttctaagtcttcaacttccttggcttttgagtcccgactcagcaggctcaagagggccagcagtgaggacacgctcaacaagccaggaagtaccgctgcatcgggggtggttcgcctgaagaagaccgccactg

SEQ ID NO: 317063 - protein, 228 aa, Artificial Sequence
  derived and/or modified sequence
  misc_feature (1)..(1): Xaa can be any naturally occurring amino acid
XATDIWQDDSECSENHSFKQNVDRYALLSTLQLMYTVGYSFSLISLFLALTLLLFLRKLHCTRNYIHMNLFASFILRTLAVLVKDVVFYNSYSKRPDNENGWMSYLSEMSTSCRSVQVLLHYFVGANYLWLLVEGLYLHTLLEPTVLPERRLWPRYLLLGWAFPVLFVVPWGFARAHLENTGCWTTNGNKKIWWIIRGPMMLCVTALGLEETGLKRNGSIPFGHKEDI

SEQ ID NO: 317064 - DNA, 735 bp, Artificial Sequence
  derived and/or modified sequence
atggaagctatgtggcttctgtgtgttgcccttgccgtgctggcttggggctttctgtgggtgtgggattcctccgaaaggatgaagtcccgcgaacagggagggagactgggcgcggagtctcggacactcttggtcattgcgcaccccgacgacgaagcaatgttctttgcccccacagttcttggcctcgcgcgcctgcgtcactgggtttatctgctgtgctttagtgcgggtaactactacaatcagggggagacccgtaaaaaagagctcctgcaatcgtgtgacgtgcttggcatccccttatcttcagtgatgattatcgacaatcgggatttcccggacgacccaggcatgcagtgggatacagagcacgtggcaagggtccttctgcagcacattgaggtgaacgggattaatttggtggtgactttcgatgcgggaggagtgtccggccatagcaatcacatagctctttatgccgcggtgcgggtgctgtgcgctcacgccagcgtgtgcgagtgtgcggcccaagtccatctaccatcaggctccgccctggttagcgcctcctacgccggatgtcctctgcgggctcagcagcaaagaagtggtaccgggcaggagagtcatgtcctgcctccacagcccgccccactggttccacccccattacactacctgctgccagtgcatgaaaatcagctcacagaactcccactaaagccctag

SEQ ID NO: 317065 - DNA, 735 bp, Artificial Sequence
  derived and/or modified sequence
atggaggccatgtggctgctgtgtgtggccctggccgtgctggcctggggcttcctgtgggtgtgggacagcagcgagaggatgaagagccgggagcagggcggccgcctgggcgctgagagcaggaccctgctggtgattgcccacccagatgatgaggccatgttctttgcccccaccgtgctgggcctggcccggctgcggcactgggtgtacctgctgtgcttctctgctggcaactactacaaccagggcgagaccaggaagaaggagctgctgcagagctgtgatgtgctgggcatccccctgagctctgtgatgatcatcgacaacagagacttcccagatgaccccggcatgcagtgggacacagagcacgtggcccgggtgctgctgcagcacatcgaggtgaatggcatcaacctggtggtgacctttgatgctgggggcgtgtctggccacagcaaccacatcgccctgtatgctgctgtgcgggtgctgtgtgcccacgcctctgtgtgtgaatgtgccgcccaggtgcacctgcccagcggcagcgccctggtgtctgccagctatgccggctgccccctgcgggcccagcagcagaggtctggaacaggccaggagagccacgtgctgcccccccagcctgcccccctggtgcccccacccctgcactacctgctgcctgtgcatgagaaccagctgacagagctgcccctgaagccctag

SEQ ID NO: 317066 - DNA, 735 bp, Artificial Sequence
  derived and/or modified sequence
atggaggccatgtggctgctgtgcgtggccctggccgtgctggcctggggattcctgtgggtctgggacagctctgagagaatgaagtctagggagcaggggggacgtcttggcgcagaatctcgcactctgctggttatcgcccatcctgatgacgaggcgatgttcttcgcacccactgtgctaggactggcgcgcctccggcattgggtctatctactctgcttttctgccggtaactattacaaccaaggagagacgaggaagaaggaactgcttcagtcttgtgacgtactaggtattcctctgtcaagcgtgatgattatagacaatagggactttccagacgatcccggaatgcagtgggacaccgaacatgtggccagagtgctgctgcagcatatcgaggtgaacgggattaatctcgttgtgaccttcgacgccgggggcgtttccggccactccaatcacatcgctctttacgcagccgtacgtgttctgtgcgcccatgcatcagtgtgtgagtgtgctgcacaagtacacctgccctctggcagtgcacttgtctctgcctcatacgcaggttgcccgctgcgtgctcagcagcaacggagcgggactggccaggagtcacatgtccttccgccccaacctgctcccctggtgcccccaccgctgcattatttgctaccagtacacgaaaaccagcttacagagctgcccctcaagccctag

SEQ ID NO: 317067 - DNA, 913 bp, Artificial Sequence
  derived and/or modified sequence
agtgctgcttacccatcatggaagcaatgtggctcctgtgtgtggcgttggcggtcttggcatggggcttcctctgggtttgggactcctcagaacgaatgaagagtcgggagcagggaggacggctgggagccgaaagccggaccctgctggtcatagcgcaccctgacgatgaagccatgttttttgctcccacagtgctaggcttggcccgcctaaggcactgggtgtacctgctttgcttctctgcaggaaattactacaatcaaggagagactcgtaagaaagaacttttgcagagctgtgatgttttggggattccactctccagtgtaatgattattgacaacagggatttcccagatgacccaggcatgcagtgggacacagagcacgtggccagagtcctccttcagcacatagaagtgaatggcatcaatctggtggtgactttcgatgcagggggagtaagtggccacagcaatcacattgctctgtatgcagctgtgagggtgctctgtgctcacgcttcagtctgtgaatgtgctgcgcaagtacatctcccttctggatctgcccttgtctctgcttcatacgcaggatgtcctcttcgtgctcaacagcaaagaagtggcacaggccaagaaagccatgtcctgccaccgcagccagctcctctggttccgccgcctctacattatcttctcccggtacatgagaatcaactcactgagcttcctctgaagccttgaagggttttcagatccaaggaacaaaggggaaaatagacaaaggagtgcagaggacctggcctggcactggcttatttacctgagctcaaggagatccccgctggagcagcctctgcaaaagggagcccatgtaggccaggggctgtccaaactccagcttc

SEQ ID NO: 317068 - DNA, 735 bp, Artificial Sequence
  derived and/or modified sequence
atggaggccatgtggctgttgtgtgttgccctcgcagtgctggcctggggctttctctgggtttgggatagcagtgagaggatgaagtccagggaacagggaggcaggctgggggcagaatcgcgcaccctgctggtgatcgctcacccagacgacgaagccatgttctttgctccaacagttcttggcctcgctcggctgagacactgggtttacctcttgtgcttctcagcgggaaactattacaatcagggggaaacaaggaagaaggagctgttacagtcttgcgacgtcctggggatccccctgtcctcagtcatgatcatcgacaatagggatttccctgacgacccaggaatgcaatgggacacagagcacgtggcgagagtgctgctgcagcacatcgaggtgaatggaatcaatcttgtcgtgactttcgatgcgggaggagtctcgggccactcgaatcacattgccttgtacgccgctgttagagttttgtgcgcccatgcaagcgtatgtgaatgcgcagctcaagttcatctgccgagtggcagcgctttggtgagtgctagttatgctggttgcccactgcgtgctcaacagcaaagaagcggcactggccaggaatcccacgtgcttcccccacagcccgctccactcgttcccccacctctccactacttactccctgtccacgagaatcagttaacagaactgcctctgaagccatag

SEQ ID NO: 317069 - DNA, 735 bp, Artificial Sequence
  derived and/or modified sequence
atggaggccatgtggctgctgtgcgtggccctggccgtgctggcctggggcttcctgtgggtgtgggacagcagcgagagaatgaagagcagagagcagggcggcagactgggcgccgagagcagaaccctgctggtgatcgcccaccccgacgacgaggccatgttcttcgcccccaccgtgctgggcctggccagactgagacactgggtgtacctgctgtgcttcagcgccggcaactactacaaccagggcgagaccagaaagaaggagctgctgcagagctgcgacgtgctgggcatccccctgagcagcgtgatgatcatcgacaacagagacttccccgacgaccccggcatgcagtgggacaccgagcacgtggccagagtgctgctgcagcacatcgaggtgaacggcatcaacctggtggtgaccttcgacgccggcggcgtgagcggccacagcaaccacatcgccctgtacgccgccgtgagagtgctgtgcgcccacgccagcgtgtgcgagtgcgccgcccaggtgcacctgcccagcggcagcgccctggtgagcgccagctacgccggctgccccctgagagcccagcagcagagaagcggcaccggccaggagagccacgtgctgcccccccagcccgcccccctggtgcccccccccctgcactacctgctgcccgtgcacgagaaccagctgaccgagctgcccctgaagccctag

SEQ ID NO: 317070 - DNA, 378 bp, Artificial Sequence
  derived and/or modified sequence
atgagcagcagcggctacccccccaaccagggcgccttcagcaccgagcagagcagataccccccccacagcgtgcagtacaccttccccaacaccagacaccagcaggagttcgccgtgcccgactacagaagcagccacctggaggtgagccaggccagccagctgctgcagcagcagcagcagcagcagctgagaagaagacccagcctgctgagcgagttccaccccggcagcgacagaccccaggagagaagaaccagctacgagcccttccaccccggccccagccccgtggaccacgacagcctggagagcaagagacccagactggagcaggtgagcgacagccacttccagagagtgagcgccgcctag

SEQ ID NO: 317071 - DNA, 279 bp, Artificial Sequence
  derived and/or modified sequence
tgaagaagcagcaccagcccctgcggcaccagcaagagccccaacagagagtgggagggcaagagcgtggcctacatgccctacgccgaggtgaagagagccctggagcaggaggcccagatgcacaacaccgccgccagaagcgccagcccctgcagactgagccccagagaggtgagcaaggccgccccccagcccgacatgagcgccgccagatacagcgtgccccccgtgctgcagcccgccccccaccaggtgatcaccaacctgcccgagtag

SEQ ID NO: 317072 - DNA, 378 bp, Artificial Sequence
  derived and/or modified sequence
atgtccagctctggatacccacccaatcagggggccttcagtaccgagcaatccagataccccccccattcagtccaatatacctttcccaacactaggcatcagcaggagttcgcagtgcccgattatcgaagctcccacttggaagtgtcccaggccagtcaattattacagcaacaacagcagcagcagctcagacgccgtccaagtttgttatccgaattccacccagggtccgaccgacctcaggaacggaggacgtcctatgagccctttcacccgggccctagcccagtggatcacgactctctagagtccaagagaccccgcttggaacaggtttcagactcccacttccagcgcgtctccgccgcctag

SEQ ID NO: 317073 - DNA, 279 bp, Artificial Sequence
  derived and/or modified sequence
taacgaagctcgacaagcccgtgcggcactagtaaatctcccaatagagaatgggaagggaagagtgtggcttacatgccctacgcggaagtaaagcgcgctctggagcaggaggcccagatgcacaataccgccgctcgcagtgccagtccctgtcggctgtcaccgcgcgaggtctccaaggcagcaccgcagccagacatgagtgctgctcggtactccgtgcctccagttctgcagcccgcacctcatcaagtgatcaccaacttgccagaatag

SEQ ID NO: 317074 - DNA, 378 bp, Artificial Sequence
  derived and/or modified sequence
atgagcagcagcggctacccacccaaccagggcgccttcagcacagagcagagccgctacccaccccacagcgtgcagtacaccttccccaacaccaggcaccagcaggagtttgctgtgcctgactaccgcagcagccacctggaggtgtcccaggccagccagctgctgcagcagcagcagcagcagcagctgcggcggcggcccagcctgctgtctgagttccaccctggcagtgaccggccccaggagaggaggaccagctatgagcccttccaccctggccccagccctgtggaccatgacagcctggagagcaagaggccccggctggagcaggtgtctgacagccacttccagagggtgtctgctgcctag

SEQ ID NO: 317075 - DNA, 279 bp, Artificial Sequence
  derived and/or modified sequence
tgaagaagcagcaccagcccctgtggcaccagcaagagccccaaccgggagtgggagggcaagtctgtggcctacatgccctatgcagaggtgaagagggccctggagcaggaggcccagatgcacaacacagctgcccggagcgccagcccctgccgcctgagcccccgggaggtgtccaaggccgccccccagcctgacatgtctgctgcccgctacagcgtgccccctgtgctgcagcctgccccccaccaggtgatcaccaacctgcctgagtag

SEQ ID NO: 317076 - DNA, 378 bp, Artificial Sequence
  derived and/or modified sequence
atgagcagcagcggctacccccccaaccagggcgccttcagcaccgagcagagtcgctacccccctcattctgtgcagtacacattccctaatacacgtcaccagcaggaattcgccgtgcccgattatcggagcagccatctggaagtgtcccaggcttcccagctcctccaacaacaacaacagcagcagctgaggcgccgaccatctctcctctccgaattccatcccggctccgacaggccacaggagaggaggacttcttatgagccgttccatcccgggccaagccctgtcgaccacgactctctagaatccaagagaccccgccttgagcaggtgagtgacagtcatttccagcgagtcagtgcagcgtag

SEQ ID NO: 317077 - DNA, 279 bp, Artificial Sequence
  derived and/or modified sequence
tgacggagcagcaccagcccctgcggcaccagcaagagccccaacagagagtgggaaggaaagtccgtggcgtatatgccttatgctgaagtgaagagggcattggagcaggaagctcagatgcacaatacagctgctagatccgcatcgccctgtcgtctctccccccgggaggtgagtaaggcagctcctcaacctgacatgagtgccgccaggtactctgttcccccagtgttgcagccggctccacatcaggtcattaccaatcttcccgagtag

SEQ ID NO: 317078 - DNA, 378 bp, Artificial Sequence
  derived and/or modified sequence
atgagctctagcggctacccaccaaaccaaggtgccttctccacggagcagtctagatatccccctcactccgtgcagtacacgttccccaacacaaggcatcagcaagagtttgccgtgccagactaccgcagtagccacctcgaagttagccaggctagtcagctgcttcagcagcagcagcagcagcaactgcgtcggagaccctcattacttagcgaatttcatccaggctctgatcggcctcaggagcgcaggactagttatgaacctttccacccaggaccttccccagttgaccacgatagtttggagagtaagcggccaaggctcgagcaggtgtccgatagtcatttccagcgggtgagtgcagcctag

SEQ ID NO: 317079 - DNA, 279 bp, Artificial Sequence
  derived and/or modified sequence
taacggtccagcacttcgccctgtgggacctctaaaagcccgaacagagagtgggagggaaagtcagtggcctatatgccttacgctgaggtgaaacgggcactggaacaagaagcacagatgcacaacaccgccgctcgttcagcatccccatgcagactttcaccacgcgaggtatccaaggctgcccctcagccagatatgagcgccgctcggtacagcgtgcctcctgtgctacagcctgcaccacaccaggtgatcactaatcttcccgaatag

SEQ ID NO: 317080 - DNA, 488 bp, Artificial Sequence
  derived and/or modified sequence
atgaagagaccgggcgcagcgcgacccgggaagctccgccgaggtggtttcctagaaacatgattgtttattggcattgatctcacagtctggtgaggacttctttactgataatgtcaagttcaggttatcctcccaaccaaggagcattcagcacagaacaaagtcgttatcctcctcactctgtccagtatacatttcccaacacccgccaccagcaggagttcgcagtccctgattatcgttcctctcatcttgaagtgagtcaggcatcacagcttttgcagcaacagcagcagcaacagcttcgaaggcgaccttccttgctttcagaatttcacccaggttctgacaggcctcaagaaaggagaactagttatgaaccgtttcatccaggcccatccccagtggatcatgattcactggaatcgaagcgaccacgtctggaacaggtttctgattctcattttcagcgtgtcagtgctgcg

SEQ ID NO: 317081 - DNA, 274 bp, Artificial Sequence
  derived and/or modified sequence
tagaagttctacaagtccatgtggcacatccaagagtccaaacagagagtgggaaggaaaatcagtcgcctatatgccttatgctgaggtcaaacgtgctctagaacaggaagcacagatgcacaatactgcagcaaggtcagcctcaccgtgtaggctttctccaagagaagtcagtaaagccgctccacagcctgatatgagtgcagcccgctatagtgtcccgccagtccttcagcctgctccacatcaagtgataactaatctccctgaa

SEQ ID NO: 317082 - DNA, 189 bp, Artificial Sequence
  derived and/or modified sequence
atgctgcaggttgttcaagaaggaaaccctgcccccttcatcattaatactgttaaacggggcagacgagatagggaaaggcagcggaccccatgggctccccacccattgggattccagggtcggagatatatctacgagtcccctaaccatcgcggtaaggatagctcctttctggcccagaagtag

SEQ ID NO: 317083 - DNA, 189 bp, Artificial Sequence
  derived and/or modified sequence
atgttgcaggttgtgcaggagggcaatcccgcaccctttattattaataccgtaaagcggggccgtagagaccgggagaggcagcggacgccatgggcaccccacccattaggattccaggaaagacgatacatatatgagagccctaaccaccgcggtaaggactcctccttcttggcccagaaatag

SEQ ID NO: 317084 - DNA, 123 bp, Artificial Sequence
  derived and/or modified sequence
atgaagaagctgatggtggtgctgagcctgattgctgctggcatcttccgcagctcctggggcagcatcaccttcggcaagggccgggtgcccaggagccgggtgctgctgagcggcctgtag

SEQ ID NO: 317085 - DNA, 1200 bp, Artificial Sequence
  derived and/or modified sequence
atgtgcgtgcagaactgcggccccagcttccagagcctgatcgtgaagaaggagttcgtgaaggagaacctggtgaagctgctgaaccccagatacaacctgcccctggacatccagaacagaatcctgaacttcatcaagacctggagccagggcttccccggcggcgtggacgtgagcgaggtgaaggaggtgtacctggacctggtgaagaagggcgtgcagttcccccccagcgaggccgaggccgagaccgccagacaggagaccgcccagatcagcagcaacccccccaccagcgtgcccaccgcccccgccctgagcagcgtgatcgcccccaagaacagcaccgtgaccctggtgcccgagcagatcggcaagctgcacagcgagctggacatggtgaagatgaacgtgagagtgatgagcgccatcctgatggagaacacccccggcagcgagaaccacgaggacatcgagctgctgcagaagctgtacaagaccggcagagagatgcaggagagaatcatggacctgctggtggtggtggagaacgaggacgtgaccgtggagctgatccaggtgaacgaggacctgaacaacgccatcctgggctacgagagattcaccagaaaccagcagagaatcctggagcagaacaagaaccagaaggaggccaccaacaccaccagcgagcccagcgcccccagccaggacctgctggacctgagccccagccccagaatgcccagagccaccctgggcgagctgaacaccatgaacaaccagctgagcggcctgaacttcagcctgcccagcagcgacgtgaccaacaacctgaagcccagcctgcacccccagatgaacctgctggccctggagaacaccgagatcccccccttcgcccagagaaccagccagaacctgaccagcagccacgcctacgacaacttcctggagcacagcaacagcgtgttcctgcagcccgtgagcctgcagaccatcgccgccgcccccagcaaccagagcctgccccccctgcccagcaaccaccccgccatgaccaagagcgacctgcagccccccaactactacgaggtgatggagttcgaccccctggcccccgccgtgaccaccgaggccatctacgaggagatcgacgcccaccagcacaagggcgcccagaacgacggcgactag

SEQ ID NO: 317086 - DNA, 1095 bp, Artificial Sequence
  derived and/or modified sequence
atgtgcgtgcagaactgcggccccagcttccagagcctgatcgtgaagaaggagttcgtgaaggagaacctggtgaagctgctgaaccccagatacaacctgcccctggacatccagaacagaatcctgaacttcatcaagacctggagccagggcttccccggcggcgtggacgtgagcgaggtgaaggaggtgtacctggacctggtgaagaagggcgtgcagttcccccccagcgaggccgaggccgagaccgccagacaggagatcggcaagctgcacagcgagctggacatggtgaagatgaacgtgagagtgatgagcgccatcctgatggagaacacccccggcagcgagaaccacgaggacatcgagctgctgcagaagctgtacaagaccggcagagagatgcaggagagaatcatggacctgctggtggtggtggagaacgaggacgtgaccgtggagctgatccaggtgaacgaggacctgaacaacgccatcctgggctacgagagattcaccagaaaccagcagagaatcctggagcagaacaagaaccagaaggaggccaccaacaccaccagcgagcccagcgcccccagccaggacctgctggacctgagccccagccccagaatgcccagagccaccctgggcgagctgaacaccatgaacaaccagctgagcggcctgaacttcagcctgcccagcagcgacgtgaccaacaacctgaagcccagcctgcacccccagatgaacctgctggccctggagaacaccgagatcccccccttcgcccagagaaccagccagaacctgaccagcagccacgcctacgacaacttcctggagcacagcaacagcgtgttcctgcagcccgtgagcctgcagaccatcgccgccgcccccagcaaccagagcctgccccccctgcccagcaaccaccccgccatgaccaagagcgacctgcagccccccaactactacgaggtgatggagttcgaccccctggcccccgccgtgaccaccgaggccatctacgaggagatcgacgcccaccagcacaagggcgcccagaacgacggcgactag

SEQ ID NO: 317087 - DNA, 1200 bp, Artificial Sequence
  derived and/or modified sequence
atgtgtgtgcaaaactgcggaccttcttttcagtccctcatcgtgaagaaggagttcgtaaaagaaaacctcgttaagttgcttaaccctcgctacaatttgccactcgatattcagaaccgcatactgaactttataaagacatggagccaggggtttccaggcggcgttgatgtgtccgaggtgaaggaggtgtatttggatctcgtgaaaaagggagtgcagttcccaccttcagaagccgaagccgaaacggcaagacaagagacggcacaaatatcctcaaacccaccgaccagtgtaccaaccgcccctgcactgtcttccgtcatcgctccaaagaactccaccgtcacccttgtgcccgagcagattggaaagttacactctgaattagacatggtgaagatgaatgtccgcgtcatgagcgcaatcctaatggaaaataccccaggttcggagaaccatgaggacattgagcttctgcaaaagttgtacaagaccggcagagaaatgcaagaacgtatcatggatcttctggtcgtcgtggagaacgaggacgtgacagtggagctaattcaggttaatgaggatctcaacaacgctatcctggggtacgagagatttactcgaaatcagcagcgtatcctcgagcaaaataagaaccagaaagaagccacaaacacaacttcagagccaagtgccccatctcaggacctgcttgatttgtcgcctagcccacgaatgccccgggctacgctgggcgaacttaacactatgaacaaccagctcagtggcctgaatttttctctaccatccagcgacgtgacaaataacttaaagccttcactgcacccacagatgaacctgcttgctttagagaacacagaaataccgccattcgcccagaggacctctcagaatttaacctccagtcatgcttacgacaacttcctggaacatagtaacagcgtattcctccagcccgtctcactccagaccattgccgccgcccccagcaatcagtccctccctcccctgccgagtaaccacccagcaatgacgaagtctgatttacaacccccaaactactatgaagtgatggaatttgacccactggcacctgctgtgacaactgaggcaatttacgaagagatagacgcccaccaacataaaggcgctcagaatgacggtgattag

SEQ ID NO: 317088 - DNA, 1200 bp, Artificial Sequence
  derived and/or modified sequence
atgtgtgttcagaattgtggcccttcattccagtccctaatagtcaagaaagaattcgttaaggagaatctcgtgaagctgctgaatcctaggtataatctgcctttggacatacagaacaggatcctgaatttcattaagacctggtcccaggggtttccaggaggcgttgatgtgtctgaggtgaaggaagtgtacctcgacctcgttaagaagggtgtgcagttccccccatcagaggccgaggcggaaaccgctcggcaagaaacggcacagatctctagcaacccacctacttccgtgcctaccgccccggctctatcctcagttatcgctccaaaaaactccacagtgaccctcgtgccagagcagatcggcaagctccattcagagttggatatggtgaaaatgaacgtgagagtcatgagtgctatccttatggagaacacaccaggatctgaaaatcacgaggacatcgaactgcttcaaaagctctacaaaacgggccgcgaaatgcaggagagaatcatggatctactcgtggtcgtggaaaacgaggatgtgacagtggaattgattcaagttaatgaggatctgaacaacgcgatcctaggatatgagcggtttacccggaatcaacagcgaatcttagaacaaaacaagaatcagaaggaggcgacaaacacaacttccgagccatcggctccatcacaggacctcctggatctcagtccctccccgaggatgcctcgtgcaacgctgggggaactgaacaccatgaacaaccagctgtccggcctcaacttttccctgcccagctctgacgtcacaaacaacctgaagccttccttacatccacaaatgaacttattagccctggaaaatactgagattcccccctttgcacaaagaactagccagaacctaactagttcccacgcctatgacaacttcctcgagcattctaattctgtctttctgcagccggtgtccttgcagacaattgccgcggctccgtctaatcagagtcttccccctcttccgtccaaccacccagctatgaccaaaagcgatctgcagcctcctaattactacgaggttatggagttcgatccactggcccccgctgtcactactgaagcgatctatgaagaaattgatgcccaccagcataagggggctcaaaacgacggagactag

SEQ ID NO: 317089 - DNA, 1095 bp, Artificial Sequence
  derived and/or modified sequence
atgtgtgtgcaaaactgtgggccatcttttcaaagtcttatcgttaagaaagaattcgtgaaagaaaatttagtgaaactattgaatccacggtataatctcccactcgacattcaaaaccgcattctgaactttatcaagacatggtcccagggattcccggggggcgtcgacgtgtctgaggttaaagaggtgtatctagatctggtgaaaaaaggggttcaatttccgccatcagaggctgaagccgagacagcaaggcaagaaatcggaaagctccactccgagctggacatggtcaagatgaacgttagagtgatgtccgccatattgatggagaacacccctgggtctgagaaccatgaggacatcgaattgcttcagaagttgtataaaactggcagggagatgcaggagcgaatcatggatcttctggtggtagtagaaaacgaggatgtgaccgtagagctcatccaggttaacgaagacctgaacaacgctatcctgggctacgagcggttcacccgcaatcagcaacggatcctggaacaaaacaaaaaccagaaggaagccaccaacacaacatcagaaccaagcgctcccagccaggatctcctggacctgagtccaagtccccgcatgccacgggctacgctcggggaactgaacacgatgaacaaccaactgagcggcctcaacttttccttgccaagctccgacgttaccaataatcttaaacccagcttgcacccgcaaatgaatctcttggccctcgaaaacaccgaaatccccccatttgcgcagcgaacctctcagaatctgaccagctcccatgcctacgataattttctcgagcactcgaactccgtcttcttacagccagtgagcctgcaaacaatcgccgctgcaccttctaatcaaagtctcccacctctgcctagcaaccatccggctatgactaaatccgatctccagcctcctaactattacgaggtgatggaatttgacccactggcccccgccgtcacaaccgaggcaatttacgaagagattgacgcgcaccaacataagggcgcccagaacgacggcgactag

SEQ ID NO: 317090 - DNA, 1200 bp, Artificial Sequence
  derived and/or modified sequence
atgtgtgtgcagaactgtggccccagcttccagagcctcatcgtgaagaaggagtttgtgaaggagaacctggtgaagctgctgaacccccgctacaacctgcccctggacatccagaaccgcatcctgaacttcatcaagacctggagccagggcttccctgggggcgtggatgtgtctgaggtgaaggaggtgtacctggacctggtgaagaagggcgtgcagtttcctccttctgaggccgaggccgagacagcccggcaggagacagcccagatcagcagcaacccccccacctctgtgcccacagccccagccctgagctctgtgattgcccccaagaacagcacagtgaccctggtgcctgagcagatcggcaagctgcacagcgagctggacatggtgaagatgaatgtgcgggtgatgtctgccatcctgatggagaacaccccaggcagcgagaaccatgaagatattgagctgctgcagaagctgtacaagacaggccgggagatgcaggagcgcatcatggacctgctggtggtggtggagaatgaagatgtgacagtggagctgatccaggtgaatgaagacctgaacaatgccatcctgggctatgagcgcttcaccaggaaccagcagaggatcctggagcagaacaagaaccagaaggaggccaccaacaccaccagcgagcccagcgcccccagccaggacctgctggacctgagccccagccccaggatgccccgggccaccctgggggagctgaacaccatgaacaaccagctgagcggcctgaacttcagcctgcccagcagtgatgtgaccaacaacctgaagcccagcctgcacccccagatgaacctgctggccctggagaacacagagatccccccatttgcccagaggaccagccagaacctgaccagcagccacgcctatgacaacttcctggagcacagcaacagcgtcttcctgcagcctgtgtccctgcagaccatcgctgctgcccccagcaaccagagcctgccccccctgcccagcaaccacccagccatgaccaagagtgacctgcagccccccaactactatgaggtgatggagtttgaccccctggccccagctgtgaccacagaggccatctatgaggagattgatgcccaccagcacaagggggcccagaatgatggagactag

SEQ ID NO: 317091 - DNA, 1095 bp, Artificial Sequence
  derived and/or modified sequence
atgtgtgtgcagaactgtggccccagcttccagagcctcatcgtgaagaaggagtttgtgaaggagaacctggtgaagctgctgaacccccgctacaacctgcccctggacatccagaaccgcatcctgaacttcatcaagacctggagccagggcttccctgggggcgtggatgtgtctgaggtgaaggaggtgtacctggacctggtgaagaagggcgtgcagtttcctccttctgaggccgaggccgagacagcccggcaggagatcggcaagctgcacagcgagctggacatggtgaagatgaatgtgcgggtgatgtctgccatcctgatggagaacaccccaggctctgaaaatcatgaggacatcgagctgctgcagaagctgtacaagacaggccgggagatgcaggagcgcatcatggacctgctggtggtggtggagaatgaagatgtgacagtggagctgatccaggtgaatgaagacctgaacaatgccatcctgggctatgagcgcttcaccaggaaccagcagaggatcctggagcagaacaagaaccagaaggaggccaccaacaccaccagcgagcccagcgcccccagccaggacctgctggacctgagccccagccccaggatgccccgggccaccctgggggagctgaacaccatgaacaaccagctgagcggcctgaacttcagcctgcccagcagtgatgtgaccaacaacctgaagcccagcctgcacccccagatgaacctgctggccctggagaacacagagatccccccatttgcccagaggaccagccagaacctgaccagcagccacgcctatgacaacttcctggagcacagcaacagcgtcttcctgcagcctgtgtccctgcagaccatcgccgccgcccccagcaaccagagcctgccccccctgcccagcaaccacccagccatgaccaagagtgacctgcagccccccaactactatgaggtgatggagtttgaccccctggccccagctgtgaccacagaggccatctatgaggagattgatgcccaccagcacaagggggcccagaatgatggagactag

SEQ ID NO: 317092 - DNA, 1200 bp, Artificial Sequence
  derived and/or modified sequence
atgtgcgtgcagaactgcggccccagcttccagagcctgatcgtgaaaaaagaattcgtcaaggagaatctggtgaaactgctgaaccctcggtacaacctgcccttagatatacagaataggattctgaattttatcaagacttggtcccagggtttccccggcggtgttgatgtgtctgaagttaaggaagtctatttggacctagttaagaagggcgtgcaattccccccttcagaagcggaggccgagaccgccagacaggaaacggcccagatatcatccaatcccccgacctccgtccccaccgcccctgctcttagttctgtcatcgcccccaaaaattccacggtgacactggtcccggaacagattggaaaactccactctgagcttgacatggtcaagatgaacgtgcgagtaatgtccgcaattcttatggaaaatacccccggatccgagaatcacgaagatatcgaattgctgcagaaactgtataaaactggtcgagaaatgcaagagaggatcatggacctgctcgtggtggttgagaatgaggacgttacagtagagctgattcaggtcaacgaggatctgaataacgccatcctcggttatgaaagattcactaggaaccagcagcgaattcttgagcaaaacaaaaatcagaaagaggccacaaacacaacttctgagccatccgctccatctcaggacctactggacctgagcccctccccgcgaatgccgcgggctacccttggggagctgaacactatgaataatcagttgagtggattgaatttctctctgccatcaagtgacgttacgaacaatctgaaaccgtcccttcacccccaaatgaatcttctcgcattggagaataccgagattcccccttttgcccagcggacatcacagaacctcacctcaagccacgcatacgacaacttcttggagcactcaaatagcgtgtttctgcagcctgtgtctcttcagaccatcgccgcagctccctctaaccagtccctgcctccacttccctccaatcaccccgccatgactaaatcagatctccaacctccaaattattatgaagttatggaatttgatccactcgcacccgctgtcactacggaggccatctacgaggagattgacgcccaccagcacaaaggagctcagaatgacggcgattag

SEQ ID NO: 317093 - DNA, 1200 bp, Artificial Sequence
  derived and/or modified sequence
atgtgcgtgcagaactgcggccccagcttccagagcctgatcgtgaagaaagagttcgtcaaggaaaacctcgtcaagctgctgaacccaagatacaacctacccctggacatacagaatagaattctaaattttattaagacatggtcccagggcttcccgggtggcgtcgatgtgtccgaggttaaagaggtgtacctggacttagtcaaaaaaggcgttcagttcccaccttccgaagctgaagcagagacagcccgccaggagactgctcagattagttccaatccgcccacttcagttccaactgctccggcactgagttctgttattgcccccaagaactcgaccgtgaccctggtgccggagcagattggcaagctgcacagcgaacttgacatggtgaaaatgaacgtgagagtaatgtcagcaattctcatggagaatacccctggctccgaaaatcatgaggacattgaactgctgcagaagctctataaaacaggtcgggagatgcaggagcgcattatggacttactggtggtggtggaaaacgaagatgtcaccgtggagctcattcaggtcaatgaagacctgaataacgcaatcctgggctacgagcgcttcacaaggaaccagcagcgtatactagagcaaaataaaaatcagaaggaggccaccaatacaacttctgagcccagtgccccttcacaggacctcctggatctgagtcccagcccacgaatgccgcgggccaccctcggagagttgaataccatgaacaatcagctgtccggcctgaacttctcgctgccttcaagtgatgtgacaaacaatctaaagcccagtctacacccacaaatgaacctcttggcactggagaacaccgagatccccccatttgctcagagaaccagccagaacttgaccagcagccacgcctatgataatttcctcgagcatagcaactcagtgtttctacagcccgtcagtttacagacaatagccgccgcgccttctaatcagagcctccctcccctcccctccaaccacccggcaatgaccaagtcggacctccaaccccccaactactatgaggtgatggagtttgaccccctggctcctgccgtgacaaccgaagctatttacgaggagattgatgctcatcagcacaaaggtgctcagaatgatggcgattag

SEQ ID NO: 317094 - DNA, 1095 bp, Artificial Sequence
  derived and/or modified sequence
atgtgcgtgcagaactgcggccccagcttccagagcctgatcgtgaagaaggagttcgtcaaagagaatctagtgaaactactcaaccctcgatataatcttcctctggatatccagaatcgaattctcaattttattaaaacttggtcccaaggtttcccgggcggcgtcgacgtatccgaggttaaagaagtgtatctggatctcgtcaagaagggcgtgcagttccctccatctgaagccgaggccgagacggcccgccaggagatcgggaagctccactcagagctggatatggtgaaaatgaatgtccgggtcatgagcgccatactgatggagaatacacccggaagcgaaaatcacgaagatattgagctgcttcaaaagctctacaaaactggcagagaaatgcaggagcggattatggatctgctcgtcgtcgttgagaacgaagatgtcaccgtggaactgattcaggtgaacgaggacctgaataacgcaatccttggttatgaaagattcactcgtaatcagcagaggatcctcgagcagaacaagaatcagaaagaagcgactaataccacatctgagcccagtgccccttcccaagatctgttagatctgtcccctagccctcgtatgccaagagccacactcggagagttgaacaccatgaacaaccagttatcaggattgaacttcagcttacccagctcagacgtgaccaacaatttgaagccatcccttcacccccagatgaatttgttagccctagaaaacactgaaataccaccatttgctcagcgcacaagtcagaacctaacctctagtcacgcttacgataattttctggagcatagtaactcagttttcctccaacccgtttcactccagacaatcgccgcagcccccagcaatcagagtcttccccccctgccttccaaccaccccgctatgacgaaatccgatttacagcccccaaattattacgaagttatggagttcgaccccctcgctcctgccgtcaccaccgaggcgatctacgaagagattgatgcccatcagcacaagggggcccaaaatgacggcgactag

SEQ ID NO: 317095 - DNA, 1200 bp, Artificial Sequence
  derived and/or modified sequence
atgtgtgttcagaattgtggacccagctttcaaagtctgatcgtgaaaaaagagtttgtgaaagaaaatctggttaaactcctcaatccacggtacaatttgcctttggacatccagaacaggatcttaaacttcattaaaacctggtcacaggggtttcctggaggtgttgatgtgagcgaagttaaggaagtttatctggacctggtgaagaaaggcgtccagtttcctcccagtgaagcagaagctgaaactgctcgccaggagacagctcaaatttcatcaaacccccctactagcgtgcccacagcacctgcactgagttcggttatagcacctaagaactccaccgttacactagtgcccgagcaaatcggaaaactacattcagaactggatatggtgaagatgaatgtacgcgtgatgtctgccatcctgatggagaacaccccaggctccgagaatcatgaagatatcgagcttctgcagaagctctataagaccgggcgtgagatgcaggaacggatcatggacctgttggtcgtagtagagaatgaagatgtgacagtggagctgatccaggttaacgaagacctcaacaacgcgattttgggttacgaacgctttactagaaatcaacagcgcatcctggagcagaacaagaatcagaaagaagcaaccaacacaacttccgaaccttccgcacctagccaggatctgctcgatctgtcacctagtccaagaatgccccgagcgaccctcggggaacttaacactatgaataaccagttgagtggcctcaacttcagtttgccgagctccgatgtgaccaataacctcaagcctagcctgcatcctcagatgaacttgctggctttagagaacacagagattccgccttttgcccaacgcacgtcccaaaacttaacaagctctcatgcttatgacaatttcctcgaacattcaaactcagtatttctacaacccgtctccctgcaaaccattgctgcggctccgagcaatcaaagcctgccccctctcccctcaaaccaccccgctatgacaaagagtgatctccagccgcctaactactacgaggtgatggagtttgatcctttagcccctgcagtgactacagaagccatctatgaggaaattgacgcacaccagcacaagggcgctcagaacgatggagattag

SEQ ID NO: 317096 - DNA, 1200 bp, Artificial Sequence
  derived and/or modified sequence
atgtgcgtccagaattgcgggccaagctttcagagccttatcgtgaaaaaagaattcgtaaaggagaacctggtgaagctcctcaatcctcgctataacttgcctctggacattcagaacaggatcctaaatttcatcaaaacttggtctcaagggtttcccggtggagtcgatgtaagtgaggtgaaagaagtctatctggatctagtgaagaagggagtacaattccccccttccgaagccgaagctgagaccgctagacaggaaaccgcacagatctcatctaatcccccaaccagcgtgcctactgccccagcgctgagctctgtgattgccccaaagaattcaaccgtcacattggtgcccgaacagattggcaagctgcactccgaactggatatggtgaagatgaatgtgcgcgtgatgtccgccatacttatggagaatacccccggatccgagaaccatgaagacatcgagttattacagaagctgtacaagaccgggagagagatgcaggaaagaatcatggacctgctcgtggttgttgaaaacgaagacgttaccgtggaattaattcaggtcaacgaggacctaaataacgccattctcggatacgagcggtttacaagaaaccagcagaggattctggaacagaacaagaaccagaaggaagccaccaacaccaccagcgagccttctgcgccttcccaggacttattagatcttagcccctcacctcgcatgccccgagccactctcggagagctcaacaccatgaacaaccagttgagtggactgaatttttcactcccctccagtgatgttactaacaacctcaagccctccttacatccccaaatgaacctgctggccctggagaatacggaaatcccaccctttgcacagagaacaagccagaacctgacctcgtctcacgcttatgacaacttcctcgaacactcaaactccgtctttttgcagcctgtgtccctgcaaacgattgctgctgcaccatcaaaccagtccctgcctcccctgccaagcaatcaccccgcaatgaccaaatctgatctgcagccccctaattattacgaagtgatggagttcgaccctctggcccctgccgtcacgactgaggccatctatgaagaaatcgacgcccatcagcataagggagcccagaacgatggtgattag

SEQ ID NO: 317097 - DNA, 1095 bp, Artificial Sequence
  derived and/or modified sequence
atgtgtgtgcagaactgcgggccaagttttcagtcccttatagtgaagaaggagttcgtgaaggagaatttagtgaaactgttgaaccccaggtacaaccttcccttggacatacagaatcggatcctcaatttcatcaagacatggtcacagggattccccggaggcgtggacgtatcggaagtgaaagaagtgtatctagatctcgtgaaaaagggagttcagttcccaccctccgaggcggaggccgaaacagctagacaggaaataggtaaattacatagtgagctagatatggtgaaaatgaacgttagggtcatgtccgcaatcctaatggaaaacactccaggaagcgagaaccacgaggatatcgagctgttgcagaaactatataaaacaggaagagaaatgcaggagcgcatcatggaccttctggtggtggtggagaatgaggacgtcaccgtggagctgatccaagtgaacgaggatcttaataacgctatcttgggctatgagaggtttactcgaaatcagcagcgcatcctcgagcagaacaagaatcaaaaagaagccactaataccacttctgagccatcggccccttctcaggacctgctcgatttgagcccgtctcctcgcatgccgagagccacacttggggagctgaacaccatgaacaatcagctgtccgggctgaatttttccctcccgtctagtgatgtcacaaataacctgaagccctccctccatccccagatgaatctgcttgccctggagaataccgagattccaccctttgcacagcgaacttcacagaacctcaccagttctcacgcttacgacaactttctcgagcactccaattcagtcttcctccagcccgtgagcctccaaacaattgccgctgccccttccaatcagtcattgcctcctctacccagcaatcacccagccatgacgaaatcggatttgcagcccccaaattactacgaggtcatggagtttgacccgttggctcctgccgttactactgaggccatatacgaagaaattgacgcccatcagcacaagggggctcagaatgacggtgattag

SEQ ID NO: 317098 - protein, 617 aa, Artificial Sequence
  derived and/or modified sequence
MAMKIMEKIRNVFHCEAHRILYICESQFLRNFIRKEFLRGNGLAAGKMNISIDLDTNYAELVLNVGRVTLGENNRKKMKDCQLRKQQNENVSRAVCALLNSGGGVIKAEVENKGYSYKKDGIGLDLENSFSNMLPFVPNFLDFMQNGNYFHIFVKSWSLETSGPQIATLSSSLYKRDVTSAKVMNASAALEFLKDMEKTGGRAYLRPEFPAKRACVDVQEESNMEALAADFFNRTELGYKEKLTFTESTHVEIKNFSTEKLLQRITEILPQYVSAFANTDGGYLFVGLNEDKEVIGFKAEKSYLTKLEEVTKNSIGKLPVHHFCVEKGTINYLCKFLGVYDKGRLCGYVYALRVERFCCAVFAKKPDSWHVKDNRVKQLTEKEWIQFMVDSEPVCEELPSPASTSSPVSQSYPLREYINFKIQPLRYHLPGLSEKITCAPKTFCRNLFSQHEGLKQLICEEMGSVNKGSLIFSRSWSLDLGLQENHKVLCDALLISQDKPPVLYTFHMVQDEEFKDYSTQTAQTLKQKLAKIGGYTKKVCVMTKIFYLSPEGKTSCQYDLNSQVIYPESYYWTTAQTMKDLEKALSNILPKENQIFLFVCLFRFCLFVCWFVCFFLR

SEQ ID NO: 317099 - protein, 619 aa, Artificial Sequence
  derived and/or modified sequence
MQLSEGLAAHTRRAGKWKRTQVPLLGEECADMDLARKEFLRGNGLAAGKMNISIDLDTNYAELVLNVGRVTLGENNRKKMKDCQLRKQQNENVSRAVCALLNSGGGVIKAEVENKGYSYKKDGIGLDLENSFSNMLPFVPNFLDFMQNGNYFHIFVKSWSLETSGPQIATLSSSLYKRDVTSAKVMNASAALEFLKDMEKTGGRAYLRPEFPAKRACVDVQEESNMEALAADFFNRTELGYKEKLTFTESTHVEIKNFSTEKLLQRITEILPQYVSAFANTDGGYLFVGLNEDKEVIGFKAEKSYLTKLEEVTKNSIGKLPVHHFCVEKGTINYLCKFLGVYDKGRLCGYVYALRVERFCCAVFAKKPDSWHVKDNRVKQLTEKEWIQFMVDSEPVCEELPSPASTSSPVSQSYPLREYINFKIQPLRYHLPGLSEKITCAPKTFCRNLFSQHEGLKQLICEEMGSVNKGSLIFSRSWSLDLGLQENHKVLCDALLISQDKPPVLYTFHMVQDEEFKDYSTQTAQTLKQKLAKIGGYTKKVCVMTKIFYLSPEGKTSCQYDLNSQVIYPESYYWTTAQTMKDLEKALSNILPKENQIFLFVCLFRFCLFVCWFVCFFLR

SEQ ID NO: 317100 - DNA, 1854 bp, Artificial Sequence
  derived and/or modified sequence
atggccatgaagatcatggagaagatcagaaacgtgttccactgcgaggcccacagaatcctgtacatctgcgagagccagttcctgagaaacttcatcagaaaggagttcctgagaggcaacggcctggccgccggcaagatgaacatcagcatcgacctggacaccaactacgccgagctggtgctgaacgtgggcagagtgaccctgggcgagaacaacagaaagaagatgaaggactgccagctgagaaagcagcagaacgagaacgtgagcagagccgtgtgcgccctgctgaacagcggcggcggcgtgatcaaggccgaggtggagaacaagggctacagctacaagaaggacggcatcggcctggacctggagaacagcttcagcaacatgctgcccttcgtgcccaacttcctggacttcatgcagaacggcaactacttccacatcttcgtgaagagctggagcctggagaccagcggcccccagatcgccaccctgagcagcagcctgtacaagagagacgtgaccagcgccaaggtgatgaacgccagcgccgccctggagttcctgaaggacatggagaagaccggcggcagagcctacctgagacccgagttccccgccaagagagcctgcgtggacgtgcaggaggagagcaacatggaggccctggccgccgacttcttcaacagaaccgagctgggctacaaggagaagctgaccttcaccgagagcacccacgtggagatcaagaacttcagcaccgagaagctgctgcagagaatcaccgagatcctgccccagtacgtgagcgccttcgccaacaccgacggcggctacctgttcgtgggcctgaacgaggacaaggaggtgatcggcttcaaggccgagaagagctacctgaccaagctggaggaggtgaccaagaacagcatcggcaagctgcccgtgcaccacttctgcgtggagaagggcaccatcaactacctgtgcaagttcctgggcgtgtacgacaagggcagactgtgcggctacgtgtacgccctgagagtggagagattctgctgcgccgtgttcgccaagaagcccgacagctggcacgtgaaggacaacagagtgaagcagctgaccgagaaggagtggatccagttcatggtggacagcgagcccgtgtgcgaggagctgcccagccccgccagcaccagcagccccgtgagccagagctaccccctgagagagtacatcaacttcaagatccagcccctgagataccacctgcccggcctgagcgagaagatcacctgcgcccccaagaccttctgcagaaacctgttcagccagcacgagggcctgaagcagctgatctgcgaggagatgggcagcgtgaacaagggcagcctgatcttcagcagaagctggagcctggacctgggcctgcaggagaaccacaaggtgctgtgcgacgccctgctgatcagccaggacaagccccccgtgctgtacaccttccacatggtgcaggacgaggagttcaaggactacagcacccagaccgcccagaccctgaagcagaagctggccaagatcggcggctacaccaagaaggtgtgcgtgatgaccaagatcttctacctgagccccgagggcaagaccagctgccagtacgacctgaacagccaggtgatctaccccgagagctactactggaccaccgcccagaccatgaaggacctggagaaggccctgagcaacatcctgcccaaggagaaccagatcttcctgttcgtgtgcctgttcagattctgcctgttcgtgtgctggttcgtgtgcttcttcctgagatag

SEQ ID NO: 317101 - DNA, 1860 bp, Artificial Sequence
  derived and/or modified sequence
atgcagctgagcgagggcctggccgcccacaccagaagagccggcaagtggaagagaacccaggtgcccctgctgggcgaggagtgcgccgacatggacctggccagaaaggagttcctgagaggcaacggcctggccgccggcaagatgaacatcagcatcgacctggacaccaactacgccgagctggtgctgaacgtgggcagagtgaccctgggcgagaacaacagaaagaagatgaaggactgccagctgagaaagcagcagaacgagaacgtgagcagagccgtgtgcgccctgctgaacagcggcggcggcgtgatcaaggccgaggtggagaacaagggctacagctacaagaaggacggcatcggcctggacctggagaacagcttcagcaacatgctgcccttcgtgcccaacttcctggacttcatgcagaacggcaactacttccacatcttcgtgaagagctggagcctggagaccagcggcccccagatcgccaccctgagcagcagcctgtacaagagagacgtgaccagcgccaaggtgatgaacgccagcgccgccctggagttcctgaaggacatggagaagaccggcggcagagcctacctgagacccgagttccccgccaagagagcctgcgtggacgtgcaggaggagagcaacatggaggccctggccgccgacttcttcaacagaaccgagctgggctacaaggagaagctgaccttcaccgagagcacccacgtggagatcaagaacttcagcaccgagaagctgctgcagagaatcaccgagatcctgccccagtacgtgagcgccttcgccaacaccgacggcggctacctgttcgtgggcctgaacgaggacaaggaggtgatcggcttcaaggccgagaagagctacctgaccaagctggaggaggtgaccaagaacagcatcggcaagctgcccgtgcaccacttctgcgtggagaagggcaccatcaactacctgtgcaagttcctgggcgtgtacgacaagggcagactgtgcggctacgtgtacgccctgagagtggagagattctgctgcgccgtgttcgccaagaagcccgacagctggcacgtgaaggacaacagagtgaagcagctgaccgagaaggagtggatccagttcatggtggacagcgagcccgtgtgcgaggagctgcccagccccgccagcaccagcagccccgtgagccagagctaccccctgagagagtacatcaacttcaagatccagcccctgagataccacctgcccggcctgagcgagaagatcacctgcgcccccaagaccttctgcagaaacctgttcagccagcacgagggcctgaagcagctgatctgcgaggagatgggcagcgtgaacaagggcagcctgatcttcagcagaagctggagcctggacctgggcctgcaggagaaccacaaggtgctgtgcgacgccctgctgatcagccaggacaagccccccgtgctgtacaccttccacatggtgcaggacgaggagttcaaggactacagcacccagaccgcccagaccctgaagcagaagctggccaagatcggcggctacaccaagaaggtgtgcgtgatgaccaagatcttctacctgagccccgagggcaagaccagctgccagtacgacctgaacagccaggtgatctaccccgagagctactactggaccaccgcccagaccatgaaggacctggagaaggccctgagcaacatcctgcccaaggagaaccagatcttcctgttcgtgtgcctgttcagattctgcctgttcgtgtgctggttcgtgtgcttcttcctgagatag

SEQ ID NO: 317102 - DNA, 1854 bp, Artificial Sequence
  derived and/or modified sequence
atggctatgaagataatggaaaaaattcgcaacgtgtttcattgcgaggcccaccggattttatatatttgtgaaagccagtttcttcggaatttcattcgaaaggagtttctccgaggaaacggtcttgcagctgggaagatgaatatcagcattgatctggacaccaattatgccgagctcgtgctgaacgttggccgggtgacccttggggagaacaaccggaaaaaaatgaaagactgccagctccgaaaacaacagaatgaaaatgtctcccgcgcggtttgtgctttgttaaatagcggaggcggggtgataaaggccgaagtcgagaacaaaggatacagttacaagaaagacggcatcggactggacttggagaattctttttctaacatgctgccctttgtgcccaatttcctcgacttcatgcagaacggcaattattttcacatcttcgttaaaagctggagtctcgaaaccagcggaccacaaatcgccactctgagttccagtctatacaagcgagacgtcacctctgccaaagttatgaacgcttccgcagcattggagttcttgaaggatatggaaaaaactggtggacgggcctacctcagacctgagttccctgccaaacgagcatgtgttgacgtacaggaggagagcaatatggaagccttggcagccgacttctttaatagaactgaattgggatacaaggaaaaattaacgttcacggagtcaacacacgttgagatcaagaatttctccacagagaaactgttgcagcgtatcacagagatattgccacagtacgtttccgcattcgctaacaccgacgggggatatctatttgtagggttaaacgaggacaaggaagttattggtttcaaggccgaaaagtcgtatcttacaaaacttgaagaagttaccaagaactcaatcggcaaactgcccgtgcaccacttctgcgtggaaaaaggaaccattaattacctctgcaagtttctgggggtctatgataagggcaggttgtgtggatacgtgtacgcgttgcgggttgaacggttctgttgcgccgtcttcgctaagaagcctgacagttggcacgtgaaggacaaccgcgtgaagcagctaactgagaaggagtggatccagtttatggtggacagcgagcccgtttgtgaagagttgccttcgcccgcctccacaagtagccctgtgtcacaaagctaccctctacgagagtacattaacttcaaaatacaaccgcttaggtaccatcttccaggtctcagcgaaaaaattacttgtgcgcccaaaaccttttgcaggaatctcttttcccagcacgagggattgaagcaactcatttgtgaagaaatgggctctgttaataaaggttctctgattttcagcagatcatggagtttggacctgggcctgcaagaaaaccataaggtcttgtgtgatgcactgcttattagccaggataagccacccgtactctatactttccacatggtccaggatgaggagtttaaggattactcaacacagacagcgcaaacgctcaagcaaaaactggcgaagattggagggtacactaagaaagtctgtgttatgacaaaaatcttctatttgtctccagaaggtaaaacgagctgccagtacgatcttaactcgcaagtcatatatcccgaatcatactattggaccacggcccagacgatgaaggatctggaaaaggccctaagtaacatcctcccaaaggagaatcagatctttctgttcgtatgtttgttccgcttctgcctgttcgtgtgttggttcgtgtgtttttttctccggtag

SEQ ID NO: 317103 - DNA, 1860 bp, Artificial Sequence
  derived and/or modified sequence
atgcagctgtccgagggcctagctgcgcacacgcgaagggcaggtaagtggaagaggacacaggtgccactgctgggcgaggagtgcgcagacatggatctggctcgtaaggaatttctcagaggaaatggactggcagcgggaaagatgaatatctcgatcgacctggataccaactatgccgagctggttctgaacgtcggcagggtgactctgggggagaacaaccgaaagaaaatgaaggactgccagctgagaaagcagcagaacgaaaacgtctcaagagcagtctgcgccctgctaaacagtggcgggggtgtgatcaaagcagaggtcgagaacaagggctacagttacaagaaggatggtatcgggctcgacctggagaactccttctctaacatgctcccctttgtgccaaatttcctggactttatgcagaacggcaattacttccacatatttgtgaaatcctggagtctcgagacctccggcccccaaattgcaactctgagcagtagtctgtataagagggatgtgaccagcgccaaagtcatgaatgcctccgccgcactcgagttccttaaggatatggaaaagacaggcggccgcgcctacctaaggcctgaattccctgcaaagagagcatgtgttgacgttcaggaggaatccaatatggaggcgctagccgccgatttcttcaacagaaccgaactcggttacaaagagaagttaaccttcactgaaagtacccacgtagaaatcaagaattttagcaccgagaaacttcttcagaggataacagaaatcttgcctcagtacgtaagcgctttcgctaatacagatggcggctacttattcgtgggtctgaatgaggataaggaagttattggctttaaagctgagaagtcctatcttaccaagctggaggaggtcacaaaaaactcaatcgggaaacttcccgtacaccatttctgcgttgagaagggaaccattaattacctctgtaagtttctcggcgtatacgacaaagggcggctgtgcgggtatgtctacgcactgcgggttgaaagattctgctgtgcagtgttcgctaagaaaccagatagttggcatgtcaaagacaatcgtgttaagcagctgactgagaaagagtggattcagttcatggttgacagcgagccggtgtgtgaggagctgccttcccctgcctctacatcatcacccgtgagccagtcttatccactccgcgagtatataaatttcaaaattcagcctctcaggtaccatctgccaggcttgtccgagaagattacctgcgcacccaagaccttttgtagaaatctgttctcccagcatgaggggcttaaacagcttatttgcgaagaaatgggcagcgtgaataagggttcattgatctttagcagatcctggagcttggatctgggcctgcaggagaatcacaaggtcctctgtgacgcactactgattagtcaggacaagccccctgtgctgtacacttttcatatggtccaggacgaggagtttaaagactattctacgcagaccgcgcagacactgaagcagaagctggcgaaaattggcggctatactaagaaggtttgtgtgatgacaaaaattttttatttgtctcccgagggtaagacctcttgccagtatgacctgaattcacaggtgatttatccagaatcctactactggacgaccgcccagacaatgaaagatctggaaaaggcactgtccaacattctgcccaaggagaaccagatctttctcttcgtctgtcttttccgtttctgtctgtttgtgtgctggttcgtatgcttttttctccgctag

SEQ ID NO: 317104 - DNA, 1854 bp, Artificial Sequence
  derived and/or modified sequence
atggccatgaagatcatggagaagatcagaaatgtgttccactgtgaggcccaccgcatcctgtacatctgtgagagccagttcctgaggaacttcatcaggaaggagttcctgcggggaaatggcctggccgccggcaagatgaacatcagcattgacctggacaccaactatgcagagctggtgctgaatgtgggccgggtgaccctgggggagaacaacaggaagaagatgaaggactgccagctgaggaagcagcagaatgaaaatgtgtccagagctgtgtgtgccctgctgaacagcggcggcggcgtcatcaaggccgaggtggagaacaagggctacagctacaagaaggatggcatcggcctggacctggagaacagcttcagcaacatgctgccctttgtgcccaacttcctggacttcatgcagaatggaaactacttccacatctttgtgaagtcctggagcctggagaccagcggcccccagatcgccaccctgagcagcagcctgtacaagagagatgtgaccagcgccaaggtgatgaatgccagcgctgccctggagttcctgaaggacatggagaagacaggaggccgggcctacctgcggcctgagttccctgccaagagggcctgtgtggatgtgcaggaggagagcaacatggaggccctggccgctgacttcttcaacagaacagagctgggctacaaggagaagctgaccttcacagagagcacccacgtggagatcaagaacttcagcacagagaagctgctgcagaggatcacagagatcctgccccagtatgtgtctgcctttgccaacacagatggcggctacctgtttgtgggcctgaatgaagacaaggaggtgattggcttcaaggccgagaagagctacctgaccaagctggaggaggtgaccaagaacagcatcggcaagctgcctgtgcaccacttctgtgtggagaagggcaccatcaactacctgtgcaagttcctgggcgtgtatgacaagggccgcctgtgtggctacgtgtatgccctgcgggtggagcgcttctgctgtgctgtgtttgccaagaagccagacagctggcacgtgaaggacaacagagtgaagcagctgacagagaaggagtggatccagttcatggtggacagcgagcctgtgtgtgaggagctgcccagccctgccagcaccagcagccctgtgtcccagagctaccccctgcgggagtacatcaacttcaagatccagcccctgcgctaccacctgcccggcctgtctgagaagatcacctgtgcccccaagaccttctgcaggaacctcttcagccagcacgagggcctgaagcagctgatctgtgaggagatgggctctgtgaacaagggcagcctcatcttcagccgctcctggagcctggacctgggcctgcaggagaaccacaaggtgctgtgtgatgccctgctgatcagccaggacaagccccctgtgctgtacaccttccacatggtgcaggatgaggagttcaaggactacagcacccagacagcccagaccctgaagcagaagctggccaagattggaggctacaccaagaaggtgtgtgtgatgaccaagatcttctacctgagccctgagggcaagaccagctgccagtatgacctgaacagccaggtgatctacccagagagctactactggaccacagcccagaccatgaaggacctggagaaggccctgagcaacatcctgcccaaggagaaccagatcttcctgtttgtgtgcctcttccgcttctgcctgtttgtgtgctggtttgtgtgcttcttcctgaggtag

SEQ ID NO: 317105 - DNA, 1860 bp, Artificial Sequence
  derived and/or modified sequence
atgcagctgtctgagggcctggccgcccacacccggcgggccggcaagtggaagaggacccaggtgcccctgctgggggaggagtgtgccgacatggacctggccaggaaggagttcctgcggggaaatggcctggccgccggcaagatgaacatcagcattgacctggacaccaactatgcagagctggtgctgaatgtgggccgggtgaccctgggggagaacaacaggaagaagatgaaggactgccagctgaggaagcagcagaatgaaaatgtgtccagagctgtgtgtgccctgctgaacagcggcggcggcgtcatcaaggccgaggtggagaacaagggctacagctacaagaaggatggcatcggcctggacctggagaacagcttcagcaacatgctgccctttgtgcccaacttcctggacttcatgcagaatggaaactacttccacatctttgtgaagtcctggagcctggagaccagcggcccccagatcgccaccctgagcagcagcctgtacaagagagatgtgaccagcgccaaggtgatgaatgccagcgctgccctggagttcctgaaggacatggagaagacaggaggccgggcctacctgcggcctgagttccctgccaagagggcctgtgtggatgtgcaggaggagagcaacatggaggccctggccgctgacttcttcaacagaacagagctgggctacaaggagaagctgaccttcacagagagcacccacgtggagatcaagaacttcagcacagagaagctgctgcagaggatcacagagatcctgccccagtatgtgtctgcctttgccaacacagatggcggctacctgtttgtgggcctgaatgaagacaaggaggtgattggcttcaaggccgagaagagctacctgaccaagctggaggaggtgaccaagaacagcatcggcaagctgcctgtgcaccacttctgtgtggagaagggcaccatcaactacctgtgcaagttcctgggcgtgtatgacaagggccgcctgtgtggctacgtgtatgccctgcgggtggagcgcttctgctgtgctgtgtttgccaagaagccagacagctggcacgtgaaggacaacagagtgaagcagctgacagagaaggagtggatccagttcatggtggacagcgagcctgtgtgtgaggagctgcccagccctgccagcaccagcagccctgtgtcccagagctaccccctgcgggagtacatcaacttcaagatccagcccctgcgctaccacctgcccggcctgtctgagaagatcacctgtgcccccaagaccttctgcaggaacctcttcagccagcacgagggcctgaagcagctgatctgtgaggagatgggctctgtgaacaagggcagcctcatcttcagccgctcctggagcctggacctgggcctgcaggagaaccacaaggtgctgtgtgatgccctgctgatcagccaggacaagccccctgtgctgtacaccttccacatggtgcaggatgaggagttcaaggactacagcacccagacagcccagaccctgaagcagaagctggccaagattggaggctacaccaagaaggtgtgtgtgatgaccaagatcttctacctgagccctgagggcaagaccagctgccagtatgacctgaacagccaggtgatctacccagagagctactactggaccacagcccagaccatgaaggacctggagaaggccctgagcaacatcctgcccaaggagaaccagatcttcctgtttgtgtgcctcttccgcttctgcctgtttgtgtgctggtttgtgtgcttcttcctgaggtag

SEQ ID NO: 317106 - DNA, 1854 bp, Artificial Sequence
  derived and/or modified sequence
atggccatgaagatcatggagaagatccggaacgtgttccactgcgaagcacaccggatcctttacatctgcgagagccagttcctccgaaactttatcaggaaggagtttctgaggggaaatgggctcgctgcaggcaaaatgaatatcagcattgatttagacactaattatgcagagctggtactcaacgtaggcagggtcacactcggcgaaaacaaccggaagaaaatgaaggactgccagctgcgtaagcagcagaacgagaacgtgagccgggcggtctgcgctctgctgaattccggcggcggggttataaaagccgaggtggagaataagggatactcatacaaaaaggacggcatcggccttgacctggaaaacagctttagcaacatgctgcccttcgtgcccaacttcctcgatttcatgcagaatggcaactacttccatatatttgtcaagtcctggtcattggaaacaagcggaccacagatagcaacactgagcagcagtctttacaaacgagacgtcacctcagctaaggtaatgaatgcctcagcggctttggagttccttaaagatatggaaaaaaccgggggccgcgcatatttaaggcccgaatttcctgcgaagcgggcctgcgtggacgtgcaggaggagtccaacatggaggctttggctgcagatttcttcaatcggactgaactgggctataaagaaaagctgacctttacagaatccacccacgtggaaatcaagaatttttctacggagaaacttctgcaaaggattacagaaatcttacctcagtatgttagcgcctttgccaatacggacggcggctacctctttgtggggctgaacgaagacaaagaagtgatcgggttcaaagccgagaaatcctacctgacaaagttagaggaagtgaccaaaaactccattggcaaactgcctgtccaccacttctgcgtagagaaaggtactattaattatttatgcaaattcctgggtgtgtacgacaagggccgcttgtgtggctatgtctacgccttacgtgtggaacggttttgctgtgcagtgttcgccaagaaaccggacagctggcatgtgaaggacaatagagtaaaacaacttactgagaaggaatggatacagttcatggtagatagcgagccagtctgcgaggagctgccatcccctgcttcaacatccagcccagtgagccagtcgtatcccctgcgtgagtacatcaatttcaagattcagcctctgaggtatcacttgcctggcctctctgagaagattacttgcgccccaaagactttttgcagaaacctgttcagtcaacatgagggtctgaaacagcttatatgtgaagaaatgggctcggtcaataaaggatccctgatcttttccaggtcttggtccttggacttaggcctccaggagaaccacaaagtcctgtgtgatgcacttctcatttcacaagacaagccacctgtgttgtacacatttcacatggttcaagatgaggagttcaaagactactccacgcagaccgcccaaacactgaagcaaaaactcgccaaaataggaggatacactaagaaagtttgcgtcatgacaaagatattctatctctctcctgaggggaagaccagctgtcagtatgatctgaacagtcaagtgatttatcccgaatcttactattggaccacagcacagaccatgaaggatctcgaaaaagccctatcaaacatcttaccaaaagagaaccagatcttcctctttgtttgtctgtttaggttctgccttttcgtctgctggtttgtctgtttctttcttagatag

SEQ ID NO: 317107 - DNA, 1860 bp, Artificial Sequence
  derived and/or modified sequence
atgcagctgagcgagggcctggccgcccacacccggcgggccggcaagtggaagaggacccaggtcccactactgggagaagaatgtgcggatatggacctggccagaaaagagttcctgcgcgggaatggactggccgccggaaagatgaacatttcgatcgaccttgacaccaattacgccgagctcgtgcttaatgtgggtcgcgtgacgcttggtgaaaataatagaaaaaaaatgaaagactgccaactcagaaagcagcagaacgagaatgtcagtagagccgtgtgtgcactccttaactctggcgggggcgtcataaaggccgaggtggaaaataaagggtacagttataaaaaggatgggattggattggatttggaaaactcattctccaatatgctgccatttgttccaaacttccttgattttatgcagaacggaaactacttccatatctttgtgaagtcttggtccctggaaacatctggccctcagattgcaacgctgagtagctcattgtacaaacgagacgttacatcagcgaaagttatgaacgcctctgcagcgctggagttcctgaaagatatggagaagactggtggtcgcgcctaccttcggccagaattccctgccaaacgagcatgtgttgacgtacaagaggagtccaatatggaggcactcgccgcggacttttttaaccggacagagctcggttataaggagaagctaacctttacggaatccacccatgtggagattaaaaacttctctacagagaagttacttcagagaatcaccgaaatcctgcctcagtatgtgtctgccttcgccaacaccgatggcgggtacctcttcgtcgggttaaacgaggataaggaggttataggtttcaaggcggagaaatcatacctgaccaagctggaagaggtgactaaaaattctatcggtaagctgcctgtacatcacttttgtgtggaaaagggtacaattaattacctctgcaaatttctcggcgtgtacgataagggccgtctatgtggatacgtctacgcactgcgggtggagcggttttgttgtgcagtgttcgcaaagaaacctgatagttggcatgtaaaggataatcgtgtgaagcagttaacggagaaagagtggatccagtttatggtcgatagcgaaccagtttgcgaagagttaccttctccagcgagcacatcttctccagtttctcagtcctatccgctacgggagtacattaactttaaaatacaacccctgcgataccatctacctggtttgtccgaaaagattacatgcgctccaaagactttttgtagaaatctgttcagccagcatgagggcctgaagcagcttatttgtgaggaaatgggcagcgtgaataaggggagtctcatattctctagatcatggtccctcgacttagggctgcaagagaaccacaaagtgctctgtgacgccttgttgatctcccaggacaagcccccagtcctgtatactttccacatggtgcaggatgaagaatttaaagactacagcacgcagaccgcccagactctgaaacagaagttagccaagatcgggggttatacaaaaaaagtctgtgtgatgaccaaaatattctatctcagcccagagggcaaaaccagctgccagtatgatctgaattcccaagtcatttacccagaatcttactattggaccacggcccagacaatgaaagacctcgagaaagcgctctcaaacatcctgcctaaggagaatcagatttttctcttcgtgtgtctgtttagattttgtctgttcgtctgctggtttgtgtgcttttttctacgttag

SEQ ID NO: 317108 - DNA, 1854 bp, Artificial Sequence
  derived and/or modified sequence
atggcaatgaaaattatggaaaagattcgcaacgtcttccactgcgaggcacacaggattctctacatttgtgaatctcaatttctgcgaaacttcatcaggaaggagtttctcagagggaatggtctggctgcaggaaagatgaatatcagcatcgacctggacacgaactacgctgagctggtgctgaatgtgggtcgggtgacactgggagaaaataacaggaagaaaatgaaagattgtcaattgagaaagcaacaaaatgaaaacgtgtcccgggctgtttgcgctctgctcaattcaggtggtggggtcatcaaagcggaagttgaaaacaaggggtattcctacaaaaaggatggtattgggctggatctggaaaactccttctcaaatatgctccctttcgtcccaaatttcctggatttcatgcagaacgggaactacttccacatctttgtgaaatcctggtccctcgagacttccggaccccaaattgcgaccctcagtagtagtctgtataaacgcgatgttacttccgcgaaggtgatgaacgcaagtgccgcacttgaatttctcaaggacatggagaaaacaggcggaagggcctacttgcgtcccgaattcccagcgaagagggcctgtgtggacgtgcaggaagagagcaatatggaggcactagcagccgacttttttaatcgcactgaattaggttacaaggaaaaattgacctttacagaatcaacccatgtcgaaattaagaatttctccaccgagaagctactgcagagaatcacagagatcctgccacagtatgtatccgcctttgccaatacggatggaggttatctgttcgtcggcctgaatgaggataaggaggtgatcggattcaaggcagagaaaagctacctgaccaagctcgaagaagttacaaaaaatagtataggcaagctgcccgtgcaccacttttgcgtggagaagggcacaatcaattacctgtgtaagtttctgggagtgtatgacaagggaagactctgcggctacgtttatgcattgagagtggaacgcttctgttgcgcagtgttcgccaaaaagcccgacagctggcatgtaaaggacaaccgagtcaaacagctcacagaaaaagaatggatacagtttatggtagactcggagccagtgtgcgaggagctcccttccccagcatcgacctctagcccagtgtcccagagctaccccctgcgcgagtatattaactttaaaattcaaccgttacgctatcatcttcctgggttatcagagaaaattacgtgcgcaccgaagacattctgtagaaatcttttttcccagcatgaggggctgaagcagttaatctgcgaggagatggggtctgtgaataaagggtctctgatcttctctagatcatggagtctggacctgggactccaagagaatcataaggtgctctgcgacgcactgctaataagccaagacaagccgcctgtcttatatacatttcacatggtccaggacgaggagttcaaagattattccacccagaccgcgcaaactcttaaacagaaactggccaagattggtggatatacgaagaaggtctgcgtgatgactaagatcttctatcttagtcccgaaggaaagacttcgtgccagtacgatctgaactctcaggtcatttatcctgaatcgtattactggactacagcacagacgatgaaggacctggagaaggccctcagcaacatactcccaaaggagaatcagattttcctcttcgtttgcctgtttcgtttttgccttttcgtatgctggttcgtatgttttttcctccggtag

SEQ ID NO: 317109 - DNA, 1860 bp, Artificial Sequence
  derived and/or modified sequence
atgcagctttccgagggcctggctgcacacacccggagagctggtaagtggaagagaacccaagtcccactacttggtgaagagtgtgcagacatggatttggctcgcaaggagttcctcagaggcaacggcctcgctgccggtaagatgaacatctccatcgacttagatacgaattatgcagaacttgtattaaacgtgggcagggtcaccttgggagaaaacaaccgcaagaaaatgaaggattgtcagctgcggaagcagcagaacgaaaacgtcagccgggcagtgtgcgctttgctgaattccggaggcggagtgattaaggccgaagtagaaaataagggttacagctataagaaggacggaatcggacttgatctagagaactccttctctaatatgttgccattcgtcccgaattttttggactttatgcagaacggcaattatttccacatcttcgtgaaatcttggtccctcgagaccagcggccctcaaattgctacgctatcgtcctcgctctataagcgagacgttacatctgcgaaggtgatgaatgcttcggccgctttggagtttttaaaggatatggaaaagaccggaggcagggcttacctgcggcctgaattccctgctaaacgggcatgtgtggacgtgcaagaggagtctaacatggaagccttggcagcggacttttttaatcggacggagctgggctataaagagaagttgacttttacagaatcaacccacgtggagatcaaaaattttagcactgagaagctgctgcagcggatcaccgagatactcccccaatacgtttccgcattcgccaacaccgatggcggttatttattcgtgggcctcaacgaggacaaagaagtgattgggttcaaggcagagaaatcatacctgacaaagctagaagaggtgacaaagaatagtataggcaaactgcctgtgcaccacttctgcgtggaaaaaggtactatcaactacctgtgtaagttcttgggtgtgtatgataagggaaggttgtgtggatacgtgtatgcgctgcgggtggagcgattttgttgcgccgtctttgcaaagaaaccagacagttggcacgtgaaggacaatcgcgtcaaacaattaactgaaaaggaatggatccagttcatggtggactcagagcccgtttgcgaggagctgcccagcccagcaagcacttctagccctgtgagtcaatcctacccattgagagagtacataaatttcaaaattcaaccattgcgctatcaccttcccggactcagtgagaaaatcacatgcgcaccaaagactttttgtagaaatttattcagccaacacgagggtctcaaacagcttatttgtgaggaaatgggctcagtgaataaaggctccctaattttcagccgctcctggagcttagacttgggcctgcaagagaatcataaggtgctgtgtgacgcgttattaatcagtcaagacaagcctccagtactctatactttccacatggtccaggatgaggaatttaaggactatagcactcagaccgcccagacacttaaacagaagttggctaagatcggtggttataccaaaaaagtgtgcgtgatgaccaagatcttttacctttctccggaggggaagacttcctgtcaatatgacttgaacagccaggtcatttaccccgagagctattactggaccacagctcagacgatgaaggacctggaaaaagctctctccaatattttgcccaaagagaaccaaatctttctctttgtatgcctgtttcggttttgcctatttgtgtgttggttcgtttgtttctttctgagatag

SEQ ID NO: 317110 - DNA, 451 bp, Artificial Sequence
  derived and/or modified sequence
ggggagggccggaaaacagaaaaggattcgcgttctttttactctgtggagagtgagcccgcggactgtagcctgggcctcgccaagttcctttgttctttgttttctttaaattaccttttttctttttgtcttaaaaaatacacatgggtgaaaaagaaacgagagctccctagagatcactcagagctgttttcgtgggtttttaacttccagttgctcaagggtccacgctggcatctggggtgtgctcgcacctgcgaagaatccagcttctagggagcaccgcgagctgttctttgttcaacacgccaagaacctggacactcttcactggtaacatattttggcaagccaaccaggagaaaagaatttctgcttggacactgcatagctgctgggaaaatgaacatcagtgttgatttggaaacgaattatgccgagttggttc

SEQ ID NO: 317111 - DNA, 702 bp, Artificial Sequence
  derived and/or modified sequence
gagcccgcggactgtagcctgggcctcgccaagttcctttgttctttgttttctttaaattaccttttttctttttgtcttaaaaaatacacatgggtgaaaaagaaacgagagctccctagagatcactcagagctgttttcgtgggtttttaacttccagttgctcaagggtccacgctggcatctggggtgtgctcgcacctgcgaagaatccagcttctagggagcaccgcgagctgttctttgttcaacacgccaagaacctggacactcttcactggtaacatattttggcaagccaaccaggaggttttcgatgtttgcatgcagccatctctagaatgtcaaatggtctctcttcaactggaatgatgagaagtgaaacaaatatgcgaccatgaggacactgtaacctatggatggtgtgctgagactggaaacccaaaatgatgaaaagaatttctgcttggacactgcatagctgctgggaaaatgaacatcagtgttgatttggaaacgaattatgccgagttggttctagatgtgggaagagtcactcttggagagaacagtaggaaaaaaatgaaggattgtaaactgagaaaaaagcagaatgaaagtgtctcacgagctatgtgtgctctgctcaattctggagggggagtgatcaaggctgaaattgagaatgaagactatagtt

SEQ ID NO: 317112 - DNA, 2752 bp, Artificial Sequence
  derived and/or modified sequence
acatattccccccttgaggctagaatggcaggcctaaaatgagtaggagaattctgagaaatggaaactttaaaaaggcggcaaccttctagtttcattctcagaaataccaaagcagcatttttcctggacttgttctgcagagcgctcagatttgaaagccatttctagcctttgaggattaccactgtcctcagccaaactgcagggactcctaagtagatcagagctcctggaactttctcatcttttcagcatctcaaccctgtggaatcttttaactcccaagtgctaccaggatatttgcgatgtactctggaatccctctggaaggagctgtcctcacagaatgaaggattagaggagttaataaataagcaaacccaacctttctcctggggaattgtgatcctctctagaagctaggctgtggacctgaatttgcaggagaagccaggagtcatctgtgatgctctgctgatagcatagaacagccctggcagggccaggactactgcacttgcactgcccttactttgaagcagaagctggtgaacatggggggctacactggggaggtgtgtgtcagggccaaggtcctctgcctgagtcctgagagcagcgcagaggctttggaggctgcagtgtctccgatggattaccctgcgtcctatagttttgcaggcacccagcacattggaagccctgctgcagtccctcgtgattgtcttgctcggcttcaggtctctcttgagtgacctgtgcagctatgaggttttaaatctgctcacagcccagcagtatgagatattctccagaagcttccacaagaacagagaattgtttgtccatggcttacctggcttaggaaagaccatcatggccatgaagatcatggagaagatcaggaatgtgtttcactgtgaggcacacagaattctctacatttgtgaaagtcagtttctgaggaatttcatcagaaaagaatttctgcgtggaaatggcttagctgctgggaaaatgaacatcagtattgatttagacacaaactatgctgagctggttctaaatgtgggaagagtcactcttggagagaacaatagaaaaaaaatgaaggattgtcaactgagaaaacagcagaatgaaaatgtctcacgagctgtgtgtgctctgctgaattctggagggggagtgatcaaggctgaagttgagaataaaggctatagttataaaaaagatggaatagggctagatttggaaaattcttttagtaacatgctgccatttgttcctaatttcctggacttcatgcagaatggtaactactttcacatttttgtgaaatcatggagcttggaaacctctggtccgcagattgccacgttgagctccagtttgtacaagagagatgtaacgtctgcaaaagtcatgaatgcttctgctgcactggagttcctcaaagacatggaaaaaactggagggagagcatatttaagaccagaattccctgcaaaaagggcctgtgttgatgtacaagaagaaagtaacatggaagccttggctgctgatttttttaacagaacagaacttggttataaagaaaaattgacctttactgaatccacacacgttgaaataaaaaacttctcgactgaaaagttgttacaacgaattacagagattctccctcaatatgtttctgcatttgcaaatactgatggaggatatttattcgttggtctaaatgaagataaagaagtaattggctttaaagcagagaagagttatcttactaagttagaagaagtaacaaaaaattccattgggaaactgcctgtgcatcacttctgtgtggagaaggggacgataaattacttatgcaaattccttggagtatatgataaaggaaggctttgtggatatgtgtatgcactcagagtggaacgcttctgctgtgcagtgtttgctaaaaagcctgattcctggcacgtgaaagataacagagttaagcagttgaccgagaaggaatggatccagttcatggtggattcagaaccagtatgtgaggaactgccctctccagcaagtacatcatcacctgtctcccagagttatcctcttcgtgaatatattaacttcaaaattcagccactgagatatcaccttccagggctatcagaaaagataacttgtgctccaaaaaccttctgcagaaatctgttctcacaacatgaaggacttaagcaattaatatgtgaagaaatgggctctgtcaataagggctcactgatcttctctaggagctggtctttggatctgggcttgcaagagaaccacaaagtcctctgtgatgctcttctgatttcccaggacaagcctccagtcctatacaccttccacatggtacaggatgaggagtttaaagactattctacacaaactgcccaaactttaaaacagaagctggcaaaaattggtggttacactaaaaaagtgtgtgtcatgacaaagatcttctacttgagccctgaaggcaagacaagctgccagtatgatttaaactcgcaagtaatttaccctgaatcctactattggacaacagctcaaacaatgaaagacttggaaaaggccctttcaaatatcttacctaaggagaatcaaatctttttgtttgtttgtttgtttcgtttttgtttgtttgtttgttggtttgtttgttttttcttgagatgagtctcactctgtcacccag

SEQ ID NO: 317113 - DNA, 1876 bp, Artificial Sequence
  derived and/or modified sequence
atgcagctgagcgaggggctagccgcacacacgcggagagcaggaaagtggaaaagaactcaggtccccctacttggtgaagagtgcgcagacatggacctcgccagaaaagaatttctgcgtggaaatggcttagctgctgggaaaatgaacatcagtattgatttagacacaaactatgctgagctggttctaaatgtgggaagagtcactcttggagagaacaatagaaaaaaaatgaaggattgtcaactgagaaaacagcagaatgaaaatgtctcacgagctgtgtgtgctctgctgaattctggagggggagtgatcaaggctgaagttgagaataaaggctatagttataaaaaagatggaatagggctagatttggaaaattcttttagtaacatgctgccatttgttcctaatttcctggacttcatgcagaatggtaactactttcacatttttgtgaaatcatggagcttggaaacctctggtccgcagattgccacgttgagctccagtttgtacaagagagatgtaacgtctgcaaaagtcatgaatgcttctgctgcactggagttcctcaaagacatggaaaaaactggagggagagcatatttaagaccagaattccctgcaaaaagggcctgtgttgatgtacaagaagaaagtaacatggaagccttggctgctgatttttttaacagaacagaacttggttataaagaaaaattgacctttactgaatccacacacgttgaaataaaaaacttctcgactgaaaagttgttacaacgaattacagagattctccctcaatatgtttctgcatttgcaaatactgatggaggatatttattcgttggtctaaatgaagataaagaagtaattggctttaaagcagagaagagttatcttactaagttagaagaagtaacaaaaaattccattgggaaactgcctgtgcatcacttctgtgtggagaaggggacgataaattacttatgcaaattccttggagtatatgataaaggaaggctttgtggatatgtgtatgcactcagagtggaacgcttctgctgtgcagtgtttgctaaaaagcctgattcctggcacgtgaaagataacagagttaagcagttgaccgagaaggaatggatccagttcatggtggattcagaaccagtatgtgaggaactgccctctccagcaagtacatcatcacctgtctcccagagttatcctcttcgtgaatatattaacttcaaaattcagccactgagatatcaccttccagggctatcagaaaagataacttgtgctccaaaaaccttctgcagaaatctgttctcacaacatgaaggacttaagcaattaatatgtgaagaaatgggctctgtcaataagggctcactgatcttctctaggagctggtctttggatctgggcttgcaagagaaccacaaagtcctctgtgatgctcttctgatttcccaggacaagcctccagtcctatacaccttccacatggtacaggatgaggagtttaaagactattctacacaaactgcccaaactttaaaacagaagctggcaaaaattggtggttacactaaaaaagtgtgtgtcatgacaaagatcttctacttgagccctgaaggcaagacaagctgccagtatgatttaaactcgcaagtaatttaccctgaatcctactattggacaacagctcaaacaatgaaagacttggaaaaggccctttcaaatatcttacctaaggagaatcaaatctttttgtttgtttgtttgtttcgtttttgtttgtttgtttgttggtttgtttgttttttcttgagatgagtctcactctgtcacc

SEQ ID NO: 317114 - DNA, 582 bp, Artificial Sequence
  derived and/or modified sequence
atgaatctcccggtgccagacccaattctcttgactaacagccacgatggcctggatggccctacatacaaaaaacgaagactggatgaatgcgaggaggcgttccaggggaccaaagtctttgtgatgcctaatgggatgctcaagtccaaccaacagctagtagatatcatcgagaaggtaaagcccgagatccggcttctcatcgagaagtgcaatactgtgaagatgtgggtccagctgctgattccccgaattgaggacggtaacaatttcggggtttctatccaggaggagacagttgcggaactcaggaccgtggagtctgaggccgcttcctatctagaccagatttctcggtattatataacccgcgccaaactggtgtcgaagatcgccaagtacccccacgtcgaggattaccgcaggaccgtcaccgagatcgacgaaaaggaatacatttctctgaggcttattatcagcgaactcaggaatcagtatgttactctccacgacatgattctcaagaacatcgagaaaattaagagaccgaggagcagtaacgctgagaccttgtattag

SEQ ID NO: 317115 - DNA, 582 bp, Artificial Sequence
  derived and/or modified sequence
atgaacctgcctgtgcctgaccccatcctgctgaccaacagccatgatggcctggatggccccacctacaagaagaggcggctggatgaatgtgaggaggccttccagggcaccaaggtgtttgtgatgcccaacggcatgctgaagagcaaccagcagctggtggacatcatcgagaaggtgaagccagagatccggctgctgattgagaagtgcaacacagtgaagatgtgggtgcagctgctgatccccagaattgaagatggcaacaactttggagtgtccatccaggaggagaccgtggccgagctgaggacagtggagagcgaggccgccagctacctggaccagatcagccgctactacatcacccgggccaagctggtgtccaagatcgccaagtacccccacgtggaggactacagaagaacagtgacagaaattgatgagaaggagtacatcagcctgcggctcatcatcagcgagctgaggaaccagtatgtgaccctgcatgacatgatcctgaagaacatcgagaagatcaagaggcccaggagcagcaatgctgagaccctgtactag

SEQ ID NO: 317116 - DNA, 582 bp, Artificial Sequence
  derived and/or modified sequence
atgaacctgcccgtgcccgaccccatcctgctgaccaacagccacgacggcctcgacggaccaacctataagaagcggagattggatgaatgcgaggaagcattccaggggaccaaggtattcgtgatgccaaatggaatgcttaaatcaaatcagcaacttgtggacatcattgaaaaagtcaagcccgaaatccggctgctcatagaaaaatgcaataccgtcaagatgtgggtgcaacttctcatccctaggatagaggatggcaacaattttggcgttagcattcaggaggagaccgtggctgagttgcgaacagttgaaagcgaagccgcgtcgtacctcgaccagatttcccggtactacattacaagggccaaactagtgtctaagattgccaaatacccacacgtggaggactatcgaagaaccgtgactgagatcgacgagaaagaatacatctcccttcggctaatcatcagcgaactgagaaatcaatacgtgacactccatgacatgattcttaagaatattgaaaagatcaaacgccccagatctagtaatgcagagacactgtactag

SEQ ID NO: 317117 - DNA, 582 bp, Artificial Sequence
  derived and/or modified sequence
atgaacttacctgtgcctgatccaatactcctaactaattcccatgatgggctcgatggtccaacatataagaaaaggagattggacgaatgcgaagaagcttttcaggggacaaaagtcttcgtgatgccaaatggaatgttgaaaagtaaccaacagctcgtggacattattgaaaaagtgaaaccagaaatccgtttactaatcgagaagtgtaacaccgtgaagatgtgggtgcagctcctgattccccgtatcgaagacgggaacaacttcggcgtgagtattcaggaggaaacagtggccgaattgcgcaccgtggagtctgaagctgcaagttacttggaccagatatccaggtactacatcacaagagctaagctagtctctaaaattgcgaagtatccccatgttgaggactatagaagaaccgttaccgagatcgatgaaaaggagtatatatctctgcggttgatcatttcggaacttaggaatcagtacgtcacactgcatgatatgatactgaaaaatatcgagaagataaagaggcctagatctagcaacgccgaaacactgtattag

SEQ ID NO: 317118 - DNA, 956 bp, Artificial Sequence
  derived and/or modified sequence
aagcaggcagcaggctgccggcgggcgggcggacggcacagagggagggagcgagcgagcagtgagtaagccagcaagggcggtcgggtcccgaggtcagccgagatttctcaggtccctccggccccctccctggagtccacagcgcctccggtgtccagaggatcggacacggcccggcccggccatggcctcgttgctgaaggtggatcaggaagtgaagctcaaggttgattctttcagggagcggatcacaagtgaggcagaagacttggtggcaaattttttcccaaagaagttattagaacttgatagttttctgaaggaaccaatcttaaacatccatgacctaactcagatccactctgacatgaatctcccagtccctgaccccattcttctcaccaatagccatgatggactggatggtcccacttataagaagcgaaggttggatgagtgtgaagaagccttccaaggtcaaaatgtgggtacagctcctgattcccaggatagaagatggaaacaactttggggtgtccattcaggaggaaacagttgcagagctaagaactgttgagagtgaagctgcatcttatctggaccagatttctagatattatattacaagagccaaattggtttctaaaatagctaaatatccccatgtggaggactatcgccgcaccgtgacagagattgatgagaaagaatatatcagccttcggctcatcatatcagagctgaggaatcaatatgtcactctacatgacatgatcctgaaaaatatcgagaagatcaaacggccccggagcagcaatgcagagactctgtactgaggccagggccagggccaggggactctgtgagtctggctcaagaccgacattgccttggtttgttacatgactatcgtgatggggaaactggctggaaatagtaatcacacctctctg

SEQ ID NO: 317119 - DNA, 582 bp, Artificial Sequence
  derived and/or modified sequence
atgaacctgcccgtgcccgaccccatcctgctgaccaacagccacgacggcctggacggccccacctacaagaagagaagactggacgagtgcgaggaggccttccagggcaccaaggtgttcgtgatgcccaacggcatgctgaagagcaaccagcagctggtggacatcatcgagaaggtgaagcccgagatcagactgctgatcgagaagtgcaacaccgtgaagatgtgggtgcagctgctgatccccagaatcgaggacggcaacaacttcggcgtgagcatccaggaggagaccgtggccgagctgagaaccgtggagagcgaggccgccagctacctggaccagatcagcagatactacatcaccagagccaagctggtgagcaagatcgccaagtacccccacgtggaggactacagaagaaccgtgaccgagatcgacgagaaggagtacatcagcctgagactgatcatcagcgagctgagaaaccagtacgtgaccctgcacgacatgatcctgaagaacatcgagaagatcaagagacccagaagcagcaacgccgagaccctgtactag

SEQ ID NO: 317120 - protein, 193 aa, Artificial Sequence
  derived and/or modified sequence
MEETIKDPPTSAVLLDHCHFSQVIFNSVEKFYIPGGDVTCHYTFTQHFIPRRKDWIGIFRVGWKTTREYYTFMWVTLPIDLNNKSAKQQEVQFKAYYLPKDDEYYQFCYVDEDGVVRGASIPFQFRPENEEDILVVTTQGEVEEIEQHNKELCKENQELKDSCISLQKQNSDMQAELQKKQEELETLQSINKK

SEQ ID NO: 317121 - DNA, 582 bp, Artificial Sequence
  derived and/or modified sequence
atggaggagaccatcaaggacccccccaccagcgccgtgctgctggaccactgccacttcagccaggtgatcttcaacagcgtggagaagttctacatccccggcggcgacgtgacctgccactacaccttcacccagcacttcatccccagaagaaaggactggatcggcatcttcagagtgggctggaagaccaccagagagtactacaccttcatgtgggtgaccctgcccatcgacctgaacaacaagagcgccaagcagcaggaggtgcagttcaaggcctactacctgcccaaggacgacgagtactaccagttctgctacgtggacgaggacggcgtggtgagaggcgccagcatccccttccagttcagacccgagaacgaggaggacatcctggtggtgaccacccagggcgaggtggaggagatcgagcagcacaacaaggagctgtgcaaggagaaccaggagctgaaggacagctgcatcagcctgcagaagcagaacagcgacatgcaggccgagctgcagaagaagcaggaggagctggagaccctgcagagcatcaacaagaagtag

SEQ ID NO: 317122 - DNA, 582 bp, Artificial Sequence
  derived and/or modified sequence
atggaggaaactatcaaagaccctcctacttccgcggtcctcttagatcattgccattttagccaagttatctttaactctgttgagaagttctacatccccggcggcgatgttacttgccactacacgtttacccagcatttcatccccagacggaaggattggatcgggatttttagggtgggctggaaaaccacccgcgaatactatacctttatgtgggtgacgctccccattgatttaaataataagagtgctaaacagcaggaggtgcaattcaaggcatattacttgcccaaagatgatgagtactatcagttctgctacgttgatgaggacggggttgtcagaggggcaagcattcctttccagtttcggcctgaaaatgaggaggatattctcgtggtgacaacgcagggggaagtggaggaaatcgagcagcacaacaaagagctctgcaaagagaaccaggaactaaaggactcctgcatatcactgcagaaacagaacagtgacatgcaggccgagttacaaaagaagcaggaagaactggagacactgcagagcataaacaagaagtag

SEQ ID NO: 317123 - DNA, 582 bp, Artificial Sequence
  derived and/or modified sequence
atggaggagaccatcaaggacccccccaccagcgctgtgctgctggaccactgccacttcagccaggtgatcttcaacagcgtggagaagttctacatccctggaggagatgtgacctgccactacaccttcacccagcacttcatccccaggaggaaggactggattggcatcttccgggtgggctggaagaccacccgggagtactacaccttcatgtgggtgaccctgcccatcgacctgaacaacaagagcgccaagcagcaggaggtgcagttcaaggcctactacctgcccaaggatgatgagtactaccagttctgctacgtggatgaagatggagtggtgcggggggccagcatccccttccagttccggccagaaaatgaggaggacatcctggtggtgaccacccagggcgaggtggaggagattgagcagcacaacaaggagctgtgcaaggagaaccaggagctgaaggacagctgcatcagcctgcagaagcagaacagcgacatgcaggccgagctgcagaagaagcaggaggagctggagaccctgcagagcatcaacaagaagtag

SEQ ID NO: 317124 - DNA, 582 bp, Artificial Sequence
  derived and/or modified sequence
atggaggagaccatcaaggacccccccaccagcgccgtgctgctggatcattgccactttagccaagtgatctttaattctgtcgagaagttctacattcctggtggagatgtaacctgtcattacaccttcacccaacacttcatacctcggcgtaaggactggatcggcatcttccgggtgggttggaaaaccactagagaatattacacctttatgtgggtgacccttccaatcgatttgaataacaagtctgccaagcaacaagaggttcagttcaaggcgtactacctgccgaaggacgacgaatactatcagttctgctatgtggacgaagacggggttgtacgcggagcctcgatcccctttcagttcagacccgagaatgaggaagacatcctcgtcgtgactactcagggcgaagttgaagagatcgaacaacacaacaaagaactgtgcaaggaaaaccaagagctcaaagattcgtgtattagcctacagaaacagaatagcgacatgcaggccgaacttcagaagaaacaagaggaacttgagacactccaaagtatcaacaaaaagtag

SEQ ID NO: 317125 - DNA, 582 bp, Artificial Sequence
  derived and/or modified sequence
atggaggagacaataaaagaccctcctacatccgccgttctcctggaccactgtcatttctctcaggtgattttcaattcagtggaaaaattttacatccccggtggggatgttacctgtcattataccttcacccagcacttcataccacggcgaaaggattggattgggatctttcgagtaggctggaagaccacccgagagtactacacattcatgtgggtgacactccccattgatctaaataacaaaagtgccaagcaacaggaggtgcaattcaaggcctactacttaccaaaggacgacgagtactaccagttttgctacgtggatgaagatggcgtggtccgcggagcgtctattccatttcagttccgcccagaaaacgaagaggacattctggtggttactacccagggagaagtggaagagatcgagcagcacaataaagagctgtgtaaagagaaccaagaactgaaggacagttgtatctccctgcagaagcagaattctgacatgcaggctgagcttcaaaagaaacaggaggaattggaaacactgcagtctattaacaaaaaatag

SEQ ID NO: 317126 - DNA, 724 bp, Artificial Sequence
  derived and/or modified sequence
taatctcagtatttgtcaggattttgcttttcctgacttgctttgcacagaatgttccctggatgaaagcccagaaatcaccaacatttcagacaatgctttctgagccttactctgttccacatttcataacaggacccctaccatggaggagaccatcaaagatccccccacatcagctgtcttgctggatcactgtcatttctctcaggtcatctttaacagtgtggagaagttctacatccctggaggggacgtcacatgtcattataccttcacccagcatttcatccctcgtcgaaaggattggattggcatctttagagtggggtggaagacaacccgtgagtattacaccttcatgtgggttactttgcccattgacctaaacaacaaatcagctaaacagcaggaagtccaattcaaagcttactacctgcccaaggatgatgagtattaccagttctgctatgtggatgaggatggtgtggtccggggagcaagtattcctttccaattccgtccagaaaatgaggaagacatcctggttgttaccactcagggagaggtggaagagattgagcagcacaacaaggagctttgcaaagaaaaccaggagctgaaggacagctgtatcagcctccagaagcagaactcagacatgcaggctgagctccaaaagaagcaggaggagctagaaaccctacagagcatcaataagaag

SEQ ID NO: 317127 - protein, 1140 aa, Artificial Sequence
  derived and/or modified sequence
MSVGQQTWALLCKNCLKKWRMKRQTLLEWLFSFLLVLFLYLFFSNLHQVHDTPQMSSMDLGRVDSFNDTNYVIAFAPESKTTQEIMNKVASAPFLKGRTIMGWPDEKSMDELDLNYSIDAVRVIFTDTFSYHLKFSWGHRIPMMKEHRDHSAHCQAVNEKMKCEGSEFWEKGFVAFQAAINAAIIEIATNHSVMEQLMSVTGVHMKILPFVAQGGVATDFFIFFCIISFSTFIYYVSVNVTQERQYITSLMTMMGLRESAFWLSWGLMYAGFILIMATLMALIVKSAQIVVLTGFVMVFTLFLLYGLSLITLAFLMSVLIKKPFLTGLVVFLLIVFWGILGFPALYTRLPAFLEWTLCLLSPFAFTVGMAQLIHLDYDVNSNAHLDSSQNPYLIIATLFMLVFDTLLYLVLTLYFDKILPAEYGHRCSPLFFLKSCFWFQHGRANHVVLENETDSDPTPNDCFEPVSPEFCGKEAIRIKNLKKEYAGKCERVEALKGVVFDIYEGQITALLGHSGAGKTTLLNILSGLSVPTSGSVTVYNHTLSRMADIENISKFTGFCPQSNVQFGFLTVKENLRLFAKIKGILPHEVEKEVQRVVQELEMENIQDILAQNLSGGQNRKLTFGIAILGDPQVLLLDEPTAGLDPLSRHRIWNLLKEGKSDRVILFSTQFIDEADILADRKVFISNGKLKCAGSSLFLKKKWGIGYHLSLHLNERCDPESITSLVKQHISDAKLTAQSEEKLVYILPLERTNKFPELYRDLDRCSNQGIEDYGVSITTLNEVFLKLEGKSTIDESDIGIWGQLQTDGAKDIGSLVELEQVLSSFHETRKTISGVALWRQQVCAIAKVRFLKLKKERKSLWTILLLFGISFIPQLLEHLFYESYQKSYPWELSPNTYFLSPGQQPQDPLTHLLVINKTGSTIDNFLHSLRRQNIAIEVDAFGTRNGTDDPSYNGAIIVSGDEKDHRFSIACNTKRLNCFPVLLDVISNGLLGIFNSSEHIQTDRSTFFEEHMDYEYGYRSNTFFWIPMAASFTPYIAMSSIGDYKKKAHSQLRISGLYPSAYWFGQALVDVSLYFLILLLMQIMDYIFSPEEIIFIIQNLLIQVVIFSIVATDLNEYGFLGLFWHHVNTSLHIDWLSIHFF

SEQ ID NO: 317128 - DNA, 3423 bp, Artificial Sequence
  derived and/or modified sequence
atgagcgtcgggcagcaaacgtgggctctgctgtgtaagaactgcttaaagaaatggcgaatgaagcggcagaccttgctagaatggctctttagtttcctgctggtgcttttcctgtatctgttcttttctaacctccatcaagtccacgacaccccgcagatgagctctatggacctcgggcgggtagactctttcaacgataccaactacgtgatagcgttcgccccagagagtaaaactacccaggaaatcatgaataaggtagctagcgctccatttctcaaggggaggaccattatgggctggccagatgagaagtctatggatgaactcgatctgaactacagcatagacgccgtcagagtcatttttactgatacattcagttatcatctcaaattcagctggggtcaccgcatccccatgatgaaggagcacagggaccactcagctcactgccaggcagttaacgaaaaaatgaagtgcgaaggttccgaattctgggagaaaggcttcgtcgctttccaagccgctatcaatgcagctatcattgaaattgcgacaaaccattccgtaatggaacagcttatgagtgttacaggtgtacacatgaagatacttccatttgtagcgcaggggggagttgcgaccgacttttttatattcttttgtataatctccttctcaactttcatttactacgtgtccgtgaatgtgactcaggaacgtcagtacataacaagcctgatgactatgatgggtctcagggaatccgcattttggctgtcttgggggctcatgtacgctgggtttatcctcatcatggcaacacttatggctctgattgtgaaatctgcacagattgttgttctcaccggcttcgtgatggtcttcactctctttcttttgtacggactcagcctaattacactggcctttctgatgtctgtcttgataaaaaaacccttcctgactgggttagtggtattccttctcatcgtcttctggggaatcctgggatttcctgctctgtacactaggctccccgcttttctagaatggacgctgtgtctcctctctccttttgcttttactgtgggcatggctcagctgatccatctggattacgatgtcaatagcaacgcacacttggattcttcacagaatccatatttaatcatcgccacactcttcatgctcgtgtttgacaccttgctgtacttagtcttaacgctgtactttgacaaaatcttgcccgccgagtatgggcaccggtgttctcccttattcttcctgaagtcttgtttttggtttcagcatggccgggccaatcacgtggtgctggagaacgagacagatagtgacccgacacctaatgactgctttgagccagtctcgccagagttctgtggtaaggaggccatccgcataaagaaccttaaaaaggaatatgctggaaaatgcgagcgggtggaggctctcaagggcgtggtgttcgacatctatgagggccagataacagctcttttaggccacagcggcgccggcaagactaccctgctgaatattctcagcgggctgtccgtaccgacatcaggatcggtgactgtgtacaaccacacactgtccagaatggcggatattgaaaacattagcaaatttacagggttctgccctcagagtaacgtgcagtttgggttccttaccgttaaagaaaatctgagactgtttgctaaaattaagggcatcctgccgcatgaagtggagaaagaagtgcagcgagttgttcaggagctggagatggaaaacatccaggacatacttgcacagaatttaagcggaggccagaacaggaaactgacctttgggattgctatccttggcgacccacaggtactcctcctcgacgaaccaacagccgggctggatcctctcagtcgacaccgcatatggaacctactcaaagaggggaagagtgaccgcgttatcctcttttctacacagttcatagacgaagcggacatactggcagaccgcaaggtgttcatcagcaacggtaagctaaaatgcgccgggagttcactatttctgaagaagaagtggggcattggttatcatctgagtttgcatctgaacgaaaggtgtgatcccgagtccataacctctctggttaaacagcatattagcgatgccaagcttaccgctcagtcagaagaaaagttggtctacatacttcccctggagagaacaaacaaattccctgagctttaccgagatttggatagatgctccaatcagggtatcgaggattacggagtatccatcaccactctgaacgaagtcttcctaaagctcgaaggcaaatccacaatcgatgaaagtgatattggaatctgggggcaattgcagacagacggcgccaaagacatcggatcactcgtggaattagagcaggtgcttagttcctttcatgagactagaaagaccattagcggcgtggccctttggcgccagcaggtgtgcgctatagccaaggtgcgctttctgaagctcaaaaaggagcgcaagtcactgtggaccatccttctgctgttcggaatcagctttattcctcagctactggagcacctcttttatgaatcataccagaaatcatacccttgggaactgtcacccaacacttactttctgtccccgggacagcagcctcaggaccctcttacccatctcttagtgataaacaagacgggatctacaatcgataatttcttacattcactccggagacagaatatagcgatcgaagttgatgcatttggaactagaaacggtacagatgatcccagctataatggagctatcatcgtctctggtgatgagaaagatcaccgattctctatagcctgcaacacgaaaagactaaattgctttccggtcctgctggatgtaatttctaatgggctcttaggcatcttcaattcctctgaacacatccagaccgaccgcagcacattttttgaggagcacatggactacgaatacggctacaggtctaacaccttcttctggatcccaatggcagccagttttacgccctacattgctatgagctccatcggagattataagaaaaaggctcactcccagctgcgcatttcaggcctgtacccgagtgcctactggttcgggcaggcgctcgtcgacgtctcactctactttctgatccttctgttgatgcagattatggactacattttctcccccgaggaaattatttttataatccagaatctgctgattcaggtcgttatcttttcaattgttgctaccgacttaaatgaatatggattcctgggtctgttctggcatcacgtaaatacgagccttcacatcgattggttatctatacattttttttag

SEQ ID NO: 317129 - DNA, 3423 bp, Artificial Sequence
  derived and/or modified sequence
atgtctgtgggccagcagacctgggccctgctgtgcaagaactgcctgaagaagtggaggatgaagaggcagaccctgctggagtggctgttctccttcctgctggtgctcttcctgtacctgttcttcagcaacctgcaccaggtgcatgacaccccccagatgagctccatggacctgggccgggtggacagcttcaatgacaccaactacgtgattgcctttgcccctgagagcaagaccacccaggagatcatgaacaaggtggccagcgcccccttcctgaagggccgcaccatcatgggctggccagatgagaagtccatggatgagctggacctgaactacagcattgatgctgtgcgggtcatcttcacagacaccttctcctaccacctgaagttctcctggggccaccgcatccccatgatgaaggagcaccgggaccacagcgcccactgccaggccgtgaatgagaagatgaagtgtgagggcagcgagttctgggagaagggctttgtggccttccaggccgccatcaatgctgccatcattgaaattgccaccaaccacagcgtgatggagcagctgatgtctgtgactggagtgcacatgaagatcctgccctttgtggcccagggcggcgtggccacagacttcttcatcttcttctgcatcatctccttcagcaccttcatctactacgtgtctgtgaatgtgacccaggagcggcagtacatcaccagcctgatgaccatgatgggcctgcgggagagcgccttctggctgtcctggggcctgatgtatgccggcttcatcctgatcatggccaccctgatggccctgattgtgaagagcgcccagatcgtggtgctgactggatttgtgatggtgttcaccctcttcctgctgtatggcctgagcctcatcaccctggccttcctgatgtctgtgctgatcaagaagcccttcctgaccggcctggtggtgttcctgctgattgtgttctggggcatcctgggcttccctgccctgtacacccggctgcctgccttcctggagtggaccctgtgcctgctgagcccctttgccttcaccgtgggcatggcccagctgatccacctggactatgatgtgaacagcaatgcccacctggacagcagccagaacccctacctgatcatcgccaccctcttcatgctggtgtttgacaccctgctgtacctggtgctgaccctgtactttgacaagatcctgcctgcagaatatggccaccgctgcagccccctcttcttcctgaagagctgcttctggttccagcacggccgggccaaccacgtggtgctggagaatgaaacagacagcgaccccaccccaaatgactgctttgagcctgtgtccccagagttctgtgggaaggaggccatccgcatcaagaacctgaagaaggagtatgctggaaaatgtgagcgggtggaggccctgaagggcgtggtgtttgacatctatgagggccagatcacagccctgctgggccacagcggggccggcaagaccaccctgctgaacatcctgagcggcctgtctgtgcccaccagcggctctgtgacagtgtacaaccacaccctgagcaggatggctgacatcgagaacatcagcaagttcaccggcttctgcccccagagcaatgtgcagtttggcttcctgactgtgaaggagaacctgcggctgtttgccaagatcaagggcatcctgccccatgaggtggagaaggaggtgcagagggtggtgcaggagctggagatggagaacatccaggacatcctggcccagaacctgagcggcggccagaacaggaagctgacctttggaattgccatcctgggggacccccaggtgctgctgctggatgagcccacagctggcctggaccccctgagccgccaccgcatctggaacctgctgaaggagggcaagagtgacagagtcatcctcttcagcacccagttcattgatgaggccgacatcctggccgacaggaaggtgttcatcagcaatggcaagctgaagtgtgccggcagcagcctcttcctgaagaagaagtggggcatcggctaccacctgagcctgcacctgaatgaaagatgtgaccctgagagcatcaccagcctggtgaagcagcacatcagtgatgccaagctgacagcccagagcgaggagaagctggtgtacatcctgcccctggagaggaccaacaagtttcctgagctgtacagagacctggaccgctgcagcaaccagggcatcgaggactatggagtgtccatcaccaccctgaatgaggtgttcctgaagctggagggcaagagcaccattgatgaaagtgacatcggcatctggggccagctgcagacagatggagccaaggacatcggcagcctggtggagctggagcaggtgctgagcagcttccacgagaccaggaagaccatcagcggcgtggccctgtggaggcagcaggtgtgtgccatcgccaaggtgcgcttcctgaagctgaagaaggagaggaagagcctgtggaccatcctgctgctgtttggcatctccttcatcccccagctgctggagcacctgttctatgagagctaccagaagagctacccctgggagctgagccccaacacctacttcctgagccctggccagcagccccaggaccccctgacccacctgctggtgatcaacaagacaggcagcaccatcgacaacttcctgcacagcctgcggcggcagaacatcgccatcgaggtggatgccttcggcaccagaaatggaacagatgaccccagctacaacggggccatcatcgtgtctggagatgagaaggaccaccgcttcagcatcgcctgcaacaccaagaggctgaactgcttccctgtgctgctggatgtgatcagcaatggcctgctgggcatcttcaacagcagcgagcacatccagacagacaggagcaccttctttgaggagcacatggactatgaatatggctaccgcagcaacaccttcttctggatccccatggccgccagcttcaccccctacatcgccatgagcagcatcggggactacaagaagaaggcccacagccagctgcgcatcagcggcctgtaccccagcgcctactggtttggccaggccctggtggatgtgtccctgtacttcctgatcctgctgctgatgcagatcatggactacatcttcagccctgaggagatcatcttcatcatccagaacctgctgatccaggtggtgatcttcagcatcgtggccacagacctgaatgaatatggcttcctgggcctcttctggcaccacgtgaacaccagcctgcacatcgactggctgagcatccacttcttctag

SEQ ID NO: 317130 - DNA, 3423 bp, Artificial Sequence
  derived and/or modified sequence
atgagcgtgggccagcagacctgggccctgctgtgcaagaactgcctaaaaaaatggcgaatgaagcggcagacactgctagaatggcttttttcttttcttctcgtgctcttcctgtatcttttcttctccaacctccaccaagtgcacgatacgcctcagatgtcgtctatggatttggggagggtcgatagcttcaacgacaccaactacgtcatagcctttgcccccgagtcaaaaactacgcaggaaattatgaacaaggtggctagcgcaccgtttcttaagggtcgaaccataatgggatggccagatgaaaagagcatggatgagctggatctcaactattcaatcgacgccgttcgagtcatttttaccgatacattctcctatcacttgaagttctcgtggggtcacagaatccccatgatgaaagagcaccgagatcactcagctcactgccaggccgtcaacgagaagatgaagtgtgaagggtcagaattctgggaaaaggggtttgtggcattccaggccgcaattaatgcggccatcatcgagattgccactaaccattccgttatggagcagctaatgtcagtgaccggggtccacatgaaaatcctgccatttgtggctcagggcggggtggccaccgacttcttcatcttcttttgcatcatcagcttttctacatttatttactatgtgtcagtcaatgttacgcaagaacgacagtacatcacttcactaatgaccatgatggggctgagggagagcgccttctggctttcttggggtctgatgtacgccgggtttatcctgatcatggcaacattgatggcgctgattgttaagagcgctcagattgtcgtccttacaggatttgtaatggtgttcaccctatttctactttatggactgtcactgataacactggcttttctcatgagcgtgctgatcaaaaagccattcctgactggcctggtggtcttcctcctgatcgttttttggggcattttagggttccccgccctgtatacaagactgcccgctttcctcgaatggacactctgcctcctgtccccttttgcatttactgtgggcatggcacagttgatacatttagactatgatgtgaacagcaacgcacacttggactccagccaaaacccatacctgattattgccaccttgtttatgcttgtgtttgacacactactttaccttgtgctcacactctattttgacaaaattttgccagccgagtatgggcacaggtgctcccctctcttcttcctgaaatcttgtttttggttccagcatggaagagcaaaccatgtcgtactggagaatgaaactgacagtgatccaactccgaatgattgttttgagcccgtgtcaccagaattctgcggtaaggaagcgatcaggatcaaaaacctcaaaaaagaatatgccggcaagtgtgagagggtggaggctttaaagggtgtagtattcgatatatacgaaggtcagatcaccgctttgcttggccattctggtgctggaaagactacactcttgaacatactatcaggtctgagcgtccccacatccggtagtgtcaccgtgtacaatcatacattgtcccgaatggccgatatcgaaaatattagtaaatttaccgggttttgtccacagtccaacgttcagtttgggttcctcactgtgaaggaaaacttacgccttttcgctaagattaaaggaatcctgccccatgaggtcgagaaagaggtgcagagagtagttcaggagctagagatggaaaacattcaggacatcctagcacagaacctgagcggcggccaaaatcggaagctgacttttggcatcgcaatcctgggggaccctcaagtgcttctactcgatgagccaaccgctggcttggaccctctaagccgacacagaatctggaatcttctgaaggagggtaagtccgacagagtgatactgttctccacgcaatttatcgatgaggcagatatcctggccgatcggaaggtttttatttccaatggcaagctcaagtgcgccggctcatccctatttctgaagaagaaatgggggattgggtaccacttatccttgcacctcaatgaacgttgcgacccggagagcattacctccttagtaaagcaacacatctcagatgctaagcttacagcccagtccgaggagaagctggtgtacatcctgccgcttgaacgtacaaacaaatttccagagctgtacagggatctggacagatgctccaaccagggcattgaggactacggtgtgtcgatcactactctgaatgaggtgtttctcaaactggaggggaagtcaactatcgacgagtcagacattggcatttggggtcagctgcaaacagatggcgccaaggacataggttctcttgtggagctggagcaggtcctgtccagctttcatgaaacccgcaagaccataagtggcgtggctttgtggcgtcagcaggtctgcgcaattgccaaagtcaggttcttaaagctgaagaaagaaaggaaatccctgtggacgattctgctgctgttcggaattagctttatccctcagctgctagaacacctgttctacgaatcgtaccagaaatcatacccctgggagctcagtccgaatacctacttcctgtctccaggtcaacagccacaggatcctctgacacatcttctcgtgatcaataagaccggatcaactattgacaattttctccattcattaagacgacaaaatattgccattgaggtggacgccttcggaacccgaaatggcactgacgatcctagctataatggtgcaatcattgtctctggagatgaaaaggatcaccgcttctccatcgcatgcaatactaaacgcctgaattgcttcccggtgttgttggacgttatctcaaacggactgctagggattttcaatagcagcgagcatatccagacagacagaagcacattcttcgaagagcacatggattacgaatatggatatcgctccaatacttttttttggattccgatggcggcgtcctttaccccatacattgcgatgagtagtatcggcgattacaagaagaaggctcatagccaattgcgtatcagtggcctgtatccatccgcctattggttcggccaggccctggtcgatgtctctctttattttcttatcctcctgttgatgcagattatggattatatcttctccccggaagaaattatattcattatccagaatctgctaatccaggtggtcatcttctccatagttgccaccgacttgaatgagtatggattcttaggcctgttctggcatcacgtgaataccagcttgcatattgactggctcagcatccattttttttag

SEQ ID NO: 317131 - DNA, 3423 bp, Artificial Sequence
  derived and/or modified sequence
atgagtgtgggacagcagacctgggcactgctctgcaagaactgtctgaagaagtggcgcatgaaacgacaaaccctgctggaatggctgttttcttttttactggtgcttttcctgtatctattctttagcaacctccaccaggttcacgataccccacagatgagctctatggaccttggacgtgtcgactcatttaacgatacgaattatgtaatcgctttcgcccctgagtctaaaaccacgcaggagattatgaataaagtagccagcgccccatttctcaaagggagaacgataatgggatggcccgacgaaaaatcaatggacgagttggatctcaattactccatcgatgcggtgcgagtaatctttacagacaccttctcctatcacctcaagtttagctggggccaccgaatcccaatgatgaaggagcaccgcgaccattctgctcattgtcaggccgtcaacgagaagatgaaatgcgagggaagcgagttttgggaaaaggggttcgtcgcgttccaggcagcaattaacgcagcaataatcgaaatcgccacaaaccactccgtgatggaacagctgatgtctgtgaccggcgtacacatgaaaattttgccttttgtggctcagggtggggttgcgactgacttcttcatcttcttctgcattattagcttttccaccttcatctactacgtcagcgttaatgtgacccaggagcgtcagtatattacctctctgatgaccatgatggggctaagagaatccgccttttggctgtcctgggggctcatgtatgccggattcatcctcataatggccactttgatggccctgattgtaaaaagtgcccaaattgtggtgctgacaggttttgtgatggtgttcacactgtttctgctgtacggtctgagcctcatcaccttagcatttctgatgagtgtgttaatcaaaaaacccttcctgacaggtctggtagtgttcctactcattgtgttctggggcatcctcggctttccagccctgtacactcgactgccggcttttctagagtggaccctttgcctgttgtcaccgttcgcgttcaccgtgggcatggcacagctcattcacctcgattacgatgttaattcaaatgcccacctagactcaagccagaacccctacctgatcatagcgactttgtttatgttggttttcgatactttgctgtacctggttctaaccctctatttcgataaaattcttccggctgagtacgggcaccgctgcagtcctttgttttttctgaagagctgtttctggttccagcacgggagggccaatcacgtagtcttagaaaacgaaacggacagtgatccgacacctaatgactgcttcgagcccgtgagtccagagttttgcggcaaggaggccattcgcattaagaacctcaagaaggagtacgctggtaagtgtgaacgggtggaggctctgaagggcgtggtcttcgacatctatgaagggcaaatcactgccctgctcggccatagcggcgctggtaagaccaccctgctgaacatcctgtccggactttcagtaccaactagcggttccgtcactgtgtataaccatactctgtccagaatggccgatatagagaatatatctaaattcacggggttttgcccccaaagtaacgtccaatttggctttctaacagttaaggaaaatttaagattatttgccaaaatcaaggggatccttcctcacgaggtggaaaaagaggtgcagcgtgttgtacaggaactggaaatggagaacatccaggatatcctggcccagaacctgtccggaggccagaatcggaagctaacctttgggattgctatcctgggagatccccaggtgctgcttttggatgaacctaccgctggcctagacccactttcacgccatcgtatatggaatctgttgaaggaaggaaagagtgatcgcgtaattctgttcagtacacagttcattgacgaggccgacatactagcagacagaaaggtgtttattagtaacgggaagttgaagtgtgccggttcatctttgtttttaaagaagaaatggggcatcggctaccatctttcccttcacctgaacgaacgctgcgatcccgagtctatcacgtcactcgttaaacagcacattagcgatgctaagctgacagcgcagagcgaggaaaagctggtttatatcctgcctctggagcggaccaataagttccctgaactctaccgcgatctagaccgctgttccaatcagggaattgaagattatggagtctctattaccacccttaatgaggtattcctgaagctggagggcaagagcacaattgacgagtctgacatagggatctggggccagttgcagacagatggtgccaaagatattggtagccttgtcgagctcgagcaagtgttaagctccttccatgaaacccggaagaccattagtggagtggcactgtggcggcaacaggtgtgcgccatcgccaaagtgcgtttccttaaactgaaaaaagaacgtaaatctctttggactatcttgttactcttcgggataagtttcatcccacaacttcttgagcatctgttttacgagtcgtatcagaaatcctatccttgggagctgagccccaatacgtactttctatcacccggtcagcagccacaagatcctttgactcatctgctcgttatcaacaagaccggatctaccatcgacaacttcctccacagcctgcggcgacagaatattgccattgaggtagacgctttcggcactcgcaatggaacagacgatccgtcatataatggagccattatcgtctcaggcgacgagaaggatcacagattttctatcgcttgtaatactaagagactgaactgcttccccgtcctccttgacgttatctctaacgggttattaggcatatttaacagttcggagcacatccagacagacaggagcaccttcttcgaggaacatatggattacgagtacgggtacaggagtaacaccttcttttggatccccatggcagcctcctttacaccctatattgcgatgtcatctatcggcgattataagaagaaggctcactctcagctgcgtatttccgggttgtacccgagtgcttattggttcggtcaagccttagttgatgttagtctgtacttcctgatcctgcttttgatgcagatcatggattacatcttttctcctgaggagatcatcttcatcattcaaaacctcctcattcaggtggtcatcttctctatagtagctactgacctgaatgaatacgggttcctcgggctcttctggcaccacgtgaatacctctctgcatattgactggttgagcatccattttttctag

SEQ ID NO: 317132 - DNA, 3581 bp, Artificial Sequence
  derived and/or modified sequence
attcacaatgaatgtgaaattaaaagcatgatgtagtagtgacccaaaaggaatgtgaattctcctccagaacatgcagagacccatggatgaactgtgtttctagatttttcctccagctttcctgagagaaacaggtcaaaatgagcaagagacgcatgagcgtgggtcagcaaacatgggctcttctctgcaagaactgtctcaaaaaatggagaatgaaaagacagaccttgttggaatggctcttttcatttcttctggtactgtttctgtacctatttttctccaatttacatcaagttcatgacactcctcaaatgtcttcaatggatctgggacgtgtagatagttttaatgatactaattatgttattgcatttgcacctgaatccaaaactacccaagagataatgaacaaagtggcttcagccccattcctaaaaggaagaacaatcatggggtggcctgatgaaaaaagcatggatgaattggatttgaactattcaatagacgcagtgagagtcatctttactgataccttctcctaccatttgaagttttcttggggacatagaatccccatgatgaaagagcacagagaccattcagctcactgtcaagcagtgaatgaaaaaatgaagtgtgaaggttcagagttctgggagaaaggctttgtagcttttcaagctgccattaatgctgctatcatagaaatcgcaacaaatcattcagtgatggaacagctgatgtcagttactggtgtacatatgaagatattaccttttgttgcccaaggaggagttgcaactgattttttcattttcttttgcattatttctttttctacatttatatactatgtatcagtcaatgttacacaagaaagacaatacattacgtcattgatgacaatgatgggactccgagagtcagcattctggctttcctggggtttgatgtatgctggcttcatccttatcatggccactttaatggctcttattgtaaaatctgcacaaattgtcgtcctgactggttttgtgatggtcttcaccctctttctcctctatggcctgtctttgataactttagctttcctgatgagtgtgttgataaagaaacctttccttacgggcttggttgtgtttctccttattgtcttttgggggatcctgggattcccagcattgtatacacgtcttcctgcatttttggaatggactttgtgtcttcttagcccctttgccttcactgttgggatggcccagcttatacatttggactatgatgtgaattctaatgcccacttggattcttcacaaaatccatacctcataatagctactcttttcatgttggtttttgacacccttctgtatttggtattgacattatattttgacaaaattttgcccgctgaatatggacatcgatgttctcccttgtttttcctgaaatcctgtttttggtttcaacacggaagggctaatcatgtggtccttgagaatgaaacagattctgatcctacacctaatgactgttttgaaccagtgtctccagaattctgtgggaaagaagccatcagaatcaaaaatcttaaaaaagaatatgcagggaagtgtgagagagtagaagctttgaaaggtgtggtgtttgacatatatgaaggccagatcactgccctccttggtcacagtggagctggaaaaactaccctgttaaacatacttagtgggttgtcagttccaacatcaggttcagtcactgtctataatcacacactttcaagaatggctgatatagaaaatatcagcaagttcactggattttgtccacaatccaatgtgcaatttggatttctcactgtgaaagaaaacctcaggctgtttgctaaaataaaagggattttgccacatgaagtggagaaagaggtacaacgagttgtacaggaattagaaatggaaaatattcaagacatccttgctcaaaacttaagtggtggacaaaataggaaactaacttttgggattgccattttaggagatcctcaagttttgctattggatgaaccgactgctggattggatcctctttcaaggcaccgaatatggaatctcctgaaagaggggaaatcagacagagtaattctcttcagcacccagtttatagatgaggctgacattctggcggacaggaaggtgttcatatccaatgggaagctgaagtgtgcaggctcttctctgttccttaagaagaaatggggcataggctaccatttaagtttgcatctgaatgaaaggtgtgatccagagagtataacatcactggttaagcagcacatctctgatgccaaattgacagcacaaagtgaagaaaaacttgtatatattttgcctttggaaaggacaaacaaatttccagaactttacagggatcttgatagatgttctaaccaaggcattgaggattatggtgtttccataacaactttgaatgaggtgtttctgaaattagaaggaaaatcaactattgatgaatcagatattggaatttggggacaattacaaactgatggggcaaaagatataggaagccttgttgagctggaacaagttttgtcttccttccacgaaacaaggaaaacaatcagtggcgtggcgctctggaggcagcaggtctgtgcaatagcaaaagttcgcttcctaaagttaaagaaagaaagaaaaagcctgtggactatattattgctttttggtattagctttatccctcaacttttggaacatctattctacgagtcatatcagaaaagttacccgtgggaactgtctccaaatacatacttcctctcaccaggacaacaaccacaggatcctctgacccatttactggtcatcaataagacagggtcaaccattgataactttttacattcactgaggcgacagaacatagctatagaagtggatgcctttggaactagaaatggcacagatgacccatcttacaatggtgctatcattgtgtcaggtgatgaaaaggatcacagattttcaatagcatgtaatacaaaacggctgaattgctttcctgtcctcctggatgtcattagcaatggactacttggaatttttaattcgtcagaacacattcagactgacagaagcacattttttgaagagcatatggattatgagtatgggtaccgaagtaacaccttcttctggataccgatggcagcctctttcactccatacattgcaatgagcagcattggtgactacaaaaaaaaagctcattcccagctacggatttcaggcctctacccttctgcatactggtttggccaagcactggtggatgtttccctgtactttttgatcctcctgctaatgcaaataatggattatatttttagcccagaggagattatatttataattcaaaacctgttaattcaagtggtcatcttctcgatagttgctactgatctaaatgaatatggatttctagggctattttggcaccatgttaatacctcccttcacattgattggctctctattcattttttctga

SEQ ID NO: 317133 - DNA, 3423 bp, Artificial Sequence
  derived and/or modified sequence
atgagcgtgggccagcagacctgggccctgctgtgcaagaactgcctgaagaagtggagaatgaagagacagaccctgctggagtggctgttcagcttcctgctggtgctgttcctgtacctgttcttcagcaacctgcaccaggtgcacgacaccccccagatgagcagcatggacctgggcagagtggacagcttcaacgacaccaactacgtgatcgccttcgcccccgagagcaagaccacccaggagatcatgaacaaggtggccagcgcccccttcctgaagggcagaaccatcatgggctggcccgacgagaagagcatggacgagctggacctgaactacagcatcgacgccgtgagagtgatcttcaccgacaccttcagctaccacctgaagttcagctggggccacagaatccccatgatgaaggagcacagagaccacagcgcccactgccaggccgtgaacgagaagatgaagtgcgagggcagcgagttctgggagaagggcttcgtggccttccaggccgccatcaacgccgccatcatcgagatcgccaccaaccacagcgtgatggagcagctgatgagcgtgaccggcgtgcacatgaagatcctgcccttcgtggcccagggcggcgtggccaccgacttcttcatcttcttctgcatcatcagcttcagcaccttcatctactacgtgagcgtgaacgtgacccaggagagacagtacatcaccagcctgatgaccatgatgggcctgagagagagcgccttctggctgagctggggcctgatgtacgccggcttcatcctgatcatggccaccctgatggccctgatcgtgaagagcgcccagatcgtggtgctgaccggcttcgtgatggtgttcaccctgttcctgctgtacggcctgagcctgatcaccctggccttcctgatgagcgtgctgatcaagaagcccttcctgaccggcctggtggtgttcctgctgatcgtgttctggggcatcctgggcttccccgccctgtacaccagactgcccgccttcctggagtggaccctgtgcctgctgagccccttcgccttcaccgtgggcatggcccagctgatccacctggactacgacgtgaacagcaacgcccacctggacagcagccagaacccctacctgatcatcgccaccctgttcatgctggtgttcgacaccctgctgtacctggtgctgaccctgtacttcgacaagatcctgcccgccgagtacggccacagatgcagccccctgttcttcctgaagagctgcttctggttccagcacggcagagccaaccacgtggtgctggagaacgagaccgacagcgaccccacccccaacgactgcttcgagcccgtgagccccgagttctgcggcaaggaggccatcagaatcaagaacctgaagaaggagtacgccggcaagtgcgagagagtggaggccctgaagggcgtggtgttcgacatctacgagggccagatcaccgccctgctgggccacagcggcgccggcaagaccaccctgctgaacatcctgagcggcctgagcgtgcccaccagcggcagcgtgaccgtgtacaaccacaccctgagcagaatggccgacatcgagaacatcagcaagttcaccggcttctgcccccagagcaacgtgcagttcggcttcctgaccgtgaaggagaacctgagactgttcgccaagatcaagggcatcctgccccacgaggtggagaaggaggtgcagagagtggtgcaggagctggagatggagaacatccaggacatcctggcccagaacctgagcggcggccagaacagaaagctgaccttcggcatcgccatcctgggcgacccccaggtgctgctgctggacgagcccaccgccggcctggaccccctgagcagacacagaatctggaacctgctgaaggagggcaagagcgacagagtgatcctgttcagcacccagttcatcgacgaggccgacatcctggccgacagaaaggtgttcatcagcaacggcaagctgaagtgcgccggcagcagcctgttcctgaagaagaagtggggcatcggctaccacctgagcctgcacctgaacgagagatgcgaccccgagagcatcaccagcctggtgaagcagcacatcagcgacgccaagctgaccgcccagagcgaggagaagctggtgtacatcctgcccctggagagaaccaacaagttccccgagctgtacagagacctggacagatgcagcaaccagggcatcgaggactacggcgtgagcatcaccaccctgaacgaggtgttcctgaagctggagggcaagagcaccatcgacgagagcgacatcggcatctggggccagctgcagaccgacggcgccaaggacatcggcagcctggtggagctggagcaggtgctgagcagcttccacgagaccagaaagaccatcagcggcgtggccctgtggagacagcaggtgtgcgccatcgccaaggtgagattcctgaagctgaagaaggagagaaagagcctgtggaccatcctgctgctgttcggcatcagcttcatcccccagctgctggagcacctgttctacgagagctaccagaagagctacccctgggagctgagccccaacacctacttcctgagccccggccagcagccccaggaccccctgacccacctgctggtgatcaacaagaccggcagcaccatcgacaacttcctgcacagcctgagaagacagaacatcgccatcgaggtggacgccttcggcaccagaaacggcaccgacgaccccagctacaacggcgccatcatcgtgagcggcgacgagaaggaccacagattcagcatcgcctgcaacaccaagagactgaactgcttccccgtgctgctggacgtgatcagcaacggcctgctgggcatcttcaacagcagcgagcacatccagaccgacagaagcaccttcttcgaggagcacatggactacgagtacggctacagaagcaacaccttcttctggatccccatggccgccagcttcaccccctacatcgccatgagcagcatcggcgactacaagaagaaggcccacagccagctgagaatcagcggcctgtaccccagcgcctactggttcggccaggccctggtggacgtgagcctgtacttcctgatcctgctgctgatgcagatcatggactacatcttcagccccgaggagatcatcttcatcatccagaacctgctgatccaggtggtgatcttcagcatcgtggccaccgacctgaacgagtacggcttcctgggcctgttctggcaccacgtgaacaccagcctgcacatcgactggctgagcatccacttcttctag

SEQ ID NO: 317134 - DNA, 3996 bp, Artificial Sequence
  derived and/or modified sequence
actgggcggcccttagacccaggctgcctgctgtctctggcaggaactcaagtcgctggtcatcctcagagcggtgttggcccggggccttcagtggcctttgtgtctgggtgagaggaaccctggatggccactctgccctgagtgtgtgggtccccagaagtgctgggttagggggcacggagggccagaaagtcccctttggagcgctggactctctcgctgactcctaccccaccccggcctggggtttcagagaaggggtccaggcaggagtgtcatcttttctcaatggggatgtggcttcagtctctgtccaggaggcacgcggacctccagtggccggctccggaggcttggtgactccagtggcccagccttgaaaagatcttttgaggtcgaggaggtcgagacacccaactccaccccaccccggagggtccagactcccctactccgagccactgtggccagctccacccagaaattccaggacctgggcgtgaagaactcagaaccctcggcccgccatgtggactccctaagccaacgctcccccaaggcgtccctgcggagggtggagctctcgggccccaaggcggccgagccggtgtcccggcgcactgagctgtccattgacatctcgtccaagcaggtggagaacgccggggccatcggcccgtcccggttcgggctcaagagggccgaggtgttgggccacaagacgccagaaccggcccctcggaggacggagatcaccatcgtcaaaccccaggagtcagcccaccggaggatggagccccctgcctccaaggtccccgaggtgcccactgcccctgccaccgacgcagcccccaagagggtggagatccagatgcccaagcctgctgaggcgcccaccgcccccagcccagcccagaccttggagaattcagagcctgcccctgtgtctcagctgcagagcaggctggagcccaagccccagccccctgtggctgaggctacaccccggagccaggaggccactgaggcggctcccagctgcgttggcgacatggccgacacccccagagatgccgggctcaagcaggcgcctgcatcacggaacgagaaggccccggtggacttcggctacgtggggattgactccatcctggagcagatgcgccggaaggccatgaagcagggcttcgagttcaacatcatggtggtcgggcagagcggcttgggtaaatccaccttaatcaacaccctcttcaaatccaaaatcagccggaagtcggtgcagcccacctcagaggagcgcatccccaagaccatcgagatcaagtccatcacgcacgatattgaggagaaaggcgtccggatgaagctgacagtgattgacacaccagggttcggggaccacatcaacaacgagaactgctggcagcccatcatgaagttcatcaatgaccagtacgagaaatacctgcaggaggaggtcaacatcaaccgcaagaagcgcatcccggacacccgcgtccactgctgcctctacttcatccccgccaccggccactccctcaggcccctggacatcgagtttatgaaacgcctgagcaaggtggtcaacatcgtccctgtcatcgccaaggcggacacactcaccctggaggagagggtccacttcaaacagcggatcaccgcagacctgctgtccaacggcatcgacgtgtacccccagaaggaatttgatgaggactcggaggaccggctggtgaacgagaagttccgggagatgatcccatttgctgtggtgggcagtgaccacgagtaccaggtcaacggcaagaggatccttgggaggaagaccaagtggggtaccatcgaagttgaaaacaccacacactgtgagtttgcctacctgcgggaccttctcatcaggacgcacatgcagaacatcaaggacatcaccagcagcatccacttcgaggcgtaccgtgtgaagcgcctcaacgagggcagcagcgccatggccaacggcatggaggagaaggagccagaagccccggagatgtagacgccaccctgcccacccccgggatcctgcccccaagtcatttccgtccccccccaggccctcccaccaccccattttattttatatgattttctccatttgtcatcgttccccaccccttcgacatgctgccaggaaacaagggaaggggcctccctccgagtgagtcagtgatgaggccgcggcctccccgaggttgtggggaggctgcactggagccacaggcaggggtgagagcacccactgaattgacatgaccctctgtccccaggcctggctccccgagggctcagaagagcagcttcggtgtgcagatcatccgtctgtgtggggttctcagtgccggaggccttggggtgggggccaggcctcgcacttgcagaggagcccagtgggctgcacgctcccctccatccccatcggccctgtcccctggagtgtgtcagagcccaggggagaatgcagcccaccaggagcacctggaccccctgcccgccacatggtgtggccatcactcagcccctacccctgccctgctcctaagggtagaaaactccagggtcccctgccaccgactgcccagccactccaagccccctggcagctgcccctcctggagcagaaagtgcctttatctcagccatccgcagactgcttggccagatgcggggacaggctggaatgagggaggcgtcttcatctccctgccatccccctctcacgccacccccgcccccaccgggctgcaggtgctgctgatgcgctgggatctgattgaggataaaaaggaaggagagatgacccctaccccctcatcccccagttttgaaaaggtctaagcaagtgagtctggtggaggagctgagggagggagccatggaaggtgccagaaggaaggttggcgggggcacgtgtgggccgtggcttgggctggtcagagtggcgtgagctgcccggcgcctgccctgcccaagtgaccagggaagtgtgtgtgtgtccatgtgtatgcgtgtccgtctgtctgtctagtgtctgggtttggcccaagactgggctgtagttacattaatgcccagccagccacccctgccactcacccttcctggcccaggccttgctgactctctgagctggggaggtgggaggccaggcgagcctgactctgttgatctacccgtgcctgggcccctcccctcagagcccatggtaacgaacccctagaaaggagagaacgggcgtcaggggtgcacagtccacagctgaagagcaaggtttcgtggcagcacggcccggcccctcaccctctgtccccacgaggggacccatgggggctgtctttgcagggcacagatgaccaaagtcccttcctgcttcctgttacctgtcttgctcctggggagaaagaggggcctgatgagactccactcaggtgcacacatcaccaggtgcatctgcaggcaccgggctggctgcttgcagccaggagaaggtcagcgagaaggagtgtatgagtgtgagtgtgtgtgcatggaagttggggcactgggcgtctgactccctccccacccaagagaggaaggacccctcaccacccccactggtgagacagtttactttgccaacttgccatgtttttgccaaaaccaagattttgaaggaaatgagtggccagcgccagggcccaggccatgtggcctgcccagcctcaatgtcacttggtggcggggtggggtgggggtgggcagcagcatcccagccttgagatgcttcactttccttctctgtaaccagactttgaaaaattgttcgtttcatcaggctctgttcctcaatggccttttgctacgtgcctcccgagaaatttgtctttttgtataaatgacaaagtgttgaaaatgtatttcctgaaataaatgtttcaaatgcagaaaccc

SEQ ID NO: 317135 - protein, 335 aa, Artificial Sequence
  derived and/or modified sequence
MADTPRDAGLKQAPASRNEKAPVDFGYVGIDSILEQMRRKAMKQGFEFNIMVVGQSGLGKSTLINTLFKSKISRKSVQPTSEERIPKTIEIKSITHDIEEKGVRMKLTVIDTPGFGDHINNENCWQPIMKFINDQYEKYLQEEVNINRKKRIPDTRVHCCLYFIPATGHSLRPLDIEFMKRLSKVVNIVPVIAKADTLTLEERVHFKQRITADLLSNGIDVYPQKEFDEDSEDRLVNEKFREMIPFAVVGSDHEYQVNGKRILGRKTKWGTIEVENTTHCEFAYLRDLLIRTHMQNIKDITSSIHFEAYRVKRLNEGSSAMANGMEEKEPEAPEM

SEQ ID NO: 317136 - protein, 196 aa, Artificial Sequence
  derived and/or modified sequence
MADTPRDAGLKQAPASRNEKAPVDFGYVGIDSILEQMRRKAMKQGFEFNIMVVGQSGLGKSTLINTLFKSKISRKSVQPTSEERIPKTIEIKSITHDIEEKGVRMKLTVIDTPGFGDHINNENCWQPIMKFINDQYEKYLQEEVNINRKKRIPDTRVHCCLYFIPATGHSLPLLEQKVPLSQPSADCLARCGDRLE

SEQ ID NO: 317137 - DNA, 1789 bp, Artificial Sequence
  derived and/or modified sequence
ggcctcgatgctccacgtaggagctggctcggctgccggctgcggtcagggccaccgtataaagagggcggcagacccgagcgcctaggactcgccgctgcccgcgccccgccgccgctgctgcccccagccccggccccaggcgtcccagccatggtccgcccaatgctcttgctcagcctcggcctcctggctggtctgctgccggcgctggccgcctgcccccagaactgccactgccacagcgacctgcagcacgtcatctgcgacaaggtggggctgcagaagatccccaaggtgtcagagaagaccaagctgctcaacctacagcgcaacaacttcccggtgctggctgccaattcgttccgggccatgccgaacctcgtgtcattgcacctgcagcactgccagatccgcgaggtggccgccggtgccttccgcggcctcaagcaacttatctacttgtacctgtcccataacgacatccgcgtgctgcgcgcaggtgccttcgacgacctgaccgagctgacctacctctacctggaccacaacaaggtcactgagctgccccgggggttgctctccccgctggtcaacctcttcatcttgcagctcaacaacaacaagatccgtgagctgcgcgcaggcgccttccagggagccaaggacctgcgctggctctacctgtcggaaaacgcgttgagctccctgcagcccggggccctggacgacgtggagaacctcgccaaattccacgtggacaggaaccagctgtccagctacccctcagctgccctgagcaagctacgggtggtggaggagctgaagctgtcccacaaccccctgaaaagcatcccggacaatgccttccagtcctttggcagatacctggagaccctctggctggacaacaccaacctggagaagttctcagatggtgccttcctgggtgtaaccacgctgaaacacgtccatttggagaacaaccgcttgaaccagctaccctccaacttccccttcgacagcctggagaccctcgcccttaccaataacccctggaagtgtacctgccagctccggggccttcggcggtggctggaagccaaggcctcccgcccagatgccacctgtgcctcacctgccaagttcaagggccagcacatccgtgacacggacgccttccgcagctgcaagttccccaccaagaggtccaagaaagctggccgccattaaacaggttctgacccagccagtcctggtgactggcctctgccttccaccggagagactactgaccttctcacctccacccataccttctccccacagcctctgctgatgcacagagctgcctacacctagacacgtcctggcagggggcctcgggcactccactaccaacccagctccacccagcagtgtcctggggagaaggaaggctgagcctctccccagccttcatgccttccccaccctccagctcctcttggagaagctgttgctgagaccccccccccaagtcaatcagaaccacaacaggttggtcatcaggatggccaccctcccaggatcatccttcctctgttcctctttccctgccacgtggaaacaatcatcagatccttgccccaccccttgcttccagaaagggttttaaagcccatgccccaactctgccagcccccacctgccaggacgttctagcaggacatcggtgctttgctgtccatcttcccatgctgcaatttcttcctgagatttctataaatataaatgtatgtatgtatta

SEQ ID NO: 317138 - protein, 150 aa, Artificial Sequence
  derived and/or modified sequence
MWLPWALLLLWVPASTSMTPASITAAKTSTITTAFPPVSSTTLFAVGATHSASIQEETEEVVNSQLPLLLSLLALLLLLLVGASLLAWRMFQKWIKAGDHSELSQNPKQASPREELHYASVVFDSNTNRIAAQRPREEEPDSDYSVIRKT

SEQ ID NO: 317139 - DNA, 453 bp, Artificial Sequence
  derived and/or modified sequence
atgtggctgccctgggccctgctgctgctgtgggtgcccgccagcaccagcatgacccccgccagcatcaccgccgccaagaccagcaccatcaccaccgccttcccccccgtgagcagcaccaccctgttcgccgtgggcgccacccacagcgccagcatccaggaggagaccgaggaggtggtgaacagccagctgcccctgctgctgagcctgctggccctgctgctgctgctgctggtgggcgccagcctgctggcctggagaatgttccagaagtggatcaaggccggcgaccacagcgagctgagccagaaccccaagcaggccagccccagagaggagctgcactacgccagcgtggtgttcgacagcaacaccaacagaatcgccgcccagagacccagagaggaggagcccgacagcgactacagcgtgatcagaaagacctag

SEQ ID NO: 317140 - DNA, 453 bp, Artificial Sequence
  derived and/or modified sequence
atgtggctcccatgggcactcctcctcctctgggttccagcttccacatccatgacccctgctagcatcaccgctgccaaaacttctaccattacaactgctttcccaccggtatcatcaactaccctttttgcagtgggggccactcattcagcaagtattcaggaggagaccgaagaagtagtgaactcacaactgcctctccttttgagcctgttggcgttgctgttgctgctcctggttggagcatctctgcttgcctggcgcatgttccagaaatggataaaggctggggaccatagcgagctgagccaaaaccccaaacaagcctcacctcgagaagaactgcactacgcatcagtggtcttcgattctaacaccaataggattgcagcccaaaggccacgagaggaagaacccgattccgactattccgtgattcgaaagacctag

SEQ ID NO: 317141 - DNA, 453 bp, Artificial Sequence
  derived and/or modified sequence
atgtggctgccctgggccctgctgctgctgtgggtgcctgccagcacctccatgaccccagccagcatcacagctgccaagaccagcaccatcaccacagccttcccccctgtgagcagcaccaccctgtttgctgtgggcgccacccacagcgccagcatccaggaggagacagaggaggtggtgaacagccagctgcccctgctgctgagcctgctggccctgctgctgctgctgctggtgggcgccagcctgctggcctggaggatgttccagaagtggatcaaggccggggaccacagcgagctgagccagaaccccaagcaggccagcccccgggaggagctgcactacgcctctgtggtgtttgacagcaacaccaacagaattgctgcccagaggccccgggaggaggagccagacagcgactacagcgtcatcaggaagacctag

SEQ ID NO: 317142 - DNA, 453 bp, Artificial Sequence
  derived and/or modified sequence
atgtggctgccctgggccctgctgctgctgtgggtgcccgccagcacttctatgacaccagcctctatcaccgccgcaaagactagcacgattaccaccgcattcccgccagtgagttccacgacattgttcgccgttggagcgacccatagtgctagcatccaagaagagaccgaggaggtggtgaatagccagcttccgcttctccttagtctgctggcccttctgctcttgcttttggtgggcgcctctctgctggcttggcgaatgttccagaaatggatcaaggccggtgatcacagcgagctgtcccagaacccaaaacaggcctctcccagggaagagctccactacgcaagtgtcgtgtttgattctaatacaaatcggattgcagcccagagaccgagggaggaggaacctgattctgattacagcgtcatcagaaagacttag

SEQ ID NO: 317143 - DNA, 453 bp, Artificial Sequence
  derived and/or modified sequence
atgtggctgccatgggccctgctcctgctgtgggtccctgcctctacttccatgaccccggcttctatcacagccgctaaaacttcaaccattacaactgccttccccccagtgtcttcaacgactcttttcgcagttggagccacacattcagcatccatccaggaggaaaccgaagaagtcgttaacagtcagttgccactcctgttgagcctgctcgctctgctgctgcttctcctggtcggggcatctctgcttgcgtggagaatgtttcagaagtggatcaaagccggagaccactctgagctctcccagaaccccaagcaggcgtctcctcgggaggagttacactacgcgagtgtagtattcgattccaacacaaatcgaattgccgcacaacgtcccagggaggaggaacctgacagcgactactcagtgatcaggaaaacctag

SEQ ID NO: 317144 - DNA, 1163 bp, Artificial Sequence
  derived and/or modified sequence
agggcctggagctgctgcaagtgccgcctgtgctggggaagggaccatgtggctgccttgggctctgttgcttctctgggtcccagcatcaacgtcaatgacacctgcaagtatcactgcggccaagacctcaacaatcacaactgcatttccacctgtatcatccactaccctgtttgcagtgggtgccacccacagtgccagcatccaggaggaaactgaggaggtggtgaactcacagctcccgctgctcctctccctgctggcattgttgctgcttctgttggtgggggcctccctgctagcctggaggatgtttcagaaatggatcaaagctggtgaccattcagagctgtcccagaaccccaagcaggcctcccccagggaagaacttcactatgcctcggtggtgtttgattctaacaccaacaggatagctgctcagaggcctcgggaggaggaaccagattcagattacagtgtgataaggaagacataggcttttgtcctgcctcgccatcggagctctcatgggccccaggaagtccagggacagctcccttatacctggcccacgtccttctcagcctgccctcgacaacagtgaccaacagacaggcagctgggtttcccaggccatccctctgttgccatcagcttgattggcttccccgagggccagcagggctgggggctccggagagcagcaggaagcactcccagccaccagtgcctgtcacctctttcccctttgcccctgcttcatcccagctctgtgtgtggaggacaaagcttcttcctgcgtggctccaggaaaagatgtggctcacgtaggtggcacctgccaatagctttgtcaatcacagccccataggaacgtctggaattgcttgggagttggggagaactgtcaagaagagtgaagagagtgccaaagcggagatctgttcacctgggggccatggaggggggacccactaaagatcaagatcaaagattctccccatctcacagacaaggaaactgaggccagagggaggagagaattgctcatggctccagaactggtggcaagtttctctggactcttaggtttatttttaatatgaaatataaaaacagtttcaaatatcttattgagggagaagtaaaaacttatttaa

SEQ ID NO: 317145 - protein, 138 aa, Artificial Sequence
  derived and/or modified sequence
QCWEDFVGQELYRFLVMDFVLMLLDTLFGELENRFQSDVFSSRIWAWWRKPEFDIARNVLELIYGQTLTWLGVLFSPLLPAVQIIKLLLVFYVKKTSLLANCQAPRRPWLASHMSTVFLTLLCFPAFLGAAVFLCYAV

SEQ ID NO: 317146 - DNA, 417 bp, Artificial Sequence
  derived and/or modified sequence
cagtgctgggaggacttcgtgggccaggagctgtacagattcctggtgatggacttcgtgctgatgctgctggacaccctgttcggcgagctggagaacagattccagagcgacgtgttcagcagcagaatctgggcctggtggagaaagcccgagttcgacatcgccagaaacgtgctggagctgatctacggccagaccctgacctggctgggcgtgctgttcagccccctgctgcccgccgtgcagatcatcaagctgctgctggtgttctacgtgaagaagaccagcctgctggccaactgccaggcccccagaagaccctggctggccagccacatgagcaccgtgttcctgaccctgctgtgcttccccgccttcctgggcgccgccgtgttcctgtgctacgccgtgtag

SEQ ID NO: 317147 - DNA, 417 bp, Artificial Sequence
  derived and/or modified sequence
caatgttgggaggatttcgtaggccaggaattgtatcgcttcctggtgatggacttcgtgctgatgctgctcgatactcttttcggcgagctcgagaatcgttttcagagcgacgttttctcaagccggatatgggcttggtggagaaaaccggagtttgatattgccagaaatgtgctcgagctgatctatggacaaacacttacctggctgggtgtgcttttttctccactgctacctgctgttcagattataaaactgctgctcgtcttctacgtgaagaaaacaagcctcctcgccaattgccaggcaccccgccgtccatggctcgcttcccatatgtcaactgtgttcctcacacttctgtgttttcctgcctttctgggcgctgctgtgttcttgtgctacgctgtatag

SEQ ID NO: 317148 - DNA, 417 bp, Artificial Sequence
  derived and/or modified sequence
cagtgctgggaggactttgtgggccaggagctgtaccgcttcctggtgatggactttgtgctgatgctgctggacaccctgtttggagagctggagaaccgcttccagagtgatgtgttcagcagccgcatctgggcctggtggaggaagccagagtttgatattgccagaaatgtgctggagctgatctacggccagaccctgacctggctgggcgtgctcttcagccccctgctgcctgctgtgcagatcatcaagctgctgctggtgttctacgtgaagaagaccagcctgctggccaactgccaggccccccggcggccctggctggccagccacatgagcaccgtcttcctgaccctgctgtgcttccctgccttcctgggcgctgctgtgttcctgtgctatgctgtgtag

SEQ ID NO: 317149 - DNA, 417 bp, Artificial Sequence
  derived and/or modified sequence
cagtgctgggaggacttcgtgggccaggagctgtaccggttcctggtgatggattttgtgcttatgttgcttgacaccctgttcggggagctcgaaaataggttccaatctgatgtcttttccagccgaatatgggcatggtggcggaagccagagttcgatatcgctagaaatgtacttgagttaatttatgggcagactctgacatggctcggcgtactgttcagcccactcctgccagctgtgcagattatcaagctgctgctcgtgttctacgttaaaaagaccagtttacttgctaactgtcaggccccacgccgtccctggctggccagtcacatgagcaccgttttcctgacacttttgtgctttcctgccttccttggggcagctgtgtttctgtgctacgccgtttag

SEQ ID NO: 317150 - DNA, 417 bp, Artificial Sequence
  derived and/or modified sequence
cagtgctgggaagatttcgttgggcaggaactgtacaggttcttggtgatggactttgtgctgatgctgctcgatacactatttggagaactggaaaaccgttttcagagcgacgtgttttcgtcaagaatctgggcatggtggaggaagcccgagttcgatatcgcaagaaatgtgctcgaactgatttacgggcaaacactgacttggcttggtgtgcttttttccccactgctgcctgccgtccagattataaagttactcttggtattttacgttaagaagacgagtctgctcgccaactgtcaggcgcctcggcgtccctggctggcaagccatatgtctaccgtgttcctgacgctgctgtgcttcccagcctttttgggtgctgctgtgttcctgtgctacgcagtgtag

SEQ ID NO: 317151 - DNA, 1046 bp, Artificial Sequence
  derived and/or modified sequence
cagtgctgggaggattttgtgggccaggagctgtaccggttcctggtgatggacttcgtcctcatgttgctggacacgctttttggggaactggaaaacaggtttcaaagtgatgtgttttcttcgagaatctgggcctggtggcggaagccggagtttgacattgcccggaatgtcctggagctgatttatgggcagactctgacctggctgggggtgctcttctcgcccctcctccccgccgtgcagatcatcaagctgctgctcgtcttctatgtcaagaagaccagccttctggccaactgccaggcgccgcgccggccctggctggcctcacacatgagcaccgtcttcctcacgctgctctgcttccccgccttcctgggcgccgctgtcttcctctgctacgccgtctggcaggtgaagccctcgagcacctgcggccccttccggaccctggacaccatgtacgaggccggcagggtgtgggtgcgccacctggaggcggcaggccccagggtctcctggctgccctgggtgcaccggtacctgatggaaaacaccttctttgtcttcctggtgtcagccctgctgctggccgtgatctacctcaacatccaggtggtgcggggccagcgcaaggtcatctgcctgctcaaggagcagatcagcaatgagggtgaggacaaaatcttcttaatcaacaagcttcactccatctacgagaggaaggagagggaggagaggagcagggttgggacaaccgaggaggctgcggcaccccctgccctgctcacagatgaacaggatgcctagggggacggcgatgggcctcacgggcccgcccagcaccctgagaccacactgttgcctcccagtgaccctgctgggacaccaggacaaggaagacagtttcgcctctcgaaagccgcagctgcgcctaggctggagctggaagggtgggtgaatccggcttgggcatccccaatgaactctgccctgcctgggactctatttattctgattaaaggggttttgcaaatggg

SEQ ID NO: 317152 - protein, 454 aa, Artificial Sequence
  derived and/or modified sequence
MAQPLAFILDVPETPGDQGQGPSPYDESEVHDSFQQLIQEQSQCTAQEGLELQQREREVTGSSQQTLWRPEGTQSTATLRILASMPSRTIGRSRGAIISQYYNRTVQLRCRSSRPLLGNFVRSAWPSLRLYDLELDPTALEEEEKQSLLVKELQSLAVAQRDHMLRGMPLSLAEKRSLREKSRTPRGKWRGQPGSGGVCSCCGRLRYACVLALHSLGLALLSALQALMPWRYALKRIGGQFGSSVLSYFLFLKTLLAFNALLLLLLVAFIMGPQVAFPPALPGPAPVCTGLELLTGAGCFTHTVMYYGHYSNATLNQPCGSPLDGSQCTPRVGGLPYNMPLAYLSTVGVSFFITCITLVYSMAHSFGESYRVGSTSGIHAITVFCSWDYKVTQKRASRLQQDNIRTRLKGEDKIFLINKLHSIYERKEREERSRVGTTEEAAAPPALLTDEQDA

SEQ ID NO: 317153 - DNA, 1365 bp, Artificial Sequence
  derived and/or modified sequence
atggcccagcccctggccttcatcctggacgtgcccgagacccccggcgaccagggccagggccccagcccctacgacgagagcgaggtgcacgacagcttccagcagctgatccaggagcagagccagtgcaccgcccaggagggcctggagctgcagcagagagagagagaggtgaccggcagcagccagcagaccctgtggagacccgagggcacccagagcaccgccaccctgagaatcctggccagcatgcccagcagaaccatcggcagaagcagaggcgccatcatcagccagtactacaacagaaccgtgcagctgagatgcagaagcagcagacccctgctgggcaacttcgtgagaagcgcctggcccagcctgagactgtacgacctggagctggaccccaccgccctggaggaggaggagaagcagagcctgctggtgaaggagctgcagagcctggccgtggcccagagagaccacatgctgagaggcatgcccctgagcctggccgagaagagaagcctgagagagaagagcagaacccccagaggcaagtggagaggccagcccggcagcggcggcgtgtgcagctgctgcggcagactgagatacgcctgcgtgctggccctgcacagcctgggcctggccctgctgagcgccctgcaggccctgatgccctggagatacgccctgaagagaatcggcggccagttcggcagcagcgtgctgagctacttcctgttcctgaagaccctgctggccttcaacgccctgctgctgctgctgctggtggccttcatcatgggcccccaggtggccttcccccccgccctgcccggccccgcccccgtgtgcaccggcctggagctgctgaccggcgccggctgcttcacccacaccgtgatgtactacggccactacagcaacgccaccctgaaccagccctgcggcagccccctggacggcagccagtgcacccccagagtgggcggcctgccctacaacatgcccctggcctacctgagcaccgtgggcgtgagcttcttcatcacctgcatcaccctggtgtacagcatggcccacagcttcggcgagagctacagagtgggcagcaccagcggcatccacgccatcaccgtgttctgcagctgggactacaaggtgacccagaagagagccagcagactgcagcaggacaacatcagaaccagactgaagggcgaggacaagatcttcctgatcaacaagctgcacagcatctacgagagaaaggagagagaggagagaagcagagtgggcaccaccgaggaggccgccgccccccccgccctgctgaccgacgagcaggacgcctag

SEQ ID NO: 317154 - DNA, 1365 bp, Artificial Sequence
  derived and/or modified sequence
atggcacagcccctcgctttcatcctcgatgtgcccgaaactcctggcgatcagggccaggggccttctccttatgatgagagtgaagtccacgactctttccagcaactgatacaggagcagtctcagtgcactgctcaggagggacttgagctgcagcagcgggagcgggaggtaacaggcagctcacagcaaactttgtggcgccccgaaggaacccagagcactgccacgcttcgcatcttggctagcatgccatcaagaacgatcgggcggtcgcggggcgcaatcatctctcaatattacaacagaacggtgcagcttcgctgccgatcttccaggcctttacttggcaatttcgttaggagcgcctggccttctctcagattgtatgatctcgaacttgatccgacagcactcgaggaagaagagaaacagagtctcctggttaaggagcttcagtccctggcagtcgcacagcgcgaccacatgctgcgaggaatgcctctttcactggcggagaagcgttcactcagagagaagagccggactccacgtgggaagtggagaggacaacccggatctggaggtgtgtgcagctgttgtggccggttgaggtatgcctgtgtgctggcactacactctctgggtctggctcttctcagcgctctccaagctcttatgccatggagatacgcgctaaaaagaattggcggccagttcgggtcttccgtcctctcatactttcttttcttaaaaacactgctagccttcaacgctttgttattactcctcctggtggcgtttatcatggggccccaggtggctttcccaccggcacttccaggacctgcacccgtttgcaccggactggagctgttaactggagccggttgcttcacacatacagtgatgtattacgggcactacagcaatgccacactgaatcaaccttgtggctcacctttagatggctcacagtgtactcctagagtgggtggcctgccctacaatatgcccttggcctatctgtctaccgtcggggtatccttctttatcacatgtatcacactggtgtacagcatggcacactccttcggcgagtcttatagagtcggctccacctccggcattcacgccattacagtgttttgctcatgggactacaaggtgacccagaaacgcgcttctaggctgcagcaggacaacatccggactcggttgaaaggggaggataagatctttcttattaataaactccactccatttacgagcgtaaagagcgagaggagcgctctagagtgggcacaaccgaggaggcggcggcacctcctgctttactgactgacgaacaagatgcctag

SEQ ID NO: 317155 - DNA, 1365 bp, Artificial Sequence
  derived and/or modified sequence
atggcccagcccctggccttcatcctggatgtgcctgagacccctggggaccagggccagggccccagcccctatgatgagagcgaggtgcatgacagcttccagcagctgatccaggagcagagccagtgcacagcccaggagggcctggagctgcagcagcgggagcgggaggtgacaggcagcagccagcagaccctgtggaggcctgagggcacccagagcacagccaccctgcgcatcctggcctccatgcccagcaggaccatcggccgcagcagaggagccatcatcagccagtactacaacagaacagtgcagctgcgctgccgcagcagccggcccctgctgggcaactttgtgcgcagcgcctggcccagcctgcggctgtatgacctggagctggaccccacagccctggaggaggaggagaagcagagcctgctggtgaaggagctgcagagcctggccgtggcccagagggaccacatgctgcggggcatgcccctgagcctggccgagaagaggagcctgcgggagaagagcaggaccccccggggcaagtggaggggccagcccggcagcggaggagtgtgcagctgctgcggccgcctgcgctatgcctgtgtgctggccctgcacagcctgggcctggccctgctgagcgccctgcaggccctgatgccctggaggtatgccctgaagagaattggaggccagtttggcagctctgtgctgagctacttcctgttcctgaagaccctgctggccttcaatgccctgctgctgctgctgctggtggccttcatcatgggcccccaggtggccttccccccagccctgcccggccctgcccctgtgtgcaccggcctggagctgctgactggagctggctgcttcacccacacagtgatgtactacggccactacagcaatgccaccctgaaccagccctgtggcagccccctggatggcagccagtgcaccccccgggtgggcggcctgccctacaacatgcccctggcctacctgagcacagtgggcgtgtccttcttcatcacctgcatcaccctggtgtacagcatggcccacagctttggagagagctacagagtgggcagcaccagcggcatccacgccatcaccgtcttctgctcctgggactacaaggtgacccagaagagggccagccggctgcagcaggacaacatccgcacccggctgaagggggaggacaagatcttcctgatcaacaagctgcacagcatctatgaaaggaaggagcgggaggagaggagccgggtgggcaccacagaggaggccgccgcccccccagccctgctgacagatgagcaggatgcctag

SEQ ID NO: 317156 - DNA, 1365 bp, Artificial Sequence
  derived and/or modified sequence
atggcccagcccctggccttcatcctggacgtgcccgagacccccggcgaccaggggcagggccctagcccctacgacgaaagtgaggttcacgattctttccagcaattaatacaggagcagtcccagtgcaccgcacaggaagggctggagctgcagcaaagagaaagggaggttaccggatctagccagcaaacactgtggaggccagagggaacgcagagcacagccaccctgagaattctcgctagcatgccgtcccggacaattgggaggtctcgcggcgccattatttcccaatactataacagaacagtccagcttaggtgtcggtctagccggcctttgttggggaatttcgttaggagtgcatggcctagcctgcgactatacgatctggagctagatccgactgcgctcgaggaagaagagaagcagagcctgctggtgaaggaactgcaatcccttgcagttgcccagcgcgatcacatgttgcggggaatgccactgtccctggccgagaaacggtccctccgagagaagtcaagaaccccccgcggcaagtggcggggccagcccggttccggcggcgtgtgctcttgctgcggaagactgcggtatgcgtgcgtgctggcgttgcactcactgggactggctctgttaagtgctcttcaagcattgatgccctggcggtatgcgttaaagaggatcgggggtcaatttggatcttcagtgctctcctacttcctgttcttaaagacgcttctcgcctttaatgctctcctccttttgctactcgttgccttcataatgggaccacaggtggcattcccacctgcactccccgggcccgctcccgtttgcactggactagaattactgaccggcgctggctgctttacccacacagtaatgtattacggccattacagcaacgctaccctcaatcaaccctgcggctctccacttgatggcagccagtgtacaccccgggtgggagggctgccttacaacatgcccctggcttacctgagcaccgtgggcgtgagcttcttcatcacatgcataacactcgtttattcaatggctcatagcttcggtgagtcgtaccgcgtgggttctacgtctggcattcatgcaattacagtgttctgttcatgggattacaaagttacccagaaaagggcatcacggcttcagcaggataacataaggacacggttgaagggcgaagacaaaatcttcctgatcaataagctgcatagtatatatgaacggaaggagcgggaggagcgtagtagggttgggaccaccgaagaagctgcagcacccccggcacttcttactgatgagcaggatgcctag

SEQ ID NO: 317157 - DNA, 1365 bp, Artificial Sequence
  derived and/or modified sequence
atggctcagcctctggcgtttatcctggatgtccccgagaccccgggtgatcagggacaaggacccagcccctacgacgaaagtgaagtgcacgactctttccagcagctgattcaggaacagagccagtgcactgctcaggaggggctcgagctgcaacagagagaaagggaggtgaccgggagtagccagcagacgctttggagaccagagggcacccagtccaccgctactttgagaattctcgcctccatgccttctaggacgatcggcaggtccagaggggctataataagccaatattacaatcggaccgtccaactcaggtgcagatcttcacgacctcttcttggcaatttcgtccgatctgcatggccctcacttaggttatacgatctggaacttgatcctactgccctggaggaagaggaaaagcagagtttgctcgtcaaagaactacagagcctagctgtagcccagagagatcatatgctgagaggaatgcctctatccctcgccgaaaaaagatccttgcgcgaaaaatctcggacaccgagagggaagtggcgtggacaacccggttccggtggggtgtgttcatgctgcggaaggctcagatatgcgtgtgtcttagcccttcactccctggggctcgctctgctgtccgcgttgcaggccctcatgccctggcgctacgccctaaagcgcataggcggacagtttggcagctcggttctgtcatatttcctctttctgaagaccctgctggccttcaacgcattactgctgctgctgctagtagcatttattatgggccctcaggtggcattccctccagctctgccgggtcccgctcccgtctgcacagggctggagctcctaacaggtgcagggtgcttcacccacaccgtgatgtattatggacattactccaatgctaccctcaatcaaccttgcggtagccccctggacggctcccaatgcacaccccgtgtaggaggcctgccttacaacatgcctctggcatatcttagcactgtaggggtttccttctttatcacctgcatcacattagtttacagcatggcacattctttcggcgagtcctatagggtggggtctacctctggtatccacgctatcacagtgttctgctcatgggactacaaggttacacagaagcgcgctagtcgtttacaacaagataatatcaggacgcggttgaaaggcgaggataaaatttttctcatcaataagctgcactcgatctacgaacgaaaggagagggaagaaaggtccagagtcgggaccacagaggaagcagcagccccacccgcactcctgaccgacgagcaagacgcttag

SEQ ID NO: 317158 - DNA, 1838 bp, Artificial Sequence
  derived and/or modified sequence
gtgcggctactcccccggccccggcagacctgcgactggcccagtcgcccctggggccctttgccactcccttggcaaggagagccgagacctcagttcccggcggctcttgcggggcacaggtgagccctggctgcgcgcgcggcccctcctccccggcgcctcccagatgggggctccggaggtggcgcccaggctctgagctaccctaggtctgcagactagcgggcattggccagagacatggcccagccactggccttcatcctcgatgtccctgagaccccaggggaccagggccagggccccagcccctatgatgaaagcgaagtgcacgactccttccagcagctcatccaggagcagagccagtgcacggcccaggaggggctggagctgcagcagagagagcgggaggtgacaggaagtagccagcagacactctggcggcccgagggcacccagagcacggccacactccgcatcctggccagcatgcccagccgcaccattggccgcagccgaggtgccatcatctcccagtactacaaccgcacggtgcagcttcggtgcaggagcagccggcccctgctcgggaactttgtccgctccgcctggcccagcctccgcctgtacgacctggagctggaccccacggccctggaggaggaggagaagcagagcctcctggtgaaggagctccagagcctggcagtggcacagcgggaccacatgcttcgcgggatgcccttaagcctggctgagaaacgcagcctgcgagagaagagcaggaccccgagggggaagtggaggggccagccgggcagcggcggggtctgctcctgctgtggccggctcagatatgcctgcgtgctggccttgcacagcctgggcctggcgctgctctccgccctgcaggccctgatgccgtggcgctacgccctgaagcgcatcgggggccagttcggctccagcgtgctctcctacttcctctttctcaagaccctgctggctttcaatgccctcctgctgctgctgctggtggccttcatcatgggccctcaggtcgccttcccacccgccctgccgggccctgcccccgtctgcacaggcctggagctcctcacaggcgcgggttgcttcacccacaccgtcatgtactacggccactacagtaacgccacgctgaaccagccgtgtggcagccccctggatggcagccagtgcacacccagggtgggtggcctgccctacaacatgcccctggcctacctctccactgtgggcgtgagcttctttatcacctgcatcaccctggtgtacagcatggctcactctttcggggagagctaccgggtgggcagcacctctggcatccacgccatcaccgtcttctgctcctgggactacaaggtgacgcagaagcgggcctcccgcctccagcaggacaatattcgcacccggctgaagggtgaggacaaaatcttcttaatcaacaagcttcactccatctacgagaggaaggagagggaggagaggagcagggttgggacaaccgaggaggctgcggcaccccctgccctgctcacagatgaacaggatgcctagggggacggcgatgggcctcacgggcccgcccagcaccctgagaccacactgttgcctcccagtgaccctgctgggacaccaggacaaggaagacagtttcgcctctcgaaagccgcagctgcgcctaggctggagctggaagggtgggtgaatccggcttgggcatccccaatgaactctgccctgcctgggactctatttattctgattaaaggggttttgcaaatggg

SEQ ID NO: 317159 - protein, 974 aa, Artificial Sequence
  derived and/or modified sequence
MAHAYKGHEHLRAARMAFAECIAPACVMSWLRFWGPWPLLTWQLLSLLVKEAQPLVWVKDPLQLTSNPLGPPEPWSSRSSHLPWESPHAPAPPAAPGDFDYLGPSASSQMSALPQEPTENLAPFLKELDSAGELPLGPEPFLAAHQDLNDKRTPEERLPEVVPLLNRDQNQALVQLPRLKWVQTTDLDRAAGHQADEILVPLDSKVSRPTKFVVSPKNLKKDLAERWSLPEIVGIPHQLSKPQRQKQTLPDDYLSMDTLYPGSLPPELRVNADEPPGPPEQVGLSQFHLEPKSQNPETLEDIQSSSLQEEAPAQLLQLPQEVEPSTQQEAPALPPESSMESLAQTPLNHEVTVQPPGEDQAHYNLPKFTVKPADVEVTMTSEPKNETESTQAQQEAPIQPPEEAEPSSTALRTTDPPPEHPEVTLPPSDKGQAQHSHLTEATVQPLDLELSITTEPTTEVKPSPTTEETSAQPPDPGLAITPEPTTEIGHSTALEKTRAPHPDQVQTLHRSLTEVTGPPTKLESSQDSLVQSETAPEEQKASTSTNICELCTCGDETLSCVGLSPKQRLRQVPVPEPDTYNGIFTTLNFQGNYISYLDGNVWKAYSWTEKLILSENYLTELPKDSFEGLLYLQYLDLSCNKIRYIERQTFESLPFLQYINLGCNLITKLSLGTFQAWHGMQFLHNLILNRNPLTTVEDPYLFELPALKYLDMGTTHITLTTLKNILTMTVELEKLILPSHMACCLCQFKNSIEAVCKTVKLHCNTACLTNSIHCPEEASVGNPEGAFMKMLQARKQHMSTQLTIESEAPSDSSGINLSGFGGDQLEIQLTEQLRSLIPNEDVRKFMSHVIRTLKMECSETHVQGSCAKLMLRTGLLMKLLSEQQEAKALNVEWDTDQQKTNYINENMEQNEQKEQKSSELMKEVPGDDYKNKLIFAISVTVILIILIIIFCLIEVNSHKRASEKYKDNPSISGA

SEQ ID NO: 317160 - DNA, 2925 bp, Artificial Sequence
  derived and/or modified sequence
atggcccacgcctacaagggccacgagcacctgagagccgccagaatggccttcgccgagtgcatcgcccccgcctgcgtgatgagctggctgagattctggggcccctggcccctgctgacctggcagctgctgagcctgctggtgaaggaggcccagcccctggtgtgggtgaaggaccccctgcagctgaccagcaaccccctgggcccccccgagccctggagcagcagaagcagccacctgccctgggagagcccccacgcccccgccccccccgccgcccccggcgacttcgactacctgggccccagcgccagcagccagatgagcgccctgccccaggagcccaccgagaacctggcccccttcctgaaggagctggacagcgccggcgagctgcccctgggccccgagcccttcctggccgcccaccaggacctgaacgacaagagaacccccgaggagagactgcccgaggtggtgcccctgctgaacagagaccagaaccaggccctggtgcagctgcccagactgaagtgggtgcagaccaccgacctggacagagccgccggccaccaggccgacgagatcctggtgcccctggacagcaaggtgagcagacccaccaagttcgtggtgagccccaagaacctgaagaaggacctggccgagagatggagcctgcccgagatcgtgggcatcccccaccagctgagcaagccccagagacagaagcagaccctgcccgacgactacctgagcatggacaccctgtaccccggcagcctgccccccgagctgagagtgaacgccgacgagccccccggcccccccgagcaggtgggcctgagccagttccacctggagcccaagagccagaaccccgagaccctggaggacatccagagcagcagcctgcaggaggaggcccccgcccagctgctgcagctgccccaggaggtggagcccagcacccagcaggaggcccccgccctgccccccgagagcagcatggagagcctggcccagacccccctgaaccacgaggtgaccgtgcagccccccggcgaggaccaggcccactacaacctgcccaagttcaccgtgaagcccgccgacgtggaggtgaccatgaccagcgagcccaagaacgagaccgagagcacccaggcccagcaggaggcccccatccagccccccgaggaggccgagcccagcagcaccgccctgagaaccaccgaccccccccccgagcaccccgaggtgaccctgccccccagcgacaagggccaggcccagcacagccacctgaccgaggccaccgtgcagcccctggacctggagctgagcatcaccaccgagcccaccaccgaggtgaagcccagccccaccaccgaggagaccagcgcccagccccccgaccccggcctggccatcacccccgagcccaccaccgagatcggccacagcaccgccctggagaagaccagagccccccaccccgaccaggtgcagaccctgcacagaagcctgaccgaggtgaccggcccccccaccaagctggagagcagccaggacagcctggtgcagagcgagaccgcccccgaggagcagaaggccagcaccagcaccaacatctgcgagctgtgcacctgcggcgacgagaccctgagctgcgtgggcctgagccccaagcagagactgagacaggtgcccgtgcccgagcccgacacctacaacggcatcttcaccaccctgaacttccagggcaactacatcagctacctggacggcaacgtgtggaaggcctacagctggaccgagaagctgatcctgagcgagaactacctgaccgagctgcccaaggacagcttcgagggcctgctgtacctgcagtacctggacctgagctgcaacaagatcagatacatcgagagacagaccttcgagagcctgcccttcctgcagtacatcaacctgggctgcaacctgatcaccaagctgagcctgggcaccttccaggcctggcacggcatgcagttcctgcacaacctgatcctgaacagaaaccccctgaccaccgtggaggacccctacctgttcgagctgcccgccctgaagtacctggacatgggcaccacccacatcaccctgaccaccctgaagaacatcctgaccatgaccgtggagctggagaagctgatcctgcccagccacatggcctgctgcctgtgccagttcaagaacagcatcgaggccgtgtgcaagaccgtgaagctgcactgcaacaccgcctgcctgaccaacagcatccactgccccgaggaggccagcgtgggcaaccccgagggcgccttcatgaagatgctgcaggccagaaagcagcacatgagcacccagctgaccatcgagagcgaggcccccagcgacagcagcggcatcaacctgagcggcttcggcggcgaccagctggagatccagctgaccgagcagctgagaagcctgatccccaacgaggacgtgagaaagttcatgagccacgtgatcagaaccctgaagatggagtgcagcgagacccacgtgcagggcagctgcgccaagctgatgctgagaaccggcctgctgatgaagctgctgagcgagcagcaggaggccaaggccctgaacgtggagtgggacaccgaccagcagaagaccaactacatcaacgagaacatggagcagaacgagcagaaggagcagaagagcagcgagctgatgaaggaggtgcccggcgacgactacaagaacaagctgatcttcgccatcagcgtgaccgtgatcctgatcatcctgatcatcatcttctgcctgatcgaggtgaacagccacaagagagccagcgagaagtacaaggacaaccccagcatcagcggcgcctag

SEQ ID NO: 317161 - DNA, 2925 bp, Artificial Sequence
  derived and/or modified sequence
atggctcatgcttacaaggggcatgagcacttgcgggccgccaggatggcatttgctgagtgcattgctcctgcgtgcgtcatgagctggctgaggttttggggcccttggccccttctgacatggcagttgctgagccttttggttaaagaggctcaaccccttgtgtgggtgaaagatccactccaacttacctcgaatccactcggacccccagaaccctggagtagcagatcttcccacctcccttgggagtcgccacatgcacccgcccccccagccgcacctggcgattttgattatctcggaccatcagcttcatctcaaatgagcgcactgcctcaggagcccacagagaacctggccccctttctcaaagagttagattccgctggagaattaccattgggaccagaaccgttccttgccgcccatcaagacttgaacgataaaaggacccctgaggaaaggcttcccgaggtggtcccacttttgaacagggatcagaaccaagcacttgtccagttgcccagactaaagtgggttcaaactacggacttggatcgcgccgccggccaccaggccgatgagatactggtcccattggacagtaaagtgagtcggcccaccaagtttgtggttagccccaagaacctcaagaaagatttagctgagagatggtccttacccgaaatcgtgggaatacctcatcagcttagcaaaccccagaggcaaaagcagacgcttcctgacgattatctgagcatggatacgctgtaccctggtagtctgccgccagagcttcgcgttaatgcagacgagcccccaggcccccccgaacaggtgggattaagccaatttcacctggagcctaagtcgcagaaccccgagactctggaagatatccaatcgtcgtccctccaggaagaggctcccgcacaactgctccagttgcctcaggaagtggaacccagcacccagcaagaagctccggccctgcctcccgagagcagtatggaaagcctggcacaaactccactgaatcacgaagtcactgttcagccgcctggggaggatcaggcccattacaacctccccaagtttacagttaagcccgctgacgtcgaggttaccatgacatctgaaccgaaaaatgagaccgaatctacccaggcccagcaggaagccccgatccagccgccagaggaagcagagccttcctcaaccgcactcaggactacagacccaccacccgaacaccctgaggtgactttgccccccagcgataaagggcaggcacagcacagccacctgactgaagctaccgtgcagcctcttgatctggagctgagcattactaccgagcccaccactgaagtgaagccatcgcccaccaccgaagagaccagcgcgcagcctcccgaccccgggcttgctatcacaccggagcccaccactgagatcgggcacagcactgccttggaaaagacaagggctccccacccggaccaggtgcagacactgcacaggtctctcacagaggtgaccggcccaccgaccaaactggaaagtagccaggatagcctcgtccaaagcgagaccgcaccagaggagcagaaggccagcacgtccaccaacatctgcgaactgtgcacgtgcggggatgagactctcagctgcgttggtctgagccccaagcagcgcctccggcaggtccccgtgccagaacctgacacatacaatggtatttttaccacgctgaacttccagggaaactacatcagctacttggacggtaatgtctggaaggcatattcatggacggagaagttaattctttccgagaattacctcacggagctccctaaggacagttttgaaggactgctgtacctgcagtatcttgacctctcatgtaataagataagatacatcgaaagacaaaccttcgagagcttgccgttcctgcaatacatcaaccttgggtgtaatctgatcaccaagctgtccctgggcacttttcaagcctggcacggaatgcaatttctgcacaatctgatcctgaatcgaaatccccttaccaccgtggaggacccttacttgttcgaacttccggccctaaaatacctggatatgggcacaacacacattacgctgacaacacttaaaaacatcctgaccatgacggtggagttggagaagctgatcctacctagccatatggcctgttgcctctgtcagttcaaaaatagtatagaggccgtttgcaagacagtcaaactgcattgtaacaccgcctgcctcacgaattccatccactgccccgaggaagcttccgtgggcaaccccgagggagccttcatgaagatgttacaggcccgtaaacagcatatgtccacccagttgactatcgagtcagaggcccccagtgattctagtggcattaacctgagtggattcggaggagaccagctcgagattcaactgaccgaacaattgcgctctctgattccgaacgaggacgtacggaagttcatgtcacatgttatccgaactctgaaaatggaatgctcggagactcacgttcaggggagctgtgcaaagctcatgctgcggacaggcttgctgatgaaactcttgtccgagcagcaggaggctaaggccctgaacgtggaatgggatacggatcaacagaagactaactacattaacgagaacatggagcagaacgagcagaaggaacaaaagagcagcgaacttatgaaagaagttcccggtgatgactacaagaataaactcatctttgccatttccgttacagtaatactgatcatactcatcattatcttttgtctaatagaggttaactcccacaaaagggctagcgaaaaatataaagacaaccctagcatctcaggggcatag

SEQ ID NO: 317162 - DNA, 3045 bp, Artificial Sequence
  derived and/or modified sequence
ctaataaaggtgacataaataaaggtgtcataaagacagggcatggcacacgcttataaggggcatgagcatctcagggctgccagaatggcttttgctgagtgcatagcaccagcgtgtgtcatgtcttggctgcgtttctggggcccatggcccctccttacgtggcaactattgtctttactagtcaaggaggctcagcctctggtgtgggtcaaggacccgctccagctgacctctaaccccctggggccacctgagccctggtcttcccgctcctcccatctcccatgggaatctccccatgcacctgctcccccagcagccccgggggactttgattacctggggccctctgcttcttcgcagatgtcagccctgcctcaggaaccaactgaaaatttggctccattcctgaaggaattggattcagctggagagctgcccctggggccagagccgttcttggctgcacatcaggacttaaatgacaagcggactccagaagaaaggctcccagaggtggttccgcttctcaaccgggatcagaaccaggccctagttcagcttcctcgcctcaagtgggttcaaactacagatctagatcgggctgcaggtcatcaggcagatgaaatacttgttccactagacagtaaggtttcaagaccaaccaaatttgttgtttcgcccaagaacctgaagaaagatctagctgaacgttggagccttcctgagattgttgggattccacaccaattatccaaacctcagcgtcagaaacagactttgccagatgattatttgagtatggacacactgtatcccggcagcctacctccagaactccgggtgaacgcagatgagcctccagggcctcctgagcaagttggactttctcaattccatctagagcccaaaagtcaaaatccagagacccttgaagacatccagtcctcttcactccaggaagaagccccagcgcagcttctacagctccctcaggaggtagaaccttcaacccagcaggaggccccagctctgcctccagagtcctctatggagagtctagctcaaactccactgaatcatgaagtgacagttcaacctccaggtgaggatcaagctcattataatttgcccaagtttacagtcaaacctgcagatgtggaggttaccatgacttcagagcctaaaaatgagacagaatctacccaagcccagcaggaggccccaattcagcctcccgaggaggcggaaccttcttctacagccctgaggactacagatcctcctccagaacaccctgaggtgacacttccaccttcagacaagggtcaggctcagcattcacacctgactgaagccacagttcaacctctggacctggagcttagcataactacagagcctactacagaggttaaaccgtctccaaccacggaggaaacctcagctcagcctccagacccggggcttgccataactccagaacccactacagagattggacattccacagccctggagaagactagagctcctcatccagaccaggttcagactctgcatcgaagcctgactgaagtcacaggtccacctacaaagttagaatcttcgcaggattcattggtgcagtctgaaactgcaccagaggaacagaaggcctccacaagcaccaacatatgtgagctctgcacctgcggagatgagactctgtcatgtgttggtctcagcccaaagcagaggctccgccaagtgcctgtgccagagcccgacacctacaatggcatcttcaccaccttaaatttccaaggaaactatatttcataccttgatggaaatgtatggaaagcatacagttggaccgagaaactaattctcagtgaaaattatttgactgaattacctaaggattcatttgaaggcctgctatacctccagtatttagatttatcctgcaataaaatacgatatattgaaagacaaacatttgaatcactaccatttttgcagtatataaatctgggctgcaatttaattacaaaactgagccttggaacatttcaggcctggcacggaatgcagtttttacacaacttaattctcaatcgcaatcctctgactactgtcgaagatccatatctctttgaactgccggcattaaaatatctagacatgggaacaacacacatcacacttacaacacttaagaacattctcacgatgactgttgaactggaaaaactgatcttacctagccatatggcctgctgcctctgccaatttaaaaatagcattgaggctgtctgcaagacagtcaagctgcattgcaacactgcatgtctgactaacagcatacattgtcctgaagaagcatctgtagggaatccagaaggagcgttcatgaagatgttacaagcccggaagcagcacatgagcactcagctgactattgagtcggaggcgccctcagacagcagtggcatcaacttgtcaggctttgggggtgatcagcttgaaattcagctaaccgagcagctacggtccctcatccccaacgaggatgtgagaaagttcatgtctcatgttatccggaccttgaaaatggaatgttcagaaacacatgtgcaagggagctgtgccaagctcatgttgcgaacaggcctcctgatgaagcttctcagcgagcagcaggaagcaaaggcattgaatgtagaatgggatacggaccaacaaaaaacaaattatattaatgagaacatggaacagaatgaacagaaagagcagaagtcaagtgagctcatgaaagaagttccaggagatgactataagaacaaactcatcttcgcaatatctgtgactgtaatactaataattttgattataattttttgtcttatagaggtgaattcacataaaagggcatcagaaaaatacaaagacaacccatcaatatcaggagcctgagcatgagttaaagcatgtggatggcctggagctatgtttttaaaattgttattaaatattggttttttacttaaatca

SEQ ID NO: 317163 - DNA, 2925 bp, Artificial Sequence
  derived and/or modified sequence
atggcccacgcctacaagggccacgagcacctgcgggccgccaggatggcctttgctgagtgcatcgccccagcctgtgtgatgtcctggctgcgcttctggggcccctggcccctgctgacctggcagctgctgagcctgctggtgaaggaggcccagcccctggtgtgggtgaaggaccccctgcagctgaccagcaaccccctgggccccccagagccctggagcagccgcagcagccacctgccctgggagagcccccacgccccagcccccccagctgcccctggggactttgactacctgggccccagcgccagcagccagatgtctgccctgccccaggagcccacagagaacctggcccccttcctgaaggagctggacagcgctggggagctgcccctgggccctgagcccttcctggccgcccaccaggacctgaatgacaagaggaccccagaggagcggctgcctgaggtggtgcccctgctgaacagagaccagaaccaggccctggtgcagctgccccggctgaagtgggtgcagaccacagacctggacagagctgctggccaccaggctgatgagatcctggtgcccctggacagcaaggtgtcccggcccaccaagtttgtggtgagccccaagaacctgaagaaggacctggccgagcgctggagcctgcctgagatcgtgggcatcccccaccagctgagcaagccccagaggcagaagcagaccctgcctgatgactacctgtccatggacaccctgtacccaggcagcctgcccccagagctgcgggtgaatgctgatgagcccccaggccccccagagcaggtgggcctgagccagttccacctggagcccaagagccagaaccctgagaccctggaggacatccagagcagcagcctgcaggaggaggccccagcccagctgctgcagctgccccaggaggtggagcccagcacccagcaggaggccccagccctgcccccagagagctccatggagagcctggcccagacccccctgaaccacgaggtgacagtgcagcccccaggagaggaccaggcccactacaacctgcccaagttcaccgtgaagccagcagatgtggaggtgaccatgaccagcgagcccaagaatgaaacagagagcacccaggcccagcaggaggcccccatccagcccccagaggaggccgagcccagcagcacagccctgcggaccacagaccccccacctgagcaccctgaggtgaccctgccccccagcgacaagggccaggcccagcacagccacctgacagaggccaccgtgcagcccctggacctggagctgagcatcaccacagagcccaccacagaggtgaagcccagccccaccacagaggagaccagcgcccagcccccagaccccggcctggccatcaccccagagcccaccacagagatcggccacagcacagccctggagaagacccgggccccccacccagaccaggtgcagaccctgcacaggagcctgacagaggtgacaggcccccccaccaagctggagagcagccaggacagcctggtgcagagcgagacagcccctgaggagcagaaggccagcaccagcaccaacatctgtgagctgtgcacctgtggagatgagaccctgagctgtgtgggcctgagccccaagcagaggctgcggcaggtgcctgtgcctgagccagacacctacaacggcatcttcaccaccctgaacttccagggcaactacatctcctacctggatggaaatgtgtggaaggcctacagctggacagagaagctgatcctgtctgagaactacctgacagagctgcccaaggacagctttgagggcctgctgtacctgcagtacctggacctgagctgcaacaagatccgctacatcgagcggcagacctttgagagcctgcccttcctgcagtacatcaacctgggctgcaacctgatcaccaagctgagcctgggcaccttccaggcctggcacggcatgcagttcctgcacaacctgatcctgaacagaaaccccctgaccaccgtggaggacccctacctgtttgagctgcctgccctgaagtacctggacatgggcaccacccacatcaccctgaccaccctgaagaacatcctgaccatgacagtggagctggagaagctgatcctgcccagccacatggcctgctgcctgtgccagttcaagaacagcattgaggccgtgtgcaagacagtgaagctgcactgcaacacagcctgcctgaccaacagcatccactgcccagaggaggcctctgtgggcaaccctgagggcgccttcatgaagatgctgcaggccaggaagcagcacatgagcacccagctgaccatcgagagcgaggcccccagcgacagcagcggcatcaacctgagcggctttggaggagaccagctggagatccagctgacagagcagctgcggagcctcatccccaatgaagatgtgaggaagttcatgagccacgtgatccgcaccctgaagatggagtgcagcgagacccacgtgcagggcagctgtgccaagctgatgctgaggacaggcctgctgatgaagctgctgtctgagcagcaggaggccaaggccctgaatgtggagtgggacacagaccagcagaagaccaactacatcaatgaaaacatggagcagaatgagcagaaggagcagaagagcagcgagctgatgaaggaggtgcctggagatgactacaagaacaagctgatctttgccatctctgtgaccgtcatcctgatcatcctgatcatcatcttctgcctgattgaggtgaacagccacaagagggccagcgagaagtacaaggacaaccccagcatcagcggggcctag

SEQ ID NO: 317164 - DNA, 2925 bp, Artificial Sequence
  derived and/or modified sequence
atggcccacgcctacaagggccacgagcacctgcgggccgcccggatggcttttgccgaatgcatagcccctgcttgcgtgatgtcctggctccgattctgggggccatggccactgttaacctggcaactcctgagcttactggtgaaagaggctcaacctctggtctgggtcaaggatccattgcagctgacttcaaatcccctgggaccccctgagccctggagttccaggtctagccacctgccatgggagagtcctcacgccccagcccctccggcagccccgggcgatttcgactatttaggccccagtgcctcatcccaaatgagtgctcttcctcaggaaccaaccgagaatctggccccctttctcaaggagcttgacagcgcaggcgaactccccctcgggccagaacctttcttggcagctcaccaagatttaaacgataagcgcacgcctgaagaaaggctgcctgaggtcgtgccactgcttaatcgggaccagaatcaagctctcgtgcaactgcctagactcaaatgggtgcagacaacggacctagatcgggcggctggacatcaggctgatgaaattctggtgccactggactctaaggtctctcgacccacgaagtttgtggtcagtccaaagaacttaaaaaaggatttggcagagaggtggtcacttcctgaaatcgtgggcataccccaccagctttctaagccccaaagacagaagcagactctgcccgatgactacctctcgatggatacactttaccccggttctctgccccccgagttaagagttaatgctgacgagccaccaggtcctcctgaacaggtggggctgagtcaatttcacttagaacctaaaagtcagaaccccgagacgttggaggacattcagtcctcgtctttacaggaagaggcccccgcccagctgctgcaactgccccaggaggtggaaccgtccacccagcaggaggcccccgccctcccgcccgaatcgtctatggaatccttagcccaaacacctcttaatcatgaggttaccgtgcagccacccggcgaggaccaagcacactataatttacccaaattcacggtgaaacccgcagacgtggaggtcaccatgacttcagagcccaaaaacgagaccgagtccacccaagcacagcaggaggccccaatacagccacctgaggaggcagagccctctagcactgccctgcgcaccactgacccccccccagagcacccggaggtgactcttccaccatctgataagggccaggcgcagcacagccatctgactgaagccacagtgcagcccttggacctggaactgtctatcactaccgagcctacaaccgaagtgaagccttctccgactacagaggaaaccagcgcgcagccccctgatcctggactcgcgatcacccctgaaccaactactgagatcggccacagcaccgctctggagaagacacgtgcaccccaccccgatcaagtgcaaacactgcatcggagtctcaccgaagttacaggcccccctaccaaactcgaatcatctcaggactccctcgtgcagtcagaaaccgcccctgaggagcagaaggccagtacctccacaaacatctgtgagctatgtacgtgtggagacgaaaccttgtcttgcgtcggccttagtcctaaacagaggctgaggcaagtgccggtgccagaacccgatacttacaacggcatatttaccactctaaattttcagggaaactatatttcttaccttgatggcaacgtatggaaagcatacagttggactgaaaagttgattctcagcgagaattacctcactgaacttcccaaggatagctttgaaggcctattgtatctacaatatcttgacctgtcctgtaataagattcgctatatcgagcgacagacttttgagagcctgccttttctgcagtacattaatctggggtgtaacttgatcaccaagctgtccctgggaacatttcaagcctggcacggcatgcagttcctgcataatctcattctgaatcgcaatcccctaaccaccgttgaggatccttacctcttcgaactgcctgccctgaaatatctggacatggggactacacatattactctgacaactttgaaaaatatcctgacaatgacagtggaactggaaaagcttatactgccaagtcacatggcctgctgcctgtgtcagtttaagaatagtattgaggccgtgtgtaaaacagtgaaattgcactgtaacacggcctgcctgaccaattcaatccactgtcccgaagaagccagcgtggggaatcccgaaggagcctttatgaagatgctccaagccaggaagcaacatatgtccactcaactgacgatcgaaagcgaagcgccttccgatagttccgggattaatctatctggtttcggaggcgaccagctggaaattcagctgacagagcaactgcggtcactgatccccaacgaagacgttcggaagttcatgtcacatgtgatcaggactctgaaaatggaatgctccgaaacgcacgtgcaaggatcctgtgcgaagctgatgctccgcaccgggctgttgatgaagctgttatcagagcagcaggaagctaaagccctgaatgtagaatgggacaccgaccagcagaagaccaactacattaacgaaaacatggaacagaatgagcagaaagagcagaaatcttccgagctgatgaaggaagttcccggcgacgactacaagaacaagcttatctttgcaatctcagtcaccgtcatccttattattctgattatcatattttgtctgattgaggtgaattcccataaacgggcctctgaaaaatataaggataatccgagtatttctggagcttag

SEQ ID NO: 317165 - DNA, 2925 bp, Artificial Sequence
  derived and/or modified sequence
atggcccacgcctacaaaggacacgagcatctgcgtgcggcacgtatggcctttgccgaatgtatcgccccagcttgcgtcatgtcttggcttcgcttttggggcccatggcctcttttgacgtggcaacttctgtctttgctcgtcaaagaagctcagcctctggtttgggttaaggatcctcttcagcttacctctaatccattgggacctccagagccctggtcctccaggagttcgcaccttccttgggagtcccctcacgcccctgccccaccggctgctcccggtgactttgactacttaggaccaagcgcgtctagccagatgtccgccctgcctcaagaaccaacagagaacctcgccccattcctgaaagagctagacagtgccggtgagctgcctctcgggcctgagccctttctcgcagcgcatcaggatctcaacgacaaacggacacccgaggaacgcctgcccgaggtggtgccgctgcttaatagagaccagaaccaggctttggtccagctcccaaggctaaagtgggtccagaccactgacttggatagggccgctggccatcaggctgatgaaatccttgtgccattggacagtaaagttagtcgccctactaaatttgtggtgagtccgaaaaatctcaaaaaggatttggcagagaggtggagcctgcccgaaatcgtggggatcccacatcagctgtcgaagcctcaaagacagaaacagaccttgcccgacgactatctgtctatggataccctgtaccctggaagtctgcctcctgagctgcgcgtgaacgctgatgagccaccaggtccgccagaacaagtcggactgagtcagttccacctcgagcctaaatcccagaatccggaaactctggaggacattcagagttcaagcctgcaggaggaagcgcctgcacagctacttcagctgccgcaagaagtcgagccaagtacccaacaggaggctccagcgcttccacccgaaagcagtatggagagcctggcacagacacctctgaatcacgaggtcacagtgcagcctcctggtgaggatcaggctcactataacctgcctaaattcacagtaaagcccgcagacgtcgaggtgactatgacatctgagccaaaaaatgaaaccgaatccacacaggctcaacaggaagccccaatacagccccctgaggaggccgagcccagtagcaccgcattgcggacaacagatcctcctcccgagcacccagaggtgaccctgcccccatccgataaagggcaggcccagcactcacatctgacagaggctaccgtccagccattggatttggaactgtccattaccactgagcccaccacagaggtcaagccatctcccacaactgaagagacctccgcacagcctcccgatccaggactggctatcacccccgaacctacaactgaaataggccactccaccgcactcgagaaaaccagggccccacatcccgaccaggtacagaccttgcatcggagccttacggaggtgactggacctcccaccaaactcgagagctcccaagactctctcgtacaatctgagacagctccagaggagcaaaaggccagtacctctactaatatttgcgagctgtgcacgtgtggggatgagactctgagctgtgttggcctttcccctaagcagaggctcagacaggtgccagtacctgaacccgacacctataacggcatttttaccaccctgaacttccaggggaattatatttcctatcttgatggaaacgtctggaaagcctacagttggacggagaagcttatactgagcgagaactatttgacagaactaccaaaagactcttttgaaggactactctacttgcaatatttggacctgagctgtaataagattcggtatatagaaagacagacatttgaatccctcccctttttacagtatataaaccttggatgcaacctaatcaccaaactcagtctcggcacatttcaggcctggcatggaatgcaattcttgcataatctcatcctcaatcgaaatccattaacaaccgtggaggacccatatctttttgagttgcctgccctgaaatacctcgacatgggcacaacacacattaccctcactacattgaaaaacatcctgaccatgaccgtcgaacttgagaagttgattctccctagccatatggcttgttgcctgtgccagttcaaaaactcaatagaagccgtttgtaagactgtcaaactgcactgtaatactgcatgcctaactaatagcatccattgtcctgaggaagcttctgtgggaaacccagaaggcgctttcatgaagatgttacaggcccgtaaacagcatatgtctacccagctcactattgaatcagaggcaccttctgactcaagtggcatcaacctgagcggcttcggaggagaccaactcgagatccaattgacagaacaactccggtctttaatacccaatgaagatgtgcgcaagttcatgtcacatgtcataaggacgctgaaaatggagtgcagcgaaacccatgtccagggcagctgtgctaaactgatgcttaggaccggcctgctaatgaagctcttgagcgagcagcaagaggccaaggcattaaacgttgaatgggatacagaccagcagaaaaccaactacatcaacgagaatatggagcaaaacgagcagaaggagcaaaagtcttcagaattgatgaaggaggtgccaggcgacgactacaagaataaactcattttcgctatctccgtcacggtaatcttgattattcttatcattatcttttgcctgatcgaggttaactcccacaagcgagcatctgagaaatataaggacaaccccagcatttctggtgcatag

SEQ ID NO: 317166 - protein, 865 aa, Artificial Sequence
  derived and/or modified sequence
MSALPQEPTENLAPFLKELDSAGELPLGPEPFLAAHQDLNDKRTPEERLPEVVPLLNRDQNQALVQLPRLKWVQTTDLDRAAGHQADEILVPLDSKVSRPTKFVVSPKNLKKDLAERWSLPEIVGIPHQLSKPQRQKQTLPDDYLSMDTLYPGSLPPELRVNADEPPGPPEQVGLSQFHLEPKSQNPETLEDIQSSSLQEEAPAQLLQLPQEVEPSTQQEAPALPPESSMESLAQTPLNHEVTVQPPGEDQAHYNLPKFTVKPADVEVTMTSEPKNETESTQAQQEAPIQPPEEAEPSSTALRTTDPPPEHPEVTLPPSDKGQAQHSHLTEATVQPLDLELSITTEPTTEVKPSPTTEETSAQPPDPGLAITPEPTTEIGHSTALEKTRAPHPDQVQTLHRSLTEVTGPPTKLESSQDSLVQSETAPEEQKASTSTNICELCTCGDETLSCVGLSPKQRLRQVPVPEPDTYNGIFTTLNFQGNYISYLDGNVWKAYSWTEKLILSENYLTELPKDSFEGLLYLQYLDLSCNKIRYIERQTFESLPFLQYINLGCNLITKLSLGTFQAWHGMQFLHNLILNRNPLTTVEDPYLFELPALKYLDMGTTHITLTTLKNILTMTVELEKLILPSHMACCLCQFKNSIEAVCKTVKLHCNTACLTNSIHCPEEASVGNPEGAFMKMLQARKQHMSTQLTIESEAPSDSSGINLSGFGGDQLEIQLTEQLRSLIPNEDVRKFMSHVIRTLKMECSETHVQGSCAKLMLRTGLLMKLLSEQQEAKALNVEWDTDQQKTNYINENMEQNEQKEQKSSELMKEVPGDDYKNKLIFAISVTVILIILIIIFCLIEVNSHKRASEKYKDNPSISGA

SEQ ID NO: 317167 - DNA, 1143 bp, Artificial Sequence
  derived and/or modified sequence
atgggcggcgagaagttcgacagcacccaccccgagggctacctgttcggcgagaacagcgacctgaacttcctgggcaacagacccgtggtgttcccctacgccgccccccccccccaggagcccgtgaagaccctgagaagcctggtgaacatcagaaaggacaccctgagactggtgaagtgcgccgaggaggtgaagagccccggcgaggaggccagcaaggccaaggtgcactacaacgtggagttcaccttcgacaccgacgccagagtggccatcaccatctactaccaggccaccgaggagttccagaacggcatcgccagctacatccccaaggacaacagcctgcagagcgagaccgtgcagtacaagagaggcgtgtgccagcagttctgcctgcccagccacaccgtggaccccagcgagtgggccgaggaggagctgggcttcgacctggacagagaggtgtaccccctggtggtgcacgccgtggtggacgagggcgacgagtacttcggccactgccacgtgctgctgggcaccttcgagaagcacaccgacggcaccttctgcgtgaagcccctgaagcagaagcaggtggtggacggcgtgagctacctgctgcaggagatctacggcatcgagaacaagtacaacacccaggacagcaaggtggccgaggacgaggtgagcgacaacagcgccgagtgcgtggtgtgcctgagcgacgtgagagacaccctgatcctgccctgcagacacctgtgcctgtgcaacacctgcgccgacaccctgagataccaggccaacaactgccccatctgcagactgcccttcagagccctgctgcagatcagagccatgagaaagaagctgggccccctgagccccaccagcttcaaccccatcatcagcagccagaccagcgacagcgaggagcaccccagcagcgagaacatcccccccggctacgaggtggtgagcctgctggaggccctgaacggccccctgaccccccccagcctgctgaagatccagaagatcagctgggcctggctgcaggcccccgtggtgcccgccacctgggaggccgaggccggcgagtggcccgagcccggcagaagaagcctgcagtag

SEQ ID NO: 317168 - DNA, 1143 bp, Artificial Sequence
  derived and/or modified sequence
atgggtggtgagaaattcgatagcactcatcctgagggctacttgtttggagagaacagcgatttaaacttcctagggaaccggcctgtcgttttcccctacgccgctccacccccacaggagccagtgaaaacattaaggtctctcgtcaacatacggaaggatacactccggcttgttaagtgcgctgaagaagttaaatccccaggggaggaggcctctaaagcgaaggtgcactacaacgtggaattcacgtttgacactgatgcccgcgtagcaattaccatttactaccaggctaccgaagaattccagaacggcatcgcgtcatatattcccaaagataactccttacaatctgaaacagtgcagtacaagcgtggagtctgccagcagttctgtttgcctagtcacacagtcgatcctagcgagtgggctgaggaggagcttggcttcgacctcgaccgtgaggtataccctctggtggtgcatgccgtggtggacgaaggggacgagtatttcggacactgccacgtcctgcttggtactttcgaaaaacacaccgacgggacattttgtgtcaagccactgaaacagaagcaagttgttgacggagtaagttatttactgcaggaaatctatgggattgaaaacaagtataatacccaggattccaaggtcgcagaagatgaagtgtccgataattccgccgagtgtgttgtctgtctgagcgacgtgagagacacactgattttgccttgtcgccacttgtgtctgtgtaacacttgtgctgataccctgcgataccaggccaataattgtccaatctgtcgactgccattccgcgcgcttctgcagatacgggctatgaggaaaaagctgggacctctgtcaccgacatccttcaaccccatcataagtagtcagacatccgacagtgaggaacacccatcatctgagaatatacctcccgggtatgaggtggtctccctcctcgaggcactgaacggccccctcacgcccccatcacttctgaagatccagaagatctcttgggcttggttgcaggctcctgttgtaccagctacttgggaggccgaggctggggagtggcccgagccagggcgccggtccctccagtag

SEQ ID NO: 317169 - DNA, 1143 bp, Artificial Sequence
  derived and/or modified sequence
atgggcggggagaagtttgacagcacccaccctgagggctacctgtttggagagaacagcgacctgaacttcctgggcaacagacctgtggtgttcccctatgctgcccccccaccccaggagcctgtgaagaccctgcggagcctggtgaacatcaggaaggacaccctgcggctggtgaagtgtgccgaggaggtgaagagccctggagaggaggccagcaaggccaaggtgcactacaacgtggagttcacctttgacacagatgcccgggtggccatcaccatctactaccaggccacagaggagttccagaatggcatcgccagctacatccccaaggacaacagcctgcagagcgagaccgtgcagtacaagaggggcgtgtgccagcagttctgcctgcccagccacacagtggaccccagcgagtgggccgaggaggagctgggctttgacctggaccgggaggtgtaccccctggtggtgcatgctgtggtggatgaaggagatgagtacttcggccactgccacgtgctgctgggcacctttgagaagcacacagatggcaccttctgtgtgaagcccctgaagcagaagcaggtggtggatggagtgtcctacctgctgcaggagatctacggcatcgagaacaagtacaacacccaggacagcaaggtggctgaagatgaggtgtctgacaacagcgcagaatgtgtggtgtgcctgagtgatgtgcgggacaccctcatcctgccctgccgccacctgtgcctgtgcaacacctgtgccgacaccctgcgctaccaggccaacaactgccccatctgccgcctgcccttccgggccctgctgcagatccgggccatgaggaagaagctgggccccctgagccccaccagcttcaaccccatcatcagcagccagaccagtgacagcgaggagcaccccagcagcgagaacatccccccaggctatgaggtggtgtccctgctggaggccctgaatggccccctgaccccacccagcctgctgaagatccagaagatctcctgggcctggctgcaggcccctgtggtgcctgccacctgggaggccgaggccggggagtggccagagcccggccgccgcagcctgcagtag

SEQ ID NO: 317170 - DNA, 1143 bp, Artificial Sequence
  derived and/or modified sequence
atgggcggcgagaagttcgacagcacccaccccgagggctacctgtttggagagaattcagacctgaattttctcggcaacagacctgtcgtcttcccgtatgccgcccctcccccacaggaaccggttaagaccctgcgctcactggtaaacatcagaaaagataccctgcggctggtcaagtgcgcagaggaggtcaagagtccgggtgaagaggcgtccaaggcaaaggtgcactacaatgttgagtttaccttcgatacagatgcgagagtggctatcactatctattaccaggctacggaggagttccaaaatggcatcgcctcctacatccctaaggataactccctgcagtctgaaacggttcaatataagcgaggggtgtgtcagcagttctgtctgccatcacacaccgtggatccaagcgagtgggctgaggaggaacttggtttcgacttggaccgggaggtttaccctcttgtggtccatgccgtcgtagacgagggggacgagtatttcggccactgtcatgtcctgctgggaacctttgaaaaacacaccgatggcacgttctgcgtcaagcccctgaaacagaagcaggttgtggacggagtgagctacctgcttcaggagatctatgggatagagaacaaatataatactcaggattccaaagtggccgaagacgaggtctctgacaactccgccgaatgcgtggtgtgtttatctgatgtgagggacaccctgattctcccttgtaggcatctgtgtctttgtaatacctgcgcagatacgttacgctaccaagctaacaattgccctatctgcaggcttccattcagagcactcttgcagatccgggctatgcgcaaaaaattgggccccttatctcctacctcatttaatcctatcatttccagccagacatccgattctgaggagcaccccagctctgagaacattccacctggatacgaggtggtgtccctgctggaggctctcaacggcccattgacacctccttcccttctgaaaattcagaagatctcctgggcttggcttcaggcacctgttgtgcccgcgacctgggaagctgaggctggagagtggccggagccaggtcgaagatcgctccagtag

SEQ ID NO: 317171 - DNA, 1143 bp, Artificial Sequence
  derived and/or modified sequence
atggggggtgagaagttcgattcaactcaccccgaagggtatctgttcggggaaaattccgacctgaattttctgggaaatcggccagtcgttttcccctacgctgcccctccaccacaggagccggtcaaaacattacggtccctcgtcaatatacggaaggacactctgcgcctggttaagtgcgcggaagaggtgaagagccctggggaggaggcatctaaagctaaagtccactataacgtggagtttacctttgatacagacgccagggtggcgattacaatttattaccaagcgacagaggaattccagaacggtatagctagctatattcctaaagataactcgctccagtctgagacagtgcagtataaacggggagtgtgccagcaattttgcctgccaagccatacagtagatccaagcgagtgggcagaggaggagttgggtttcgatttggaccgggaagtgtacccgctggtcgtgcacgcagttgtggatgagggcgacgagtatttcggccactgccacgtgctgctgggtactttcgagaagcacactgacgggacattctgcgtgaagcccctaaagcagaaacaagtcgttgatggagtttcatatttacttcaggaaatatatggaatcgagaacaagtataatacgcaagatagcaaggttgcagaggatgaagtgagcgataactccgctgagtgtgtggtgtgcctctcggatgtgcgggacacactcattttaccttgtcgccacttgtgcctgtgtaatacatgtgccgacacactcagataccaggctaacaattgtccgatctgtcgtctgccttttcgcgctctcctccagatcagggcaatgagaaagaagctgggtcctctctctcccacctcgttcaaccctatcatatcttcgcaaacatctgatagcgaggagcacccttccagcgagaatatcccaccaggatatgaggtggtcagccttctcgaagctctaaatggtcccttgactcctcctagtttattgaaaatacaaaagatttcatgggcctggcttcaggcccctgtggtacctgctacctgggaagccgaagccggagaatggcccgaacctggcagacggagtctgcagtag

SEQ ID NO: 317172 - DNA, 1326 bp, Artificial Sequence
  derived and/or modified sequence
gcggccgcggtgaagcgcggagggcggcgcgggcaccggggccgggccggggctgcagccgcagcggccatgggggccctgacgagccggcagcacgcgggcgtggaggaggtggacatcccgtctaattccgtgtaccgctacccgcccaagtccggaagctattttgccagccacttcattatgggaggagagaagtttgactcaactcatcctgaaggttacctgtttggagagaacagcgatctgaactttctggggaacagaccagttgtgtttccttacgccgccccacctccccaagaacccgtgaagactctgagaagcctggtcaatatccgaaaggacacactgaggctcgtcaaatgtgctgaggaagtgaagagccctggagaagaggccagtaaagctaaagtccactacaatgttgagttcacctttgacacagatgctcgggtagccatcaccatctattaccaggccacggaagagttccagaatggtattgccagctacattcccaaagacaacagcctccagtcggagactgtgcagtacaagcgaggagtgtgtcagcagttctgcctgccctcccacaccgtggatccctccgagtgggccgaagaggagcttggctttgatttagaccgagaagtttaccctctagtggtacatgccgtggtggatgaaggagacgagtattttggccattgccatgtactgctgggtacttttgagaagcacacagatggaactttctgtgtcaagcccctcaaacagaaacaagtagtagacggggtcagctacctccttcaggagatctatggaattgaaaacaagtacaacacacaagattctaaggtggctgaagacgaagtgagtgataacagtgccgagtgtgtggtgtgtctctcggatgtccgggacaccttgattctgccctgtcgccacctctgcctctgtaacacctgtgcagacacgctgcgctaccaggccaacaactgccccatctgccgactgcccttccgggcactgcttcagatccgagccatgaggaaaaaattgggccccttgtccccaaccagctttaaccccatcatctcatcccagacatctgactctgaagagcatccatcctcagagaatattccaccaggctatgaagtagtatctcttctggaggccctcaacgggcccctcaccccgccgtctctactaaaaatacaaaaaattagctgggcatggttgcaggcgcctgtagtcccagctacttgggaggctgaggcaggagaatggcctgaacccgggaggcggagcttgcagtga

SEQ ID NO: 317173 - protein, 984 aa, Artificial Sequence
  derived and/or modified sequence
MAPGMSGRGGAALLCLSALLAHASGRSHPASPSPPGPQASPVLPVSYRLSHTRLAFFLREARPPSPAVANSSLQRSEPFVVFQTKELPVLNVSLGPFSTSQVVARELLQPSSTLDIPERLTVNWKVRAFIVRSHVPASQPVVQVLFYVAGRDWDDFGVTERLPCVRLHAFRDAREHPLLRIGSISLFRPPPRRTLQEHRLDSNLMIRLPDRPLKPGEVLSILLYLAPNSSSPSSPSVEHFTLRVKAKKGVTLLGTKSRSGQWHVTSELLTGAKHSTATVDVAWAQSTPLPPREGQGPLEILQLDFEMENFTSQSVKRRIMWHIDYRGHGALPDLERAVTELTVIQRDVQAILPLAMDTEIINTAILTGRTVAIPVKVIAIEVNGLVLDISALVECESDNEDIIKVSSSCDYVFVSGKESRGSMNARVTFRYDVLNAPLEMTVWVPKLPLHIELSDARLSQVKGWRVPILPDRRSVRESEDEDEEEEERRQSASRGCTLQYQHATLQVFTQFHTTSSEGTDQVVTMLGPDWLVEVTDLVSDFMRVGDPRVAHMVDSSTLAGLEPGTTPFKVVSPLTEAVLGETLLTVTEEKVSITQLQAQVVASLALSLRPSPGSSHTILATTAAQQTLSFLKQEALLSLWLSYSDGTTAPLSLYSPRDYGLLVSSLDEHVATVTQDRAFPLVVAEAEGSGELLRAELTIAESCQKTKRKSVLATTPVGLRVHFGRDEEDPTYDYPGPSQPGPGGGEDEARGAGPPGSALPAPEAPGPGTASPVVPPTEDFLPLPTGFLQVPRGLTDLEIGMYALLGVFCLAILVFLINCIVFVLRYRHKRIPPEGQTSMDHSHHWVFLGNGQPLRVQGELSPPAGNPLETVPAFCHGDHHSSGSSQTSVQSQVHGRGDGSSGGSARDQAEDPASSPTSKRKRVKFTTFTTLPSEELAYDSVPAGEEDEEEEEDLGWGCPDVAGPTRPTAPPDLHNYMRRIKEIA

SEQ ID NO: 317174 - DNA, 1527 bp, Artificial Sequence
  derived and/or modified sequence
atgagacccgtggccctgctgctgctgcccagcctgctggccctgctggcccacggcctgagcctggaggcccccaccgtgggcaagggccaggcccccggcatcgaggagaccgacggcgagctgaccgccgcccccacccccgagcagcccgagagaggcgtgcacttcgtgaccaccgcccccaccctgaagctgctgaaccaccaccccctgctggaggagttcctgcaggagggcctggagaagggcgacgaggagctgagacccgccctgcccttccagcccgacccccccgcccccttcacccccagccccctgcccagactggccaaccaggacagcagacccgtgttcaccagccccacccccgccatggccgccgtgcccacccagccccagagcaaggagggcccctggagccccgagagcgagagccccatgctgagaatcaccgcccccctgccccccggccccagcatggccgtgcccaccctgggccccggcgagatcgccagcaccaccccccccagcagagcctggacccccacccaggagggccccggcgacatgggcagaccctgggtggccgaggtggtgagccagggcgccggcatcggcatccagggcaccatcaccagcagcaccgccagcggcgacgacgaggagaccaccaccaccaccaccatcatcaccaccaccatcaccaccgtgcagacccccggcccctgcagctggaacttcagcggccccgagggcagcctggacagccccaccgacctgagcagccccaccgacgtgggcctggactgcttcttctacatcagcgtgtaccccggctacggcgtggagatcaaggtgcagaacatcagcctgagagagggcgagaccgtgaccgtggagggcctgggcggccccgaccccctgcccctggccaaccagagcttcctgctgagaggccaggtgatcagaagccccacccaccaggccgccctgagattccagagcctgcccccccccgccggccccggcaccttccacttccactaccaggcctacctgctgagctgccacttccccagaagacccgcctacggcgacgtgaccgtgaccagcctgcaccccggcggcagcgccagattccactgcgccaccggctaccagctgaagggcgccagacacctgacctgcctgaacgccacccagcccttctgggacagcaaggagcccgtgtgcatcgccgcctgcggcggcgtgatcagaaacgccaccaccggcagaatcgtgagccccggcttccccggcaactacagcaacaacctgacctgccactggctgctggaggcccccgagggccagagactgcacctgcacttcgagaaggtgagcctggccgaggacgacgacagactgatcatcagaaacggcgacaacgtggaggccccccccgtgtacgacagctacgaggtgaccgccccccccccccccccccccctgcagccccactaccacagagtgagcgtgtag

SEQ ID NO: 317175 - DNA, 1527 bp, Artificial Sequence
  derived and/or modified sequence
atgaggccagtggctctgctgctcctccctagcttgctggcgctgctcgctcacgggctgtccctcgaggccccaaccgtaggtaaaggccaggccccggggatcgaggaaactgacggagagttgacagccgcacctacaccggagcagcctgagcgtggtgtgcacttcgttacgaccgccccaacattaaagctgctgaaccaccatccactgctggaagaatttctccaggagggacttgagaaaggggacgaggaattgcggccagcactgcccttccagcctgacccccccgcgccttttacaccttcgccgcttccgcgtctcgccaaccaggatagtcgacctgtcttcacgtcacccactcctgctatggctgcagtaccgactcaacctcagagtaaagaaggcccttggagtccagaaagcgagtcacctatgcttaggattactgcacctctgcctcctggtcctagtatggccgttcccactttggggcctggcgagattgccagtacaacacccccctctagggcgtggacgccaacccaagagggcccaggcgatatgggacggccttgggtcgccgaggttgtgagccaaggtgcggggattgggatccagggcacaatcaccagctcaactgcgtctggtgatgacgaagaaaccactacgaccacaaccattattaccactaccattaccaccgttcagacaccggggccctgcagttggaacttttccggacctgaggggagcctcgattctccaaccgatctttctagtcccactgacgtgggcctcgactgtttcttctatatttctgtgtatccaggatatggagtggagattaaagtgcagaacatctctctccgggaaggagagacagtcactgtcgaaggtctcggaggtccggacccactgcccctggcgaatcaatcgtttctactgcgcgggcaggttatacggtcccccacccatcaggccgcgcttagattccagtccctgccaccccccgccggacctgggaccttccattttcattatcaagcctatctgctctcttgtcacttcccacggagaccagcctacggggatgtgaccgtgactagtctgcaccctggagggtctgcacgctttcattgtgcgaccgggtatcagctcaaaggcgcccgacatctaacgtgtcttaacgccactcaaccattctgggattccaaggaacctgtttgcatagctgcttgcggaggcgtgataaggaacgccacaacgggtaggatcgtctccccaggcttccccggaaattactctaacaatcttacttgtcactggttgctggaagctcctgaggggcaaaggctgcatctccactttgagaaagtttctctggcagaggatgatgaccggctgattattcgcaatggggataatgtggaggccccacctgtatacgattcctacgaggtgactgctccgccacctccgccgcccctgcagccacattatcaccgggtgagcgtgtag

SEQ ID NO: 317176 - DNA, 1527 bp, Artificial Sequence
  derived and/or modified sequence
atgaggcctgtggccctgctgctgctgcccagcctgctggccctgctggcccacggcctgagcctggaggcccccaccgtgggcaagggccaggcccctggcatcgaggagacagatggagagctgacagctgcccccaccccagagcagcctgagcggggcgtgcactttgtgaccacagcccccaccctgaagctgctgaaccaccaccccctgctggaggagttcctgcaggagggcctggagaagggagatgaggagctgcggcctgccctgcccttccagcctgaccccccagcccccttcacccccagccccctgccccggctggccaaccaggacagcaggcctgtgttcaccagccccaccccagccatggctgctgtgcccacccagccccagagcaaggagggcccctggagccctgagagcgagagccccatgctgcgcatcacagcccccctgcccccaggccccagcatggctgtgcccaccctgggccctggagaaattgccagcaccaccccacccagccgggcctggacccccacccaggagggccctggggacatgggccggccctgggtggccgaggtggtgtcccagggcgccggcatcggcatccagggcaccatcaccagcagcacagccagcggagatgatgaggagaccaccaccaccaccaccatcatcaccaccaccatcaccaccgtgcagaccccaggcccctgctcctggaacttcagcggccctgagggcagcctggacagccccacagacctgagcagccccacagatgtgggcctggactgcttcttctacatctctgtgtacccaggctatggagtggagatcaaggtgcagaacatcagcctgcgggagggggagaccgtgacagtggagggcctgggcggccctgaccccctgcccctggccaaccagagcttcctgctgcggggccaggtgatccgcagccccacccaccaggccgccctgcgcttccagagcctgcccccacctgctggccctggcaccttccacttccactaccaggcctacctgctgagctgccacttccccaggaggcctgcctatggagatgtgacagtgaccagcctgcaccctgggggcagcgcccgcttccactgtgccaccggctaccagctgaagggggcccggcacctgacctgcctgaatgccacccagcccttctgggacagcaaggagcctgtgtgcatcgccgcctgtggcggcgtcatcagaaatgccaccaccggccgcatcgtgtccccaggcttccctggcaactacagcaacaacctgacctgccactggctgctggaggcccctgagggccagaggctgcacctgcactttgagaaggtgtccctggccgaggatgatgacaggctcatcatcagaaatggagacaacgtggaggcccctcctgtgtatgacagctatgaggtgacagcccctcctcctcctccacccctgcagccccactaccaccgggtgtctgtgtag

SEQ ID NO: 317177 - DNA, 1527 bp, Artificial Sequence
  derived and/or modified sequence
atgcggcccgtggccctgctgctgctgcccagcctgctggccctgctcgcccacggccttagcctggaagcacctacagtcggaaaaggacaggctccaggaattgaagagacagacggggagctcaccgccgctcccactccagaacaaccagagcggggggtgcatttcgtgactactgcacccaccctgaaacttctgaaccaccacccccttttggaagaattcctgcaggaagggctcgagaaaggagatgaggagctgcgccccgccctgccgttccagcctgacccacctgccccctttaccccatcacctttgcctaggctcgctaaccaggactctcgtcccgtgtttaccagccccaccccggctatggccgctgttcctacgcagccacagtcaaaggaagggccttggtcaccagagagtgagagcccaatgcttcgtattaccgccccactcccccctggcccttccatggcagtgcctacattgggcccgggcgagatcgcatctactacccctccttcacgcgcctggacgcctacccaggaaggcccaggagacatggggaggccatgggtggcagaggtcgtgagtcagggggccggaatcggcatccaggggaccattacctcctcaaccgcttccggagacgacgaggagacaacgactaccacgactatcatcacgaccactatcacaaccgttcaaaccccaggcccatgttcgtggaatttttccggccctgaaggttctcttgatagcccaacagacctgagctctccgacagacgtggggctcgactgcttcttttatatctcagtgtacccaggctacggagtcgaaatcaaggttcagaatatttctctgcgcgaaggcgagacggtaaccgtggagggactgggaggcccggacccgctgcccttggcgaaccagtctttcttgctacgaggccaggtgatccgtagtccaacccaccaagccgccttaagattccagagcctcccgcctcctgccgggcctggcacttttcattttcactaccaagcctacctcctgtcctgccactttcctagaaggcccgcgtacggcgatgtgaccgttacatcccttcatcccgggggctcggcccgcttccactgtgcgaccggttatcagcttaagggggcccggcaccttacttgcctgaatgctactcagcccttctgggattccaaggaacccgtgtgtattgcagcctgcggtggcgtgattcggaatgccacaaccggcagaatcgtgtccccgggatttcccgggaactattccaataatctcacatgccattggctgctcgaagctcccgaaggccagcgattgcacttgcatttcgagaaagtgtctttggcggaagacgacgataggttaatcatccgaaatggtgataacgtcgaagccccgccagtctatgactcgtacgaggtcacagctcctccccctcctcccccactacagcctcactatcatcgcgtgagtgtctag

SEQ ID NO: 317178 - DNA, 1527 bp, Artificial Sequence
  derived and/or modified sequence
atgcggccagtggccttgctcctcctcccttcactgttggccttattggctcatggactttctcttgaggcacccacagttgggaaggggcaggccccaggtatagaggaaacagatggtgaattgaccgccgctcctactccagagcagccagaaaggggggtccatttcgttaccacggctcctacactgaagttgctgaaccaccaccctttattagaggagttcttgcaggagggactggaaaaaggtgatgaggagctcaggccagccttgccgtttcagccagatccacctgcacctttcacaccctctcctctccctcggttggcaaaccaggactcacgtcctgtgttcacctccccaactcctgcaatggcggcagtgccaactcaaccacagtccaaggaggggccatggtctccagagtccgaaagtccaatgctgagaatcaccgctccactgcccccagggcctagtatggctgtacccacccttggccctggcgagattgcatctaccactccaccatctagggcttggacaccaactcaagagggacctggggatatgggtcggccatgggtggctgaggttgttagccaaggcgcaggaatcggcatccagggcactattacaagtagtactgcctcaggggacgacgaagagaccactactactactaccatcataactaccaccatcactactgtccagactccaggcccatgcagttggaacttcagcggcccagaaggatcacttgacagccctactgacctctcatctcctaccgatgtaggccttgattgcttcttctacatatcagtgtatcctggctacggggttgagattaaggtgcagaacattagcctgagagaaggagagaccgtgacggtggaagggctcgggggacccgaccctctcccactagccaaccagagctttctcctgagaggccaggtgattaggtccccaacccaccaggccgctctgcgcttccaatctctgccccctccggcaggacccggtacctttcatttccactaccaggcctatcttctaagctgccatttcccgaggcgtcccgcttacggcgatgttactgtgacgtctctgcatcccggtggcagtgctcgtttccactgtgcgaccggctaccagctaaagggcgcaagacatctgacttgcttgaacgccacccagccgttctgggacagtaaagagcccgtgtgtattgcagcatgtgggggtgttatccggaacgcaactacgggtcgaatcgtgtctcccggattcccaggcaactatagcaataatctcacatgtcactggctgctggaggcaccagagggtcagagacttcacctacatttcgagaaggttagtttggctgaggatgatgaccgccttattatccgtaacggagataatgtagaagcccctcccgtgtatgattcctatgaagtaacggctccacctcccccacctccattgcaacctcactatcaccgtgtgagtgtgtag

SEQ ID NO: 317179 - DNA, 1721 bp, Artificial Sequence
  derived and/or modified sequence
gatccccggcgccgtcgccaggcgctggccgtggtgctgattctgtcaggcgctggcggcggcagcggcggtgacggctgcggccccgctccctctacccggccggacccggctctgcccccgcgcccaagccccaccaagccccccgccctcccgccgcggtcccagcccagggcgcggccgcaaccagcaccatgcgcccggtagccctgctgctcctgccctcgctgctggcgctcctggctcacggactctctttagaggccccaaccgtggggaaaggacaagccccaggcatcgaggagacagatggcgagctgacagcagcccccacacctgagcagccagaacgaggcgtccactttgtcacaacagcccccaccttgaagctgctcaaccaccacccgctgcttgaggaattcctacaagaggggctggaaaagggagatgaggagctgaggccagcactgcccttccagcctgacccacctgcacccttcaccccaagtccccttccccgcctggccaaccaggacagccgccctgtctttaccagccccactccagccatggctgcggtacccactcagccccagtccaaggagggaccctggagtccggagtcagagtcccctatgcttcgaatcacagctcccctacctccagggcccagcatggcagtgcccaccctaggcccaggggagatagccagcactacaccccccagcagagcctggacaccaacccaagagggtcctggagacatgggaaggccgtgggttgcagaggttgtgtcccagggcgcagggatcgggatccaggggaccatcacctcctccacagcttcaggagatgatgaggagaccaccactaccaccaccatcatcaccaccaccatcaccacagtccagacaccaggcccttgtagctggaatttctcaggcccagagggctctctggactcccctacagacctcagctcccccactgatgttggcctggactgcttcttctacatctctgtctaccctggctatggcgtggaaatcaaggtccagaatatcagcctccgggaaggggagacagtgactgtggaaggcctgggggggcctgacccactgcccctggccaaccagtctttcctgctgcggggccaagtcatccgcagccccacccaccaagcggccctgaggttccagagcctcccgccaccggctggccctggcaccttccatttccattaccaagcctatctcctgagctgccactttccccgtcgtccagcttatggagatgtgactgtcaccagcctccacccagggggtagtgcccgcttccattgtgccactggctaccagctgaagggcgccaggcatctcacctgtctcaatgccacccagcccttctgggattcaaaggagcccgtctgcatcgctgcttgcggcggagtgatccgcaatgccaccaccggccgcatcgtctctccaggcttcccgggcaactacagcaacaacctcacctgtcactggctgcttgaggctcctgagggccagcggctacacctgcactttgagaaggtttccctggcagaggatgatgacaggctcatcattcgcaatggggacaacgtggaggccccaccagtgtatgattcctatgaggtgactgccccgcccccgcccccgcccctacaaccgcattaccatagagtcagcgtttga

SEQ ID NO: 317180 - protein, 57 aa, Artificial Sequence
  derived and/or modified sequence
MSSSGAKDKPELQFPFLQDEDTVATLLECKTLFILRGLPGSGKSTLARVIVDKYRDG

SEQ ID NO: 317181 - DNA, 894 bp, Artificial Sequence
  derived and/or modified sequence
atgaatcgtggtttctcccgcaagagtcacactttcctgcccaaaattttttttcgcaagatgagctcctcgggagcgaaggacaaacctgaattgcaatttcccttccttcaggatgaggacacagttgctactttactggaatgcaagaccctgttcatcctgcgtggactgcccgggtccggaaagtcgacacttgcccgcgtaatcgttgacaagtatcgggacgggaccaagatggtgtccgctgacgcctacaagattacccctggcgcccgcggggctctgaaagaactgcggcaattcgttccaggcgatgagcctcgggagaagatggacctggtgacgtattttggcaagagacctcccggggttctacattgtacaacaaaattttgtgattacggaaaggcaccaggtgcagaggaatacgctcagcaggatgtattaaaaaaatcgtatagtaaagcgttcaccttgacaatttccgcactctttgtgactcccaagaccaccggcgcaagggtcgagctcagtgaacagcagctgcagctatggccttccgacgtagacaagctgtcccctacagataacttgcctaggggtagtagagcccatattaccctcggttgcgccgccgacgttgaagccgtgcagaccggcttggatcttttagagattctgcgccaggagaagggtggttcacggggagaagaggtgggggagctgtcacgcggcaaactctattccttaggcaacggcaggtggatgctgacgttagccaagaatatggaagtaagggctatctttactgggtattatggcaaaggcaaacccgtcccaactcagggtagcaggaagggtggagcattgcaatcctgtactattatttag

SEQ ID NO: 317182 - DNA, 1206 bp, Artificial Sequence
  derived and/or modified sequence
atgtctagtagcggtgcaaaggataaaccagaactacagtttccatttcttcaagatgaggacacggtggccaccttgctggagtgcaagaccctgtttatcttgcgtggactcccagggtctgggaagtccacactggcccgcgtgattgtcgacaagtaccgggacggcactaagatggtgtcagccgatgcctataagattacaccaggtgccaggggtgcttttagcgaagagtataaacgcctagacgaagatctcgcagcttattgtcgcagaagggatatcagaattttggttctggatgatacaaaccatgaaagagagagacttgagcagctctttgagatggctgatcagtaccagtaccaggtggtactagttgaacctaaaacagcatggcgactagactgcgctcagctgaaggagaagaaccagtggcagctgtcggccgacgacctgaagaagctgaagccgggcttagaaaaggacttcctgcccctctactttggctggttcttgactaagaagagtagcgaaactctaagaaaggcaggccaggtgtttctggaagaactcggcaaccacaaggcattcaagaaggaactccgccagttcgttccaggtgacgagccgcgagagaaaatggacctggtcacctatttcgggaaaagaccccccggagtcctccattgtacgacaaaattctgtgattacggaaaagcgcctggcgcagaagagtatgctcagcaggacgttctaaagaaatcttattcaaaggccttcaccttgaccatctctgctctcttcgtgacaccgaaaactaccggggcgagggtcgagctgagcgaacagcaactgcagttgtggcccagcgacgttgacaaattgtcccctacagacaacctgcctagaggttcaagggcacacattacactgggttgcgctgccgacgtggaggctgtgcaaacggggctggaccttctggagatactcaggcaggagaaaggtggctcccgcggagaggaggtgggcgagttatcacgaggaaaactgtatagcttgggaaatggccgctggatgctcactcttgctaagaacatggaggtccgagcaatttttactggatactacggtaaggggaagcctgttcccacacagggcagcagaaaagggggcgctctgcaaagctgtacaatcatatag

SEQ ID NO: 317183 - DNA, 174 bp, Artificial Sequence
  derived and/or modified sequence
atgagcagttccggtgcaaaggacaaacccgagctacagtttccattcctgcaggatgaggatacagtagctaccttactggagtgtaagacactgttcatattacgaggattaccaggatccgggaaaagcacactggcccgggtcatagttgataagtaccgagatgggtag

SEQ ID NO: 317184 - DNA, 894 bp, Artificial Sequence
  derived and/or modified sequence
atgaacagaggcttcagcaggaagagccacaccttcctgcccaagatcttcttcaggaagatgagcagcagcggggccaaggacaagccagagctgcagttccccttcctgcaggatgaggacacagtggccaccctgctggagtgcaagaccctcttcatcctgcggggcctgcccggcagcggcaagagcaccctggcccgggtcatcgtggacaagtacagagatggcaccaagatggtgtctgcagatgcctacaagatcacccctggggcccggggggccctgaaggagctgcggcagtttgtgcctggagatgagccccgggagaagatggacctggtgacctactttgggaagaggcctcctggggtgctgcactgcaccaccaagttctgtgactatggcaaggcccctggagctgaggagtatgcccagcaggatgtgctgaagaagagctacagcaaggccttcaccctgaccatcagcgccctgtttgtgacccccaagaccaccggggcccgggtggagctgtctgagcagcagctgcagctgtggcccagtgatgtggacaagctgagccccacagacaacctgccccggggcagccgggcccacatcaccctgggctgtgccgcagatgtggaggccgtgcagacaggcctggacctgctggagatcctgcggcaggagaagggcggcagcagaggagaggaggtgggggagctgagccggggcaagctgtacagcctgggcaatggccgctggatgctgaccctggccaagaacatggaggtgcgggccatcttcaccggctactacggcaagggcaagcctgtgcccacccagggcagcaggaaaggaggagccctgcagagctgcaccatcatctag

SEQ ID NO: 317185 - DNA, 1206 bp, Artificial Sequence
  derived and/or modified sequence
atgagcagcagcggggccaaggacaagccagagctgcagttccccttcctgcaggatgaggacacagtggccaccctgctggagtgcaagaccctcttcatcctgcggggcctgcccggcagcggcaagagcaccctggcccgggtcatcgtggacaagtacagagatggcaccaagatggtgtctgcagatgcctacaagatcacccctggggcccggggggccttcagcgaggagtacaagaggctggatgaggacctggccgcctactgcagaagaagagacatccgcatcctggtgctggatgacaccaaccacgagcgggagcggctggagcagctgtttgagatggctgaccagtaccagtaccaggtggtgctggtggagcccaagacagcctggaggctggactgtgcccagctgaaggagaagaaccagtggcagctgtctgcagatgacctgaagaagctgaagccaggcctggagaaggacttcctgcccctgtacttcggctggttcctgaccaagaagagcagcgagaccctgaggaaggccggccaggtgttcctggaggagctgggcaaccacaaggccttcaagaaggagctgcggcagtttgtgcctggagatgagccccgggagaagatggacctggtgacctactttgggaagaggcctcctggggtgctgcactgcaccaccaagttctgtgactatggcaaggcccctggagctgaggagtatgcccagcaggatgtgctgaagaagagctacagcaaggccttcaccctgaccatcagcgccctgtttgtgacccccaagaccaccggggcccgggtggagctgtctgagcagcagctgcagctgtggcccagtgatgtggacaagctgagccccacagacaacctgccccggggcagccgggcccacatcaccctgggctgtgccgcagatgtggaggccgtgcagacaggcctggacctgctggagatcctgcggcaggagaagggcggcagcagaggagaggaggtgggggagctgagccggggcaagctgtacagcctgggcaatggccgctggatgctgaccctggccaagaacatggaggtgcgggccatcttcaccggctactacggcaagggcaagcctgtgcccacccagggcagcaggaaaggaggagccctgcagagctgcaccatcatctag

SEQ ID NO: 317186 - DNA, 174 bp, Artificial Sequence
  derived and/or modified sequence
atgagcagcagcggggccaaggacaagccagagctgcagttccccttcctgcaggatgaggacacagtggccaccctgctggagtgcaagaccctcttcatcctgcggggcctgcccggcagcggcaagagcaccctggcccgggtcatcgtggacaagtacagagatggatag

SEQ ID NO: 317187 - DNA, 894 bp, Artificial Sequence
  derived and/or modified sequence
atgaaccggggcttcagccggaagagccacaccttcctgcccaagatttttttccgtaagatgtccagttccggggctaaggacaagccagaactgcagtttccatttcttcaggatgaggacacggtcgccactcttctggagtgcaaaaccttgtttatcctgagggggctccccggttcgggaaagtcaacgctagcccgcgtcatcgttgacaaataccgggacggtactaagatggtgagtgccgacgcctataagatcacaccaggtgctaggggcgctctaaaggaactgcggcagttcgtacccggggatgaaccccgggagaaaatggatctggtgacgtatttcggcaagcgccctcctggggtgctccattgcacaaccaagttctgcgactacggtaaagcgcccggcgccgaggagtacgcgcagcaggacgtattgaagaaatcctactccaaagcgttcactctgacaatcagcgctctgttcgtcacccctaaaaccacgggggctagggtcgagctgagtgagcagcagctgcagctgtggccctcagatgtagacaagctgtcgccaaccgacaacttgccaaggggctcccgcgcccacatcactttaggctgcgccgccgacgtggaggccgtccagaccgggctggatctactcgagatcctgcgccaggaaaaaggaggaagccggggagaggaagtaggggagctatccagggggaaattgtactcattgggaaacggtaggtggatgctgactcttgccaaaaacatggaagtgcgcgcaatttttacagggtactatggcaagggcaagccagttcctacacaagggagccgaaagggcggggccttacagtcatgtaccatcatctag

SEQ ID NO: 317188 - DNA, 1206 bp, Artificial Sequence
  derived and/or modified sequence
atgagcagcagcggcgccaaggacaagcccgagctgcagttccccttcctgcaggatgaggacaccgttgccactctactagaatgtaaaaccctattcattctccggggcctaccaggctccggcaagtccacacttgcccgagtgatcgtcgacaagtatcgggacggtactaagatggtcagtgctgacgcctataaaatcactcctggcgcaaggggggcattttcagaggagtacaaaagactggacgaggacctggccgcctactgccgcagacgcgatattcggatcctcgtcctggacgataccaatcacgagagagaaagactggagcagctatttgagatggcggaccagtatcagtatcaggtggtgctggtagaaccaaagacagcctggcggctggattgcgcccagttgaaggagaagaaccagtggcaattatcagctgatgatcttaaaaagctgaagcccggcctggagaaagatttcctgcccttatactttgggtggttcctcactaaaaaatcctctgaaacactgagaaaagctggccaagttttcctggaagagcttggaaaccataaggcctttaagaaagaactgcggcagtttgttcctggcgacgagccccgtgagaaaatggacctggtgacatactttggcaagaggcctcccggcgtgctccactgcacaaccaagttctgtgattacggcaaagcaccaggggccgaggagtacgcacaacaggatgtgctcaagaaaagctactccaaagctttcactttaaccatctcagctcttttcgtgaccccaaagactacaggggcgcgtgtagagctgagtgagcaacaattgcagctgtggccgtccgacgtggataagctctcacccaccgataatctcccgaggggcagcagagcacatattactctgggttgtgcagcagatgtggaagcagtgcagactggacttgatctactagaaatattacggcaagagaagggaggctcccgcggggaggaagtgggggagctgtccagagggaagctgtactctctgggaaatgggaggtggatgctgaccctggctaagaacatggaagtccgggcgatattcacaggatattacgggaaagggaagcccgtcccaacacagggcagtagaaagggcggagcactccagtcttgcactattatctag

SEQ ID NO: 317189 - DNA, 174 bp, Artificial Sequence
  derived and/or modified sequence
atgagcagcagcggcgccaaggacaagcccgagctgcagttccccttcctccaggacgaggacaccgtcgccacactgctcgagtgtaagacgctgttcatcttgcggggactgccggggtctggcaagagtactttggcccgggtgattgtggataagtaccgggatggatag

SEQ ID NO: 317190 - DNA, 894 bp, Artificial Sequence
  derived and/or modified sequence
atgaatcgaggattcagcaggaaatctcacacgtttttaccaaaaatttttttcaggaagatgtcctcatccggagccaaagacaagcctgagttgcagttccctttcctgcaggatgaagacaccgttgcaacactgctggaatgcaaaacactgtttattctccgtggactgcccggtagtggaaaaagcaccctggccagggtaattgttgataagtaccgtgatgggaccaagatggtgagcgccgatgcctacaagattacacccggtgccagaggtgccctgaaggaactgcgacaatttgtacccggagatgagccacgggaaaaaatggacttggttacatacttcggcaagcgcccaccgggagtgctgcactgcaccactaaattctgcgactatggaaaagcccctggagcagaggagtacgcccagcaggacgttctcaagaagtcatatagtaaagctttcaccctcacaatttctgccctgttcgtaaccccgaaaacaactggcgctcgggtcgaactttccgaacaacagctccagctgtggcccagcgacgtcgacaagctgagtccaaccgacaatctcccacggggatctcgcgcacacattactctcggatgcgcagctgatgtggaagccgtacagaccggcctggatcttctcgagattttacgtcaggagaagggcggtagccggggagaggaagtgggagagctgagtcggggtaagttgtactcactcggtaacggtagatggatgctgacactggccaagaatatggaagtgcgtgccattttcacaggctactacggcaaaggaaaaccggttccaacccagggatctagaaagggaggcgcactccagagctgtaccatcatttag

SEQ ID NO: 317191 - DNA, 1206 bp, Artificial Sequence
  derived and/or modified sequence
atgtccagcagtggggctaaggacaagcctgaactccaatttccatttctgcaggatgaggacacagtggctactctcctcgagtgcaaaaccctttttatcctgagaggcctccctggatccggaaaaagtaccctcgccagggtgatcgtcgacaaatacagagacggaacgaagatggtctctgccgatgcttataaaattacacctggagcaagaggcgcttttagcgaggagtataaaagactcgatgaggacttagcagcctactgtagacggagggacatccgaatactggtgctggatgacacaaatcacgagcgggagcgtctggagcaactctttgaaatggctgaccagtaccagtaccaagtcgtattggtagagcctaagaccgcctggcggctcgactgcgcccaactcaaagaaaaaaatcaatggcagttgtctgcggacgatctgaagaagctgaagcccggactcgaaaaggacttcttgccactttattttggatggttcctgacaaagaaatctagtgaaactctgcggaaggccggtcaggtgttcttggaagagctgggtaatcacaaggcatttaagaaggaactcagacagttcgtccccggagacgaaccgcgagaaaagatggatctggtgacctattttggtaaacgacctcccggagtgttgcactgcacgactaaattctgcgactatgggaaagcacccggagccgaggaatacgctcagcaggatgtactcaagaagtcctactcgaaggcattcacactgacaataagcgctctgttcgtcactccaaagacaaccggtgcaagagtggagttgagcgaacagcagttgcaactgtggccatccgacgtggacaaattgtctccgaccgacaatcttcctcggggttcccgcgctcacataacgctaggttgtgccgctgacgtcgaagcagttcagacaggcttagacttgctggagattttgaggcaggaaaaaggcggatctagaggagaggaagtgggagagctgtctaggggcaagctgtactctctcggtaacggccgatggatgctcacactagcaaaaaacatggaggtgcgagctatctttaccggttattacgggaaagggaagcccgtgccaacacaggggtcaaggaaggggggtgctctgcagagctgtaccataatctag

SEQ ID NO: 317192 - DNA, 174 bp, Artificial Sequence
  derived and/or modified sequence
atgtctagttccggcgcaaaagacaaacccgagctccagttcccctttttgcaggacgaggataccgttgcaacactgcttgaatgcaaaacgctgtttatcttgcgcggacttccagggtctggcaagagcaccctcgcacgcgtgatagtggataagtaccgcgacggctag

SEQ ID NO: 317193 - DNA, 1189 bp, Artificial Sequence
  derived and/or modified sequence
ccaccgctggactcccgtgtccctccgcgcaggcgggcggccccggagcgctggtgccggcagaggcggcgacggtggcgcccctcctcatcatgaacagaggcttctcccgaaaaagccacacattcctgcccaagatcttcttccgcaagatgtcatcctcaggggccaaggacaagcctgagctgcagtttcccttccttcaggatgaggacacagtggccacgctgctagagtgcaagacgctcttcatcttgcgcggcctgccaggaagcggcaagtccacgctggcacgggtcatcgtggacaagtaccgtgatggcaccaagatggtgtcggctgacgcttacaagatcacccccggcgctcgaggagccttgaaggagctgcgacaattcgtccctggggatgagcccagggagaagatggacttggtcacctactttggaaagagacccccaggcgtgctgcattgcacaaccaagttttgtgactacgggaaggctcccggggcagaggagtacgctcaacaagatgtgttaaagaaatcttactccaaggccttcacgctgaccatctctgccctctttgtgacacccaagacgactggggcccgggtggagttaagcgagcagcaactgcagttgtggccgagtgatgtggacaagctgtcacccactgacaacctgccgcgggggagccgcgcccacatcaccctcggctgtgcagctgacgtagaggccgtgcagacgggccttgacctcttagagattctgcggcaggagaaggggggcagccgaggcgaggaggtgggcgagctaagccggggcaagctctattccttgggcaatgggcgctggatgctgaccctggccaagaacatggaggtcagggccatcttcacggggtactacgggaaaggcaaacctgtgcccacgcaaggtagccggaaggggggcgccttgcagtcctgcaccatcatatgagtgttctcaccaccacttatgcccctagaagggaaggggagagggaaacgtgccctctgtttgatccttgttttgtgacattttttttttttttttttttactcaaagttaacctacctgtaactttttaaaaacttgtaaaataactgaccctcccttcctgtccgccctcttcccctctaatgctcacgctcccaacacaa

SEQ ID NO: 317194 - DNA, 894 bp, Artificial Sequence
  derived and/or modified sequence
atgaacagaggcttcagcagaaagagccacaccttcctgcccaagatcttcttcagaaagatgagcagcagcggcgccaaggacaagcccgagctgcagttccccttcctgcaggacgaggacaccgtggccaccctgctggagtgcaagaccctgttcatcctgagaggcctgcccggcagcggcaagagcaccctggccagagtgatcgtggacaagtacagagacggcaccaagatggtgagcgccgacgcctacaagatcacccccggcgccagaggcgccctgaaggagctgagacagttcgtgcccggcgacgagcccagagagaagatggacctggtgacctacttcggcaagagaccccccggcgtgctgcactgcaccaccaagttctgcgactacggcaaggcccccggcgccgaggagtacgcccagcaggacgtgctgaagaagagctacagcaaggccttcaccctgaccatcagcgccctgttcgtgacccccaagaccaccggcgccagagtggagctgagcgagcagcagctgcagctgtggcccagcgacgtggacaagctgagccccaccgacaacctgcccagaggcagcagagcccacatcaccctgggctgcgccgccgacgtggaggccgtgcagaccggcctggacctgctggagatcctgagacaggagaagggcggcagcagaggcgaggaggtgggcgagctgagcagaggcaagctgtacagcctgggcaacggcagatggatgctgaccctggccaagaacatggaggtgagagccatcttcaccggctactacggcaagggcaagcccgtgcccacccagggcagcagaaagggcggcgccctgcagagctgcaccatcatctag

SEQ ID NO: 317195 - DNA, 1206 bp, Artificial Sequence
  derived and/or modified sequence
atgagcagcagcggcgccaaggacaagcccgagctgcagttccccttcctgcaggacgaggacaccgtggccaccctgctggagtgcaagaccctgttcatcctgagaggcctgcccggcagcggcaagagcaccctggccagagtgatcgtggacaagtacagagacggcaccaagatggtgagcgccgacgcctacaagatcacccccggcgccagaggcgccttcagcgaggagtacaagagactggacgaggacctggccgcctactgcagaagaagagacatcagaatcctggtgctggacgacaccaaccacgagagagagagactggagcagctgttcgagatggccgaccagtaccagtaccaggtggtgctggtggagcccaagaccgcctggagactggactgcgcccagctgaaggagaagaaccagtggcagctgagcgccgacgacctgaagaagctgaagcccggcctggagaaggacttcctgcccctgtacttcggctggttcctgaccaagaagagcagcgagaccctgagaaaggccggccaggtgttcctggaggagctgggcaaccacaaggccttcaagaaggagctgagacagttcgtgcccggcgacgagcccagagagaagatggacctggtgacctacttcggcaagagaccccccggcgtgctgcactgcaccaccaagttctgcgactacggcaaggcccccggcgccgaggagtacgcccagcaggacgtgctgaagaagagctacagcaaggccttcaccctgaccatcagcgccctgttcgtgacccccaagaccaccggcgccagagtggagctgagcgagcagcagctgcagctgtggcccagcgacgtggacaagctgagccccaccgacaacctgcccagaggcagcagagcccacatcaccctgggctgcgccgccgacgtggaggccgtgcagaccggcctggacctgctggagatcctgagacaggagaagggcggcagcagaggcgaggaggtgggcgagctgagcagaggcaagctgtacagcctgggcaacggcagatggatgctgaccctggccaagaacatggaggtgagagccatcttcaccggctactacggcaagggcaagcccgtgcccacccagggcagcagaaagggcggcgccctgcagagctgcaccatcatctag

SEQ ID NO: 317196 - DNA, 174 bp, Artificial Sequence
  derived and/or modified sequence
atgagcagcagcggcgccaaggacaagcccgagctgcagttccccttcctgcaggacgaggacaccgtggccaccctgctggagtgcaagaccctgttcatcctgagaggcctgcccggcagcggcaagagcaccctggccagagtgatcgtggacaagtacagagacggctag

SEQ ID NO: 317197 - protein, 276 aa, Artificial Sequence
  derived and/or modified sequence
MGGLWRPGWRCVPFCGWRWIHPGSPTRAAERVEPFLRPEWSGTGGAERGLRWLGTWKRCSLRARHPALQPPRRPKSSNPFTRAQEEERRRQNKTTLTYVAAVAVGMLGASYAAVPLYRLYCQTTGLGGSAVAGHASDKIENMVPVKDRIIKISFNADVHASLQWNFRPQQTEIYVVPGETALAFYRAKNPTDKPVIGISTYNIVPFEAGQYFNKIQCFCFEEQRLNPQEEVDMPVFFYIDPEFAEDPRMIKVDLITLSYTFFEAKEGHKLPVPGYN

SEQ ID NO: 317198 - DNA, 831 bp, Artificial Sequence
  derived and/or modified sequence
atggggggactctggcgacctgggtggcgatgcgtgcccttttgcgggtggaggtggattcatcccggaagtccaacccgggctgcggagcgcgttgaaccatttctaagacctgagtggagcgggactggtggcgccgagcgaggcctcaggtggttgggaacatggaagcgttgctcactgagagcaagacatccagccctgcagccccctagaaggcccaagtccagcaaccctttcactcgggcgcaggaggaggaaaggcgccggcagaataagacaacattgacttacgtggcggcagtcgccgtagggatgctgggcgcgtcttatgctgccgtcccactgtaccggctttactgtcagactacagggcttggcggctccgccgtcgcgggccacgcatccgacaagattgagaacatggtcccagtcaaagaccgaattatcaaaatctctttcaacgcagacgtgcacgcctccctacagtggaacttccggcctcagcaaaccgagatttatgttgtgcccggcgagaccgctctggccttctatagagcaaagaaccctacagacaagcctgtgatcgggattagcacatacaatattgtgcccttcgaggcgggtcaatatttcaataagatccagtgtttttgctttgaggaacagcggctcaatcctcaggaagaggtggacatgccagtctttttctatattgatcccgagtttgctgaggatcctaggatgatcaaggtggacctgattacactgtcgtataccttcttcgaggcaaaagaaggccacaaactccccgttcccggctacaattag

SEQ ID NO: 317199 - DNA, 831 bp, Artificial Sequence
  derived and/or modified sequence
atgggcggcctgtggaggcctggctggaggtgtgtgcccttctgtggctggcgctggatccaccctggcagccccaccagggctgctgagcgggtggagcccttcctgcggcctgagtggagcggcactggaggagctgagcggggcctgcgctggctgggcacctggaagcgctgcagcctgcgggcccggcacccagccctgcagcccccccggcggcccaagagcagcaaccccttcacccgggcccaggaggaggagcggcggcggcagaacaagaccaccctgacctacgtggccgctgtggccgtgggcatgctgggcgccagctatgctgctgtgcccctgtaccgcctgtactgccagaccaccggcctgggcggcagcgctgtggccggccacgccagtgacaagattgagaacatggtgcctgtgaaggaccgcatcatcaagatctccttcaatgctgatgtgcacgccagcctgcagtggaacttccggccccagcagacagagatctacgtggtgcctggagaaacagccctggccttctaccgggccaagaaccccacagacaagcctgtgattggcatcagcacctacaacatcgtgccctttgaggccggccagtacttcaacaagatccagtgcttctgctttgaggagcagaggctgaacccccaggaggaggtggacatgcctgtgttcttctacattgatcctgagtttgctgaggaccccaggatgatcaaggtggacctgatcaccctgagctacaccttctttgaggccaaggagggccacaagctgcctgtgcccggctacaactag

SEQ ID NO: 317200 - DNA, 831 bp, Artificial Sequence
  derived and/or modified sequence
atgggcggcctgtggcggcccggctggcggtgcgtgcccttctgcgggtggaggtggattcatcctgggtcgcccacacgtgcagctgagagggtcgaaccttttctcagacccgaatggtctggaacgggcggagccgagaggggcctacgctggctgggtacatggaagaggtgttcgctgagagcccgccaccctgctctgcagccaccaagaaggcccaagagtagcaaccccttcactagggctcaggaagaagagcgtcgcaggcaaaacaagacgacactcacttacgtcgccgccgttgcagttggaatgcttggcgcttcctatgctgcggtacctctctatcgcctgtattgtcagacaaccgggcttggaggaagtgccgttgctggccacgcaagcgataagatcgagaacatggttccagtcaaggatagaataatcaagatatccttcaacgccgacgttcacgcaagtcttcagtggaatttcagaccacagcaaacagagatatatgtggtgccaggagaaaccgctttggcattttatcgggccaaaaacccaactgacaagcccgttatcggtatatcaacctataacattgtgcctttcgaggctggacagtactttaataaaatacagtgtttttgcttcgaagagcagcggctgaaccctcaggaagaggtggatatgcccgtttttttctatattgatcccgagttcgcagaagatccccgaatgatcaaggttgacctgattacgttgagctacaccttttttgaagccaaagagggccataagctgcctgtgcctggctacaactag

SEQ ID NO: 317201 - DNA, 831 bp, Artificial Sequence
  derived and/or modified sequence
atgggcggactctggaggccagggtggagatgtgtaccattttgcggctggcggtggatccacccaggaagtcccacacgggcagctgaaagggtcgaaccctttctgaggccagagtggtccggcactggaggcgcagaaagaggtctgcggtggcttggcacctggaagaggtgcagtctgagggccagacatccagccctccagccccctaggaggccgaaaagtagcaatccattcactcgagcacaagaagaggagcggaggaggcagaataaaaccactctgacttacgttgctgctgtggccgtgggcatgctaggcgcttcatacgccgcagtccccttgtaccgactgtactgtcagactaccggactggggggatctgcagttgctggacacgcttcagacaagatagagaacatggttcctgtcaaagacagaattattaaaatctcctttaatgcagatgtgcacgcatccttgcagtggaatttcaggcctcaacaaactgagatatacgttgttcccggagaaacggccctcgccttttatagggctaaaaacccaacagataaacccgtgattgggattagcacctacaacatcgtgcctttcgaagccggtcagtacttcaataaaattcaatgtttttgctttgaagaacagaggctcaaccctcaggaggaggtggatatgcctgtgtttttctacattgatcccgagttcgccgaagacccacgtatgattaaagtggacctgatcacactaagctataccttttttgaagcaaaggagggccacaagctccctgtacccggatacaattag

SEQ ID NO: 317202 - DNA, 2414 bp, Artificial Sequence
  derived and/or modified sequence
ctcgcgagatttgacctctcgtccctgagaggcgggtgggtgttagttcagagggttatgggagggctctggcgtcctggatggaggtgcgttcctttctgtggctggcgctggatccaccctgggtctccaaccagggctgcagagagggtagagccgtttcttaggccagagtggagtgggacaggaggtgccgagagaggactgaggtggcttgggacatggaagcgctgcagccttcgagcccggcatccagcattgcagccgccgcggcggcctaagagctcgaaccctttcacacgcgcgcaggaggaggagcggcggcggcagaacaagacgaccctcacttacgtggccgctgtcgccgtgggcatgctgggggcgtcctacgctgccgtacccctttatcggctctattgccagactactggacttggaggatcagcagttgcaggtcatgcctcagacaagattgaaaacatggtgcctgttaaagatcgaatcattaaaattagctttaatgcagatgtgcatgcaagtctccagtggaactttagacctcagcaaacagaaatatatgtggtgccaggagagactgcactggcgttttacagagctaagaatcctactgacaaaccagtaattggaatttctacatacaatattgttccatttgaagctggacagtatttcaataaaatacagtgcttctgttttgaagaacaaaggcttaatccccaagaggaagtagatatgccagtgtttttctacattgatcctgaatttgctgaagatccaagaatgattaaagttgatcttatcactctttcttacactttttttgaagcaaaggaagggcacaagttgccagttccaggatataattgaagtcagcaactaagtcttccttcaaagttgtgatttttgggaaaatcatatatcctatcttctcaaaggagaaatattgtacaataatatgaaggcttatattttaaataattattttttctcaactaatttttttcacttaaacttgagagaacaagttcagcttttatcataagaaactcatatgcctagctagaatatatgactgactattcaataccatactgaagagtttgatactattaaaataagccgctttgttttttaaatatgcaggcatgggttcagcttaattccataattcccttccagattattaactcttcatacttacagcaatgaatctgacaatgtttttcaaaaatgtatgctcagggttatttgtttcaagtcataggccagaacttctaaccatgtttattgtgtctaaaagagttggttgctattttccttcattatgaatagtcagtattttaaaagctcaaagtagaagaggagtcactaagccctaacagcttgtccaaagatttaaattcttatttcaaatttgatttgtcctttaaggtttagggctattttatattcagagttctgaataattactttgaaactgtagtatcataaaattgaaataaaatacatctactaggctgttagccaaagcatcaccattacaagtccatgaatgttaaaatgtacaggtgggattgtgaagatttactgacatcaaaagttcttctggaaacaaacctttgttaaaaaaaaaaagtattaaattgttttaatagtgatttatttgtcatcaaatgtacaacttattctaaatattttcattttctgtgttctaaatagaaatattaagttgcagtaaaaagagaaaaaaaggctatttagcattacaaagaatcatatttaaaggctgcccaatgtagagtctagtgacctgttcaggacacctgaaatataattaaatgacaattatcaaggttttaacaatttataattctaaaccagaggattataaagaagtgcaaattgacttttacattcaactttagttaaatgaaggcactcagtattcttcctgaataatacattcagtttctcacattttatgctttcatctattcagaattatttcatagtaaaataatctactcttatcacagctgtgtgacgatttctaaatgtaggaaggcctgtgaaacatgacactgcagttaaattggttggcctaaggactaagtaatttttcttctgctgaagttttaagtgagtatttgttccaaacaagttctgttgaaatctcacgctgttgtcaggaatcagtgttatcctggaactgttattctatttaatcttcattatagcagaaatgtgccaccatggctttgacatgttggtaggtattgtcttccaggcttcaaagctgcacagagtctacgttttagagagttggcacctttgatgtggtagtgagctgatcatccactttcttctaaaataaagagaagaaaatggccagt

SEQ ID NO: 317203 - DNA, 831 bp, Artificial Sequence
  derived and/or modified sequence
atgggcggcctgtggagacccggctggagatgcgtgcccttctgcggctggagatggatccaccccggcagccccaccagagccgccgagagagtggagcccttcctgagacccgagtggagcggcaccggcggcgccgagagaggcctgagatggctgggcacctggaagagatgcagcctgagagccagacaccccgccctgcagccccccagaagacccaagagcagcaaccccttcaccagagcccaggaggaggagagaagaagacagaacaagaccaccctgacctacgtggccgccgtggccgtgggcatgctgggcgccagctacgccgccgtgcccctgtacagactgtactgccagaccaccggcctgggcggcagcgccgtggccggccacgccagcgacaagatcgagaacatggtgcccgtgaaggacagaatcatcaagatcagcttcaacgccgacgtgcacgccagcctgcagtggaacttcagaccccagcagaccgagatctacgtggtgcccggcgagaccgccctggccttctacagagccaagaaccccaccgacaagcccgtgatcggcatcagcacctacaacatcgtgcccttcgaggccggccagtacttcaacaagatccagtgcttctgcttcgaggagcagagactgaacccccaggaggaggtggacatgcccgtgttcttctacatcgaccccgagttcgccgaggaccccagaatgatcaaggtggacctgatcaccctgagctacaccttcttcgaggccaaggagggccacaagctgcccgtgcccggctacaactag

SEQ ID NO: 317204 - protein, 256 aa, Artificial Sequence
  derived and/or modified sequence
MAPGSRTSLLLAFALLCLPWLQEAGAVQTVPLSRLFDHAMLQAHRAHQLAIDTYQEFEETYIPKDQKYSFLHDSQTSFCFSDSIPTPSNMEETQQKSNLELLRISLLLIESWLEPVRFLRSMFANNLVYDTSDSDDYHLLKDLEEGIQTLMGVRVAPGVTNPGTPLASRAGGEKYCCPLFSSKALTQENSPYSSFRLVNPPGLSLHPEGEGGKWINERGREQCPSAWPLLLFLHFAEAGRRQPPDWADPQADLQQV

SEQ ID NO: 317205 - DNA, 771 bp, Artificial Sequence
  derived and/or modified sequence
atggccccagggtccagaacttctttgctgttggcattcgctctgctctgtctgccgtggcttcaggaagctggagctgtgcagacggtccccctttcccgtcttttcgatcacgccatgctccaggctcacagagctcaccaattggctatcgacacgtaccaggagttcgaggaaacgtacatcccaaaggaccaaaagtactctttcctgcatgacagtcagacttccttttgtttctccgattccatccctacgccttccaacatggaggaaacacagcagaagagcaatctcgagctgctaaggattagtctcttactcattgaatcttggctggaacccgtccggtttctgcggtctatgttcgcaaacaacctggtgtacgatacatccgactcagacgactatcacctactgaaggatctcgaggaaggtattcagacacttatgggagtacgcgttgctcccggagtgaccaatccgggaacgcccctcgcctccagagccgggggggagaaatactgctgccccctgtttagctcaaaagccctgacacaggagaacagtccttattcatccttccggttggtcaatccacccggcctcagcctccacccagaaggagagggcggtaaatggataaatgagcgcggacgcgagcagtgtccttccgcctggccgctgctcctgtttcttcacttcgccgaggctgggaggaggcaaccccccgactgggccgacccacaggcagacttgcagcaggtctag

SEQ ID NO: 317206 - DNA, 771 bp, Artificial Sequence
  derived and/or modified sequence
atggcccctggcagcaggaccagcctgctgctggcctttgccctgctgtgcctgccctggctgcaggaggccggggctgtgcagacagtgcccctgagccggctgtttgaccacgccatgctgcaggcccaccgggcccaccagctggccatcgacacctaccaggagtttgaggagacctacatccccaaggaccagaagtacagcttcctgcatgacagccagaccagcttctgcttcagtgacagcatccccacccccagcaacatggaggagacccagcagaagagcaacctggagctgctgcgcatcagcctgctgctgattgaatcctggctggagcctgtgcgcttcctgcgctccatgtttgccaacaacctggtgtatgacaccagtgacagtgatgactaccacctgctgaaggacctggaggagggcatccagaccctgatgggcgtgcgggtggcccctggggtgaccaaccctggcacccccctggccagccgggccggcggggagaagtactgctgccccctcttcagcagcaaggccctgacccaggagaacagcccctacagcagcttccggctggtgaaccccccaggcctgagcctgcaccctgagggggagggcggcaagtggatcaatgaaagaggccgggagcagtgccccagcgcctggcccctgctgctcttcctgcactttgctgaggccggccggcggcagcccccagactgggccgacccccaggccgacctgcagcaggtgtag

SEQ ID NO: 317207 - DNA, 771 bp, Artificial Sequence
  derived and/or modified sequence
atggcccccggcagccggaccagcctgctgctggccttcgccctgttgtgcctgccttggctgcaagaagccggcgcggttcagaccgtgccactgagtcgtctctttgatcatgctatgcttcaagcgcacagagcccatcagctcgccattgatacctatcaggaattcgaagagacgtacattcctaaagatcaaaaatactctttcttgcatgattcccagacctcgttttgtttcagcgactctatacccactccttccaatatggaggaaacccagcagaaatcaaacctggagctattaaggatctctcttttgctgatagagtcctggctcgaacccgtgagattcctgcgcagtatgtttgcaaataacctcgtgtacgatacgtcagacagcgatgactaccacctcctgaaggacctcgaagaaggcatacagacactgatgggggttcgagtggcccctggggtgaccaaccctggtacacccttggcgagtcgtgccggcggcgaaaagtattgctgtcctttatttagttcgaaagcactgacacaggagaatagcccctactcttcgttcagactggtaaatccccccggactgagtcttcacccagaaggggagggggggaagtggattaacgagcggggccgtgaacagtgccctagcgcctggccgcttctgctgtttctgcattttgctgaggctgggaggagacagccgcccgattgggcagacccacaggctgatctacagcaagtgtag

SEQ ID NO: 317208 - DNA, 771 bp, Artificial Sequence
  derived and/or modified sequence
atggctcctggtagccgcacatcgctgctcttggcctttgcactcctgtgtttaccatggctccaggaggccggagccgtgcagaccgtgccactatcccggcttttcgaccacgcgatgttgcaggcccaccgggctcaccagctggccattgatacataccaggaattcgaggagacctatatccccaaggatcaaaagtactcatttctgcatgattcacagaccagcttctgcttctcagacagtattcccactccaagtaatatggaagagacccagcagaagtcaaatctcgagcttttgagaatttcgctcctgctcatagagagctggttagagccggttcggtttctgcgttccatgttcgctaacaatctcgtgtatgatacaagcgacagcgacgattatcaccttctgaaagatctggaggaagggatacagacactaatgggcgtgcgtgtggcccctggcgtgactaaccctgggactcctctcgctagtagagcgggaggggagaaatattgctgccctttattcagttctaaggcactgacacaggagaactccccatactcctcttttaggcttgttaatccaccaggtttgtccctacatccagagggggagggtgggaaatggatcaacgagcggggtagggaacagtgcccgagtgcctggcccctgctcctgtttctgcattttgctgaggctggcagaagacagccacctgattgggccgatccccaagcagatcttcagcaggtctag

SEQ ID NO: 317209 - DNA, 771 bp, Artificial Sequence
  derived and/or modified sequence
atggctcctggcagtaggacctctcttcttctcgcatttgctctcttgtgtcttccttggcttcaagaagccggtgccgtgcagaccgtgcctctgagccgcctgttcgaccatgccatgctccaggcccaccgtgcccatcagctggctattgatacgtatcaggaatttgaagaaacctacatccctaaggaccagaagtactccttcctccatgactcccagacgtccttttgcttcagcgacagcatccctaccccttctaatatggaagagacccagcagaaaagtaacttagaacttctccggatctctctgctgctgatcgagtcctggctagagccagtgcggtttttacgcagtatgtttgccaacaacttggtctacgacacctctgactccgatgattatcacttactgaaagatctggaagagggcattcaaaccctcatgggggtccgagtcgcaccaggcgtcaccaatcctggcactccactggcttcaagggcgggcggagagaaatattgttgtcccctgtttagctcgaaagctttgacacaagagaactcaccctactctagttttagactcgttaatccccccgggctgtccctccaccctgaaggtgaggggggcaagtggatcaatgaaagaggccgggaacagtgcccaagtgcgtggcccctgctactgttccttcattttgccgaagcgggtcggaggcagccacctgattgggctgacccacaagcagatttgcagcaagtgtag

SEQ ID NO: 317210 - DNA, 771 bp, Artificial Sequence
  derived and/or modified sequence
atggctcctggcagtaggacctctcttcttctcgcatttgctctcttgtgtcttccttggcttcaagaagccggtgccgtgcagaccgtgcctctgagccgcctgttcgaccatgccatgctccaggcccaccgtgcccatcagctggctattgatacgtatcaggaatttgaagaaacctacatccctaaggaccagaagtactccttcctccatgactcccagacgtccttttgcttcagcgacagcatccctaccccttctaatatggaagagacccagcagaaaagtaacttagaactgttgcgtatttctctcctgcttatcgaaagctggctggaaccagtgcgattcctgcgctcaatgtttgcaaataacctggtgtacgatacttctgactccgacgattaccatttacttaaggatctggaggaaggcattcaaactctcatgggtgtgcgcgtggcaccaggagttacaaaccctggcacgcctttagcttcaagagcaggcggagagaagtactgctgtcctctctttagttccaaagccctcacacaagaaaactccccatattcctcatttagactggtcaacccgcccgggctgtccctgcatcctgaaggagaaggaggaaagtggatcaacgaacgcggtagggaacaatgtccttcagcgtggccacttcttttattcttgcattttgctgaagcgggccgcaggcagccgccagactgggccgatccccaggccgatttgcagcaggtctag

SEQ ID NO: 317211 - DNA, 1073 bp, Artificial Sequence
  derived and/or modified sequence
accggctctaggatcccaaggcccaactccccgaaccactcagggtcctgtggacagctcacctagtggcaatggctccaggctcccggacgtccctgctcctggcttttgccctgctctgcctgccctggcttcaagaggctggtgccgtccaaaccgttcccttatccaggctttttgaccacgctatgctccaagcccatcgcgcgcaccagctggccattgacacctaccaggagtttgaagaaacctatatcccaaaggaccagaagtattcattcctgcatgactcccagacctccttctgcttctcagactctattccgacaccctccaacatggaggaaacgcaacagaaatccaatctagagctgctccgcatctccctgctgctcatcgagtcgtggctggagcccgtgcggttcctcaggagtatgttcgccaacaacctggtgtatgacacctcggacagcgatgactatcacctcctaaaggacctagaggaaggcatccaaacgctgatgggggtgagggtggcgccaggggtcaccaatcctggaaccccactggcttcgagggctgggggagagaaatactgctgccctctttttagcagtaaggcgctgacccaagagaactcaccttattcttcatttcgcctggtgaatcctccaggcctttctctacaccctgaaggggagggaggaaaatggataaatgagagagggagggaacagtgcccaagcgcttggcctctccttctcttccttcactttgcagaggctggaagacggcagccgccggactgggcagatcctcaagcagacctacagcaagtttgacacaaactcgcacaaccatgacgcactgctcaagaactacgggctgctctactgcttcaggaaggacatggacaaggtcgagacattcctgcgcatggtgcagtgccgctctgtggagggcagctgtggcttctaggtgcccgagtagcatcctgtgacccctccccagtgcctctcctggccctgaaggtgccactccagtgcccaccagccttgtcctaataaaattaa

SEQ ID NO: 317212 - DNA, 1173 bp, Artificial Sequence
  derived and/or modified sequence
ccatgcataaatgtacacagaaacaggtggggtcaagcagggagagagaactggccagggtataaaaagggcccacaagagaccggctctaggatcccaaggcccaactccccgaaccactcagggtcctgtggacagctcacctagcggcaatggctgcaggctcccggacgtccctgctcctggcttttgccctgctctgcctgccctggcttcaagaggctggtgccgtccaaaccgttccgttatccaggctttttgaccacgctatgctccaagcccatcgcgcgcaccagctggccattgacacctaccaggagtttgaagaaacctatatcccaaaggaccagaagtattcattcctgcatgactcccagacctccttctgcttctcagactctattccgacaccctccaacatggaggaaacgcaacagaaatccaatctagagctgctccgcatctccctgctgctcatcgagtcgtggctggagcccgtgcggttcctcaggagtatgttcgccaacaacctggtgtatgacacctcggacagcgatgactatcacctcctaaaggacctagaggaaggcatccaaacgctgatgggggtgagggtggcgccaggggtcgccaatcctggaaccccactggcttagagggctgggggagagaaacactgctgccctctttgtagcagtcaggcgctgacccaagagaactcaccttattcttcatttcgcctggtgaatcctccaggcccttctctacaccctgaaggggagggaggaaaatggatgaatgagagagggagggaacagtgcccaagcgcttggcctctccttctcttccttcactttgcagaggctggaagacggcagccgccggactgggcagatcctcaagcagacctacagcaagtttgacacaaactcacacaaccatgacgcactgctcaagaactacgggctgctctactgcttcaggaaggacatggacaaggtcgagacattcctgcgcatggtgcagtgccgctctgtagagggtagctgtggcttctaggtgcccgcgtggcatcctgtgaccgacccctccccagtgcctctcctggccctggaaggtgccactccagtgcccatcagccttgtcctaataaaattaagttgtatcatttca

SEQ ID NO: 317213 - DNA, 771 bp, Artificial Sequence
  derived and/or modified sequence
atggcccccggcagcagaaccagcctgctgctggccttcgccctgctgtgcctgccctggctgcaggaggccggcgccgtgcagaccgtgcccctgagcagactgttcgaccacgccatgctgcaggcccacagagcccaccagctggccatcgacacctaccaggagttcgaggagacctacatccccaaggaccagaagtacagcttcctgcacgacagccagaccagcttctgcttcagcgacagcatccccacccccagcaacatggaggagacccagcagaagagcaacctggagctgctgagaatcagcctgctgctgatcgagagctggctggagcccgtgagattcctgagaagcatgttcgccaacaacctggtgtacgacaccagcgacagcgacgactaccacctgctgaaggacctggaggagggcatccagaccctgatgggcgtgagagtggcccccggcgtgaccaaccccggcacccccctggccagcagagccggcggcgagaagtactgctgccccctgttcagcagcaaggccctgacccaggagaacagcccctacagcagcttcagactggtgaacccccccggcctgagcctgcaccccgagggcgagggcggcaagtggatcaacgagagaggcagagagcagtgccccagcgcctggcccctgctgctgttcctgcacttcgccgaggccggcagaagacagccccccgactgggccgacccccaggccgacctgcagcaggtgtag

SEQ ID NO: 317214 - DNA, 1022 bp, Artificial Sequence
  derived and/or modified sequence
aggatcccaaggcccaactccccgaaccactcagggtcctgtggacagctcacctagctgcaatggctacaggctcccggacgtccctgctcctggcttttgccctgctctgcctgccctggcttcaagaggctggtgccgtccaaaccgttcccttatccaggctttttaaagaggctatgctccaagcccatcgcgcacaccagctggccattgacacctaccaggagtttataagctcttggggaatgggtgcgggtcaggggtggcaagaaggggtgactttcccccactggggaagtaatgggaggagactaaggagctcagggttgttttctgaagcgaaaatgcaggcagatgagcataggctgagccaggttcccagaagagtaacagtgggagctggtctccagcatagaaagcagtggtccttcttggtggggggtccttcccctaggaagaagcctatatcacaaaggaacagaagtattcattcctgcatgactcccagacctccttctgcttctcagactctattccgacatcctccaacatggaggaaacgcagcagaaatccaacttagagctgctccacatctccctgctgctcatcgagtcgcggctggagcccgtgcggttcctcaggagtaccttcaccaacaacctggtgtatgacacctcggacagcgatgactatcacctcctaaaggacctagaggaaggcatccaaatgctgatgggggtgagggtggcaccaggggtccccaatcctggaagcccactggcttcgagggctgggggagagaaacactgctgccctcttttcagcagtcaggcgctgacccaagagaactcaccttattcttcatttcccctcgtgaatcctccaggcctttctctacaccctgaaggggaaggaggaaaatggataaatgagagagggagggaacagtgcccaagcgcttggtctctccttctcttgcttcactttgcagaggctggaagacggcagccacctgact

SEQ ID NO: 317215 - protein, 394 aa, Artificial Sequence
  derived and/or modified sequence
MITVNPDGKIMVRRCLVTLRPFRLFVLGIGFFTLCFLMTSLGGQFSARRLGDSPFTIRTEVMGGPESRGVLRKMSDLLELMVKRMDALARLENSSELHRAGGDLHFPADRMPPGAGLMERIQAIAQNVSDIAVKVDQILRHSLLLHSKVSEGRRDQCEAPSDPKFPDCSGKVEWMRARWTSDPCYAFFGVDGTECSFLIYLSEVEWFCPPLPWRNQTAAQRAPKPLPKVQAVFRSNLSHLLDLMGSGKESLIFMKKRTKRLTAQWALAAQRLAQKLGATQRDQKQILVHIGFLTEESGDVFSPRVLKGGPLGEMVQWADILTALYVLGHGLRVTVSLKELQRQRRLRSSQEQARCGVMGACEKMLLEGDVASNTLLIEKPSKKETEKCPKNLVT

SEQ ID NO: 317216 - DNA, 1185 bp, Artificial Sequence
  derived and/or modified sequence
atgatcaccgtgaaccctgacggcaaaattatggtcaggagatgcttggttacccttcggcccttccgactgttcgttctcgggattggattcttcactctgtgctttctgatgacgtctctcggagggcagttttccgcacgacggttgggggattccccctttacaattaggacggaggtgatggggggtcctgagagtagaggtgtacttagaaagatgtctgatctattggagctgatggtaaagaggatggacgcgctggcccgtctcgagaatagtagtgaactacacagagccggcggagatctgcacttcccagcggaccgaatgccccccggagctggcttgatggaacgaattcaggctatcgctcagaacgtgtctgatatcgctgtcaaggtggatcagatccttaggcactctctgctcctgcactccaaagtgagcgaaggacgccgggaccaatgcgaagcgccttcagacccaaaattcccagactgcagcgggaaagtggaatggatgagagcaaggtggacgtccgatccatgttacgcgttctttggcgtggacgggaccgagtgttcttttctgatctacctcagcgaggtcgagtggttttgtccaccactgccctggcgaaaccaaacagccgcacagcgcgcccctaagccccttcctaaggtgcaagccgtgtttagaagcaacctgtcacacctgttggatcttatgggaagcggcaaagaatccctcatctttatgaaaaaaagaacgaaacgcctcacagcccagtgggccctggctgcgcagcgtttggcacaaaaactgggggccactcagcgcgaccagaagcagatcctggtccacattggcttcctgaccgaggaaagcggagacgttttctctccccgggtgctgaaaggtggcccattgggggagatggtccagtgggcagacatactgaccgctctttatgtgctcggccacggactcagggtaactgtgagtttgaaagaactgcagcggcaacgtcgcctgcgatcaagccaagagcaggccagatgcggtgtgatgggagcctgcgagaaaatgctcttggagggggatgtcgcgagcaatactctccttatcgagaagcccagcaaaaaagaaaccgagaaatgcccaaaaaatttagtgacctag

SEQ ID NO: 317217 - DNA, 1185 bp, Artificial Sequence
  derived and/or modified sequence
atgatcaccgtgaacccagatggcaagatcatggtgcggcgctgcctggtgaccctgcggcccttccggctgtttgtgctgggcatcggcttcttcaccctgtgcttcctgatgaccagcctgggcggccagttcagcgcccggcggctgggggacagccccttcaccatcagaacagaggtgatgggcggccctgagagcagaggagtgctgaggaagatgtctgacctgctggagctgatggtgaagaggatggatgccctggcccggctggagaacagcagcgagctgcaccgggccggcggggacctgcacttccctgctgacaggatgcctcctggagctggcctgatggagcgcatccaggccatcgcccagaatgtgtctgacattgctgtgaaggtggaccagatcctgcggcacagcctgctgctgcacagcaaggtgtctgagggcagaagagaccagtgtgaggcccccagcgaccccaagttcccagactgcagcggcaaggtggagtggatgagggcccgctggaccagtgacccctgctacgccttcttcggcgtggatggaacagagtgcagcttcctgatctacctgtctgaggtggagtggttctgcccccccctgccctggaggaaccagacagctgcccagagggcccccaagcccctgcccaaggtgcaggccgtgttccgcagcaacctgagccacctgctggacctgatgggcagcggcaaggagagcctcatcttcatgaagaagaggaccaagaggctgacagcccagtgggccctggccgcccagaggctggcccagaagctgggcgccacccagagggaccagaagcagatcctggtgcacatcggcttcctgacagaggagagcggagatgtgttcagcccccgggtgctgaagggcggccccctgggggagatggtgcagtgggccgacatcctgacagccctgtatgtgctgggccacggcctgcgggtgacagtgtccctgaaggagctgcagaggcagaggcggctgcggagcagccaggagcaggcccgctgtggggtgatgggcgcctgtgagaagatgctgctggagggagatgtggccagcaacaccctgctgattgagaagcccagcaagaaggagacagagaagtgccccaagaacctggtgacctag

SEQ ID NO: 317218 - DNA, 1759 bp, Artificial Sequence
  derived and/or modified sequence
gcggggccggacgccggacaccagagcgcgggcggcggagccagcgggcgagagagcgcgcggcgggcgcgggttgccctcgtcgagagccatgggcgcggcgcggcgcggggctgaggatcggcgcggcccggaggcgctggggaccggggcgcgggcccggggccgcctttagccggcaccgagggcgcggggccggggatgagggcgcccgccgcggggagcccgtctgcgcgccgcggcaccttcccgcccagcgagcgagcccgagcaggcagacgcgcggccggcggtctgggggcgcgccgcctcccggtccccaaaatgtgaagcggggagggcggagacgcagagacggcccggccgggcgccctcgccgccctccggcagccgcgccgctccctccgctgcacgcccaggcctgagcagcgaggccaccgggccgcgcgctcccagcttcgctcggacgcggcttcggcccgcagagggttcgtggcccggacgcggcgagagctgggcccaggacggtgcgtccggcctcgcccgcggctgctcgcaccaacaagtttgaacaatgatcaccgtcaaccccgatgggaagataatggtcagaagatgcctggtcaccctgagaccctttcggctttttgtcctgggcatcggcttcttcactctctgcttcctgatgacgtctctgggaggccagttctcggcccggcgcctgggggactcgccattcaccatccgcacagaagtgatggggggccccgagtcccgcggcgtcctgcgcaagatgagcgacctgctggagctgatggtgaagcgcatggacgcactggccaggctggagaacagcagtgagctgcaccgggccggcggcgacctgcactttcccgcagacaggatgccccctggggccggcctcatggagcggatccaggctattgcccagaacgtctccgacatcgctgtgaaggtggaccagatcctgcgccacagtctgctcctgcacagcaaggtgtcagaaggccggcgggaccagtgtgaggcacccagtgaccccaagttccctgactgctcagggaaggtggagtggatgcgtgcccgctggacctctgacccctgctacgccttctttggggtggacggcaccgagtgctccttcctcatctacctcagtgaggtcgagtggttctgccccccgctgccctggaggaaccagacggctgcccagagggcacccaagcccctccccaaagtccaggcagttttccgaagcaacctgtcccaccttctggacctgatgggcagcgggaaggagtccctgatcttcatgaagaagcggaccaagaggctcacagcccagtgggcgctggctgcccagcgcctggcacagaagctgggggccacccagagggaccagaagcagatcctggtccacatcggcttcctgacggaggagtccggggacgtgttcagccctcgggtcctgaagggcgggcccctaggggagatggtgcagtgggcggacattctgactgcactctatgtcctgggccatggcctgcgggtcacagtctccctgaaggagctgcagaggcaaaggagactgaggagtagccaagagcaagccagatgtggagtcatgggtgcctgtgagaagatgcttctagaaggagatgtggccagcaacacattgctcattgaaaagccaagtaagaaggagactgaaaaatgtccaaagaatttggtcacatga

SEQ ID NO: 317219 - DNA, 1185 bp, Artificial Sequence
  derived and/or modified sequence
atgatcaccgtgaaccccgacggcaagatcatggtgcggcggtgcctggttactttgcggcccttccggctgttcgtgctgggcattggattttttacattatgctttctgatgaccagtttgggtggtcagttctccgctcgtcgccttggagacagcccgtttacaatcagaactgaggttatgggaggccctgagagtcgtggtgttcttcgaaagatgagtgacttactggagttgatggttaaaaggatggatgcactggcccgactggagaactcctctgaactgcatcgggctgggggcgatctgcacttccctgcggataggatgcccccgggagcaggccttatggagcgtattcaggctatcgcgcaaaatgtcagtgacatcgctgtaaaagtggaccagatccttagacatagtcttcttcttcactctaaggttagcgagggacggcgtgatcagtgcgaggctccatccgatcccaagtttccagactgttcaggcaaggtcgaatggatgcgggcaagatggacttcagacccatgctacgctttcttcggcgtggatggcaccgagtgctcatttcttatctatctgtccgaggtcgagtggttttgtcctccactgccttggaggaaccagacggcagcccaacgcgctcctaaaccacttccaaaagtgcaggcggtttttaggtctaacctgtctcatctgctagacctcatgggaagcggaaaagagtctttaatcttcatgaagaagcggacaaagcggctgacagctcagtgggccctggccgcccagcgcctggcccagaagctgggtgccacccagagagaccagaagcaaatcctggtccatatagggttcctcactgaagagagcggagacgtcttctcaccacgggttctcaagggcggccccctgggagaaatggtgcagtgggcagatattctgacagccttatacgtgctaggtcacggcctcagagtcacggtcagcctgaaagaactgcagagacaacgaagactccggtcgagccaggaacaagccaggtgcggggtgatgggagcatgcgagaagatgcttttggagggagatgtggctagcaatacactattgattgaaaagccttctaaaaaggagactgagaagtgtcccaagaatttagtaacttag

SEQ ID NO: 317220 - DNA, 1185 bp, Artificial Sequence
  derived and/or modified sequence
atgataaccgttaatcccgacggaaaaattatggttagacggtgcctggtgacgctgaggccttttaggctgtttgtactaggcattgggttttttacgctgtgtttcctgatgaccagcctgggaggacagttctcggccagacggctgggggatagccccttcacaatcaggacagaggttatgggcggacccgagtcccggggagtcctgcgtaagatgtctgatttgctggagctcatggtgaaacggatggatgccctggccaggctagagaactcgagcgagttgcatagggcaggcggagatctacactttccagccgaccgcatgccaccgggagccggtcttatggagagaattcaagcgatcgcccaaaacgtgtctgatatcgctgttaaggtggaccagattctaaggcattccctgctactccattctaaagtgagcgagggccgaagagatcaatgtgaagcacctagcgatcctaagttcccagactgttccggcaaagtggaatggatgagggccaggtggacgagcgatccctgttacgctttttttggcgtggacgggactgaatgcagctttcttatctacctctctgaggttgaatggttttgtcctccactcccctggagaaatcagactgccgctcagcgtgctcctaagcccctacccaaagtgcaagcggttttccgaagtaatttgagccacttgctggatttgatggggagcgggaaggaatccttgatcttcatgaaaaagcgtacaaaacgtctgaccgctcagtgggctctggcggctcaacgcctggcccagaagttgggcgctactcaaagggaccagaaacagattctggttcacattggattccttacagaggaatccggggacgttttttcacccagagttctgaaggggggtcccttgggtgagatggtgcagtgggccgatatccttacagctctctacgtcctggggcatggtctaagggtcaccgtctcactcaaggagctgcaacgacagcggcgactgaggtcgtcccaagagcaggcccgttgtggagtcatgggcgcatgtgaaaaaatgctgctcgagggagatgtagcctctaacacactactgattgagaaaccctcaaaaaaggagacagagaagtgtcccaagaatctagtgacttag

SEQ ID NO: 317221 - DNA, 1185 bp, Artificial Sequence
  derived and/or modified sequence
atgatcaccgtgaaccccgacggcaagatcatggtgagaagatgcctggtgaccctgagacccttcagactgttcgtgctgggcatcggcttcttcaccctgtgcttcctgatgaccagcctgggcggccagttcagcgccagaagactgggcgacagccccttcaccatcagaaccgaggtgatgggcggccccgagagcagaggcgtgctgagaaagatgagcgacctgctggagctgatggtgaagagaatggacgccctggccagactggagaacagcagcgagctgcacagagccggcggcgacctgcacttccccgccgacagaatgccccccggcgccggcctgatggagagaatccaggccatcgcccagaacgtgagcgacatcgccgtgaaggtggaccagatcctgagacacagcctgctgctgcacagcaaggtgagcgagggcagaagagaccagtgcgaggcccccagcgaccccaagttccccgactgcagcggcaaggtggagtggatgagagccagatggaccagcgacccctgctacgccttcttcggcgtggacggcaccgagtgcagcttcctgatctacctgagcgaggtggagtggttctgcccccccctgccctggagaaaccagaccgccgcccagagagcccccaagcccctgcccaaggtgcaggccgtgttcagaagcaacctgagccacctgctggacctgatgggcagcggcaaggagagcctgatcttcatgaagaagagaaccaagagactgaccgcccagtgggccctggccgcccagagactggcccagaagctgggcgccacccagagagaccagaagcagatcctggtgcacatcggcttcctgaccgaggagagcggcgacgtgttcagccccagagtgctgaagggcggccccctgggcgagatggtgcagtgggccgacatcctgaccgccctgtacgtgctgggccacggcctgagagtgaccgtgagcctgaaggagctgcagagacagagaagactgagaagcagccaggagcaggccagatgcggcgtgatgggcgcctgcgagaagatgctgctggagggcgacgtggccagcaacaccctgctgatcgagaagcccagcaagaaggagaccgagaagtgccccaagaacctggtgacctag

SEQ ID NO: 317222 - protein, 441 aa, Artificial Sequence
  derived and/or modified sequence
MGSQARPHSTLQGFGYSKEHGRTGSAGEAFLSTIQKAAEVVASAMRPGPESPSTRRLLPRGDTYQPAMMPSASHGPPTLGNLLPGAIPGPRAVRHQPGQAGGGWDELDSGPSSQNSSQNSDLSRVSDSGSHSGSDSHSGASREPGDLAERVEVVALSDCQQELSLVRTVTRGPRAFLSREEAQHFIKACGLLNCEAVLQLLTCHLRGTSECTQLRALCAIASLGSSDLLPQEHILLRTRPWLQELSMGSPGPVTNKATKILRHFEASCGQLSPARGTSAEPGPTAALPGPSDLLTDAVPLPGSQVFLQPLSSTPVSSRSPAPSSGMPSSPVPTPPPDASPIPAPGDPSEAEARLAESRRWRPERIPGGTDSPKRGPSSCAWSRDSLFAGMELVACPRLVGAGAAAGESCPDAPRAPQTSSQRTAAKEPPGSEPSAFAFLNA

SEQ ID NO: 317223 - DNA, 1687 bp, Artificial Sequence
  derived and/or modified sequence
atgtggctgcctcagctcgacctcatgagggtcatcagtgctaagagtcaaggctactccattgtcactcaaatcaccggtccaacaacagtgaatggcttggagcggggctccttgaccgtgcagtgtgtttacagatcaggctgggagacctacttgaagtggtggtgtcgaggagctatttggcgtgactgcaagatccttgttaaaaccagtgggtcagagcaggaggtgaagagggaccgggtgtccatcaaggacaatcagaaaaaccgcacgttcactgtgaccatggaggatctcatgaaaactgatgctgacacttactggtgtggaattgagaaaactggaaatgaccttggggtcacagttcaagtgaccattgacccagcgtcgactcctgcccccaccacgcctacctccactacgtttacagcaccagtcacccaagaagaaactagcagctccccaactctgaccggccaccacttggacaacaggcacaagctcctgaagctcagtgtcctcctgcccctcatcttcaccatattgctgctgcttttggtggccgcctcactcttggcttggaggatgatgaagtaccagcagaaaggtactgcagcccctggagggcgacctctgctatgcagacctgaccctgcagctggccggaacctccccgcaaaaggctaccacgaagctttcctctgcccaggttgaccaggtggaagtggaatatgtcaccatggcttccttgccgaaggaggacatttcctatgcatctctgaccttgggtgctgaggatcaggaaccgacctactgcaacatgggccacctcagtagccacctccccggcaggggccctgaggagcccacggaatacagcaccatcagcaggccttagcctgcactccaggctccttcttggaccccaggctgtgagcacactcctgcctcatcgaccgtctgccccctgctcccctcatcaggaccaacccggggactggtgcctctgcctgatcagccagcattgcccctagctctgggttgggcttggggccaagtctcagggggcttctaggagttggggttttctaaacgtcccctcctctcctacatagttgaggagggggctagggatatgctctggggctttcatgggaatgatgaagatgataatgagaaaaatgttatcattattatcatgaagtaccattatcgtaatacaatgaacctttatttattgcctaccacatgttatgggctgaataatggcccccaaagatatctgtgtcctaatcctcagaacctgtgactgttaccttctgtggcagaaagggacagtgcagatgtatgtaagttaaggactttgagatagagaggttattcttgctgattcaggtgggcccaaaatatcaccacaagggtcctcataagaaagaggccagaaggtcaaagaggtagagacaaagtgatgatggaagtggacgtgggtgtgacgtgagcaggggccatgaatgccgcagccttcagatgccagaaagggaaaggaatggattcccctgcctggagcctccaaaagaaaccagccctgcccacgccttgacttgagcccattgaaactgatcttgagctcctggcctccagaattgcaggagaataaatttgtgttgtttttaatgagcca

SEQ ID NO: 317224 - protein, 583 aa, Artificial Sequence
  derived and/or modified sequence
MALKKSSPSLDSGDSDSEELPTFAFLKKEPSSTKRRQPEREEKIVVVDISDCEASCPPAPELFSPPVPEIAETVTQTQPVRLLSSESEDEEEFIPLAQRLTCKFLTHKQLSPEDSSSPVKSVLDHQNNEGASCDWKKPFPKIPEVPLHDTPERSAADNKDLILDPCCQLPAYLSTCPGQSSSLAVTKTNSDILPPQKKTKPSQKVQGRGSHGCRQQRQARQKESTLRRQERKNAALVTRMKAQRPEECLKHIIVVLDPVLLQMEGGGQLLGALQTMECRCVIEAQAVPCSVTWRRRAGPSEDREDWVEEPTVLVLLRAEAFVSMIDNGKQGSLDSTMKGKETLQGFVTDITAKTAGKALSLVIVDQEKCFSLELLFFDFLPCTSAQNPPRRGKQGANKQTKKQQQRQPEASIGSMVSRVDAEEALVDLQLHTEAQAQIVQSWKELADFTCAFTKAVAEAPFKKLRDETTFSFCLESDWAGGVKVDLAGRGLALVWRRQIQQLNRVSLEMASAVVNAYPSPQLLVQAYQQCFSDKERQNLLADIQVRRGEGVTSTSRRIGPELSRRIYLQMTTLQPHLSLDSAD

SEQ ID NO: 317225 - DNA, 1752 bp, Artificial Sequence
  derived and/or modified sequence
atggccctgaagaagagcagccccagcctggacagcggcgacagcgacagcgaggagctgcccaccttcgccttcctgaagaaggagcccagcagcaccaagagaagacagcccgagagagaggagaagatcgtggtggtggacatcagcgactgcgaggccagctgcccccccgcccccgagctgttcagcccccccgtgcccgagatcgccgagaccgtgacccagacccagcccgtgagactgctgagcagcgagagcgaggacgaggaggagttcatccccctggcccagagactgacctgcaagttcctgacccacaagcagctgagccccgaggacagcagcagccccgtgaagagcgtgctggaccaccagaacaacgagggcgccagctgcgactggaagaagcccttccccaagatccccgaggtgcccctgcacgacacccccgagagaagcgccgccgacaacaaggacctgatcctggacccctgctgccagctgcccgcctacctgagcacctgccccggccagagcagcagcctggccgtgaccaagaccaacagcgacatcctgcccccccagaagaagaccaagcccagccagaaggtgcagggcagaggcagccacggctgcagacagcagagacaggccagacagaaggagagcaccctgagaagacaggagagaaagaacgccgccctggtgaccagaatgaaggcccagagacccgaggagtgcctgaagcacatcatcgtggtgctggaccccgtgctgctgcagatggagggcggcggccagctgctgggcgccctgcagaccatggagtgcagatgcgtgatcgaggcccaggccgtgccctgcagcgtgacctggagaagaagagccggccccagcgaggacagagaggactgggtggaggagcccaccgtgctggtgctgctgagagccgaggccttcgtgagcatgatcgacaacggcaagcagggcagcctggacagcaccatgaagggcaaggagaccctgcagggcttcgtgaccgacatcaccgccaagaccgccggcaaggccctgagcctggtgatcgtggaccaggagaagtgcttcagcctggagctgctgttcttcgacttcctgccctgcaccagcgcccagaacccccccagaagaggcaagcagggcgccaacaagcagaccaagaagcagcagcagagacagcccgaggccagcatcggcagcatggtgagcagagtggacgccgaggaggccctggtggacctgcagctgcacaccgaggcccaggcccagatcgtgcagagctggaaggagctggccgacttcacctgcgccttcaccaaggccgtggccgaggcccccttcaagaagctgagagacgagaccaccttcagcttctgcctggagagcgactgggccggcggcgtgaaggtggacctggccggcagaggcctggccctggtgtggagaagacagatccagcagctgaacagagtgagcctggagatggccagcgccgtggtgaacgcctaccccagcccccagctgctggtgcaggcctaccagcagtgcttcagcgacaaggagagacagaacctgctggccgacatccaggtgagaagaggcgagggcgtgaccagcaccagcagaagaatcggccccgagctgagcagaagaatctacctgcagatgaccaccctgcagccccacctgagcctggacagcgccgactag

SEQ ID NO: 317226 - DNA, 2354 bp, Artificial Sequence
  derived and/or modified sequence
aggagatctacttccgggccctgcgtggcagttgaaagagtggcgggagaagttgcagggaattatttgatagcacatactgatggctctaaagaagtcatcaccctcactggattctggtgatagtgactctgaggagttgccaacatttgcctttctgaagaaggaaccatcttcaacaaagaggagacagcctgaaagggaagagaagattgtagtggttgacatctcagattgtgaagcctcctgtcctccagcaccagagttattttcaccacctgtcccagaaatagctgaaactgtcacacaaacacagccagtcaggttgctaagcagtgaaagtgaagatgaagaagaatttattcctctggctcaaaggcttacatgtaagtttctgacccacaagcaactgagccctgaggactctagctccccagttaaaagtgttttggatcatcaaaataatgaaggtgcatcatgtgactggaaaaagccctttccaaagatccctgaagttcccctccatgataccccagagaggagtgcagcagataacaaggacctgatcttagatccatgctgtcagcttccagcctacctgtctacctgccctggccagagcagcagcttggcagtaaccaaaacaaattctgacatccttccaccccagaagaaaaccaagccgagtcagaaggtccagggaagaggctcacacggatgccggcagcagagacaagcaaggcagaaggaaagcaccctgagaagacaggaaagaaagaatgcagcactggttaccaggatgaaagcccagaggccagaggaatgcttaaaacacatcattgtagtgctggatccagtgctcttacagatggaaggtgggggccagctcctaggagcactgcagaccatggagtgccgctgtgtgattgaggcgcaggctgtgccttgcagtgtcacttggaggagaagggctgggccgtctgaggacagagaggactgggtggaggagccaacagtactggtgttgctccgggcagaggcatttgtgtccatgatcgacaatggaaagcagggaagcctggacagcactatgaaagggaaggaaacgcttcagggctttgtaactgacatcacagcaaagacagcagggaaagctctgtcactggtgattgtggatcaggagaaatgcttcagcctggagctgctgttctttgatttcctcccctgcaccagtgctcagaatcctccaagaagagggaaacagggagcaaataaacagaccaagaagcagcagcagagacaaccagaggccagcatagggtccatggtatccagggtagacgctgaagaggcattggtggatctgcagctacacacagaagcccaggctcaaattgtgcagagctggaaagagctggccgacttcacatgcgcattcacaaaggctgtggctgaggcgcccttcaagaagctccgagatgaaactaccttctccttctgtctggagagtgactgggctggaggggtgaaggtggaccttgctggcaggggactcgcactagtctggaggagacagattcagcagctgaaccgagtcagcctggaaatggccagtgcagttgtgaatgcctatccctccccacagctcctggtacaggcttatcagcagtgtttttcggataaagaacgccagaatttgctcgcagacatacaggtgcgccgtggggaaggtgtgacatccacttctcgccgcattggaccagaactatccaggcgtatctaccttcagatgaccactttacagccacatctctctttagatagtgctgactgattctagccctcagggatgaggatgaaaagctggaaacttccacttccccaacctcagagcctgactgtaatgaagagactggcagcacctcctggaacacaagcctaggtgaggcccagtctttcttgggtcttattatttgtgaaggtctctctgcctgtcggctggggcagagactgaaatactgccacctacctttggcatttaatgttcctctcctggcaaaaattcactgccacagacaaaccacccccactcctacccagccagccctcaaaacacaaaggaacaaagacagtccactcagacacttatttaataactgtagaaatccaaaagaattagcatcaaatcttgaagtcgtgagtgaagctgcgggttggcttgactgggctcagccactgagctgcctcaaccggccaaggaacgggattatgatgactatgcggacttctatattgtcttcatctcattgtgtgtattatgtatttagtttcaataaagcatttgtaccaatggc

SEQ ID NO: 317227 - DNA, 2296 bp, Artificial Sequence
  derived and/or modified sequence
ggaattatttgatagcacatactgatggctctaaagaagtcatcaccctcactggattctggtgatagtgactctgaggagttgccaacatttgcctttctgaagaaggaaccatcttcaacaaagaggagacagcctgaaagggaagagaagattgtagtggttgacatctcagattgtgaagcctcctgtcctccagcaccagagttattttcaccacctgtcccagaaatagctgaaactgtcacacaaacacagccagtcaggttgctaagcagtgaaagtgaagatgaagaagaatttattcctctggctcaaaggcttacatgtaagtttctgacccacaagcaactgagccctgaggactctagctccccagttaaaagtgttttggatcatcaaaataatgaaggtgcatcatgtgactggaaaaagccctttccaaagatccctgaagttcccctccatgataccccagagaggagtgcagcagataacaaggacctgatcttagatccatgctgtcagcttccagcctacctgtctacctgccctggccagagcagcagcttggcagtaaccaaaacaaattctgacatccttccaccccagaagaaaaccaagccgagtcagaaggtccagggaagaggctcacacggatgccggcagcagagacaagcaaggcagaaggaaagcaccctgagaagacaggaaagaaagaatgcagcactggttaccaggatgaaagcccagaggccagaggaatgcttaaaacacatcattgtagtgctggatccagtgctcttacagatggaaggtgggggccagctcctaggagcactgcagaccatggagtgccgctgtgtgattgaggcgcaggctgtgccttgcagtgtcacttggaggagaagggctgggccgtctgaggacagagaggactgggtggaggagccaacagtactggtgttgctccgggcagaggcatttgtgtccatgatcgacaatggaaagcagggaagcctggacagcactatgaaagggaaggaaacgcttcagggctttgtaactgacatcacagcaaagacagcagggaaagctctgtcactggtgattgtggatcaggagaaatgcttcagcctggagctgctgttctttgatttcctcccctgcaccagtgctcagaatcctccaagaagagggaaacagggagcaaataaacagaccaagaagcagcagcagagacaaccagaggccagcatagggtccatggtatccagggtagacgctgaagaggcattggtggatctgcagctacacacagaagcccaggctcaaattgtgcagagctggaaagagctggccgacttcacatgcgcattcacaaaggctgtggctgaggcgcccttcaagaagctccgagatgaaactaccttctccttctgtctggagagtgactgggctggaggggtgaaggtggaccttgctggcaggggactcgcactagtctggaggagacagattcagcagctgaaccgagtcagcctggaaatggccagtgcagttgtgaatgcctatccctccccacagctcctggtacaggcttatcagcagtgtttttcggataaagaacgccagaatttgctcgcagacatacaggtgcgccgtggggaaggtgtgacatccacttctcgccgcattggaccagaactatccaggcgtatctaccttcagatgaccactttacagccacatctctctttagatagtgctgactgattctagccctcagggatgaggatgaaaagctggaaacttccacttccccaacctcagagcctgactgtaatgaagagactggcagcacctcctggaacacaagcctaggtgaggcccagtctttcttgggtcttattatttgtgaaggtctctctgcctgtcggctggggcagagactgaaatactgccacctacctttggcatttaatgttcctctcctggcaaaaattcactgccacagacaaaccacccccactcctacccagccagccctcaaaacacaaaggaacaaagacagtccactcagacacttatttaataactgtagaaatccaaaagaattagcatcaaatcttgaagtcgtgagtgaagctgcgggttggcttgactgggctcagccactgagctgcctcaaccggccaaggaacgggattatgatgactatgcggacttctatattgtcttcatctcattgtgtgtattatgtatttagtttcaataaagcatttgtaccaatggc

SEQ ID NO: 317228 - DNA, 1752 bp, Artificial Sequence
  derived and/or modified sequence
atggcattgaagaagagctcacctagcctggactccggcgactctgacagtgaggaactgcccacgtttgccttcctgaaaaaggagccctctagtaccaaacgaagacaacctgaaagagaggaaaagatagtagtggttgatatctcagactgtgaggccagttgtccccctgctcctgagctgttttcaccacccgtgcccgaaatagcagagaccgttacacagactcagcccgttcggctattgagctccgagtccgaagacgaggaggaattcatccctctggcccaaagactaacctgcaagttcttaacacacaaacaattgtcacctgaagactcatccagtcccgtgaaaagtgtattggatcatcaaaataatgagggagcttcctgtgattggaagaaaccattccccaagatccctgaggtgcctctgcatgatacaccagagcgaagcgccgccgataacaaggaccttattctggatccctgttgtcagcttcccgcatatctctctacttgccccgggcaatcttctagcctcgccgttactaagaccaattctgacatcctcccaccacagaagaaaaccaaaccaagccagaaggtccagggccgcggatcccatgggtgccgccagcagagacaagccaggcagaaagaaagtaccctacggcgtcaagaaagaaagaacgccgctctagttacacgcatgaaggcccagaggccggaagaatgtctaaagcacattattgtcgtactggacccagtattgctgcaaatggaggggggcgggcagctcttgggcgctctgcaaacaatggaatgccgctgtgtgatagaggcccaggctgtgccttgcagtgtgacatggcgccggcgtgctggcccgtccgaggaccgcgaagattgggtggaagagccaaccgtgctggttctccttcgcgcagaagcttttgtcagtatgatcgataacggcaagcaaggaagtttggattccacaatgaaaggaaaagagacgctgcaaggcttcgtcacggatatcaccgcaaaaaccgcgggcaaagccctctcacttgtgatcgtcgatcaggagaagtgcttctcacttgaactgttatttttcgacttcctgccatgtacgagcgctcagaaccctccccggcgagggaagcagggcgccaacaagcagacgaagaagcagcagcagagacagccagaggccagcatcggctcaatggtgagcagggtggacgccgaggaggccctcgtggatctacagctccatacagaggcacaggcgcagatagttcagtcttggaaggagctggccgactttacatgtgcctttacaaaagctgtcgctgaggcccctttcaagaagctgagggatgagaccactttttctttctgccttgagagcgactgggctggaggcgtgaaagttgacttagctggacgtggcctggcattagtgtggcgccgacagattcagcagctcaacagggtttccttggagatggcctccgcagtcgttaatgcctatccgtcacctcagctgctcgtgcaggcgtatcaacagtgcttctcagataaggaaaggcaaaatctgttggcagatattcaggtccgacggggcgaaggggtcaccagcactagccggagaatcggtcctgaactctctcggaggatctatctccagatgaccaccctgcaacctcacctgagcttggattctgcggattag

SEQ ID NO: 317229 - DNA, 1752 bp, Artificial Sequence
  derived and/or modified sequence
atggctttaaaaaaatcttcacccagcttagactccggtgactcagacagtgaagagctgccgacttttgcattcctgaaaaaggagccttcatcaactaagcggcgtcagcccgaaagagaggaaaagatcgtcgtggtcgatattagcgattgtgaggcatcttgtccaccagcaccagaactgttttctcctcctgtcccagaaattgcggaaaccgtgacacagactcagcccgtgcgcctcctctcatctgagagtgaagacgaggaggaattcattcctcttgcccagcgcttaacctgcaagttccttacgcacaagcaactctctccggaagatagctcatcaccggtaaagtcagtgctggaccaccaaaacaacgagggtgcgtcatgcgactggaaaaaaccgtttcccaaaattcccgaagtgcccctgcacgacaccccggagcggtcagccgccgataacaaggatctgatcctcgacccttgctgtcagctgcccgcctatctttctacatgcccaggccagtccagttcacttgctgtaacaaagaccaattcagatattctgccaccccagaagaaaaccaaaccttctcagaaggtacagggacggggatcacacggatgccggcagcaaagacaggcccggcaaaaggagagcaccctacgaaggcaggagcggaagaatgctgcactggttacgcggatgaaggcacagcggcccgaggaatgtctcaaacatataatcgtggtcctggaccctgtactactccagatggagggcggcggacaactgctgggggccctacagacgatggaatgtcgctgcgtgattgaagcccaggcagtgccttgttctgtgacttggagaaggcgagccggcccctctgaggaccgcgaagattgggtagaagagcccacggtgctcgtgttgctgcgcgcggaggcatttgtgtctatgattgataacggcaagcaaggtagtctcgattctaccatgaagggcaaagagacattgcagggttttgtgacagacatcactgctaaaacagccggcaaggcgttgtccctggtgatcgtggatcaggaaaagtgtttctctctggagctactgtttttcgactttctcccatgcacctctgcgcagaatccacccaggcgcgggaagcagggcgctaacaagcagacaaagaagcagcagcagcgccaaccagaggcaagcattggctctatggtgtcaagggtcgatgctgaagaggcgctggtggaccttcagctccataccgaggcacaagctcagatcgtccaaagttggaaggagttagccgattttacctgcgcattcacaaaggccgtcgcagaggccccatttaaaaaactgcgcgacgaaacaaccttctctttttgtttagaatctgactgggccggaggcgtcaaagtcgacctcgccggacgagggcttgcattggtttggagacggcagatacaacagctgaaccgtgtcagcctggagatggcctcagcagtcgtgaacgcttacccttctccccagctgctggtgcaggcttaccagcagtgttttagcgataaagaaaggcaaaacctcttggccgatattcaggtgaggcggggtgagggagtgacatctactagccgaagaatcggtcctgagttatccaggaggatctacctgcaaatgactaccctgcagccacacctcagtctcgactcggccgactag

SEQ ID NO: 317230 - DNA, 1752 bp, Artificial Sequence
  derived and/or modified sequence
atggccctgaagaagagcagccccagcctggacagcggggacagcgacagcgaggagctgcccacctttgccttcctgaagaaggagcccagcagcaccaagaggcggcagcctgagcgggaggagaagatcgtggtggtggacatcagtgactgtgaggccagctgccccccagcccctgagctgttcagcccccctgtgcctgagattgctgagaccgtgacccagacccagcctgtgcggctgctgagcagcgagagtgaagatgaggaggagttcatccccctggcccagaggctgacctgcaagttcctgacccacaagcagctgagccctgaggacagcagcagccctgtgaagtctgtgctggaccaccagaacaatgaaggagccagctgtgactggaagaagcccttccccaagatccctgaggtgcccctgcatgacaccccagagaggtctgctgctgacaacaaggacctgatcctggacccctgctgccagctgcctgcctacctgagcacctgccccggccagagcagcagcctggccgtgaccaagaccaacagcgacatcctgcccccccagaagaagaccaagcccagccagaaggtgcagggccggggcagccacggctgccggcagcagaggcaggcccggcagaaggagagcaccctgcggcggcaggagaggaagaatgctgccctggtgaccaggatgaaggcccagaggccagaagaatgtctgaagcacatcatcgtggtgctggaccctgtgctgctgcagatggagggcggcggccagctgctgggcgccctgcagaccatggagtgccgctgcgtcatcgaggcccaggccgtgccctgcagcgtgacctggaggagaagagctggccccagtgaagatcgggaggactgggtggaggagcccaccgtgctggtgctgctgcgggcagaggcctttgtgtccatgattgacaatggcaagcagggcagcctggacagcaccatgaagggcaaggagaccctgcagggctttgtgacagacatcacagccaagacagctgggaaggccctgagcctggtgattgtggaccaggagaagtgcttcagcctggagctgctcttctttgacttcctgccctgcaccagcgcccagaaccccccccggcggggcaagcagggcgccaacaagcagaccaagaagcagcagcagaggcagcctgaggccagcatcggctccatggtgtcccgggtggatgctgaggaggccctggtggacctgcagctgcacacagaggcccaggcccagatcgtgcagagctggaaggagctggccgacttcacctgtgccttcaccaaggctgtggccgaggcccccttcaagaagctgagagatgagaccaccttctccttctgcctggagagtgactgggccggcggcgtgaaggtggacctggccggccggggcctggccctggtgtggaggcggcagatccagcagctgaacagagtgtccctggagatggccagcgctgtggtgaatgcctaccccagcccccagctgctggtgcaggcctaccagcagtgcttcagtgacaaggagcggcagaacctgctggccgacatccaggtgcggcggggggagggcgtgaccagcaccagccgccgcatcggccctgagctgagccgccgcatctacctgcagatgaccaccctgcagccccacctgagcctggacagcgctgactag

SEQ ID NO: 317231 - DNA, 1752 bp, Artificial Sequence
  derived and/or modified sequence
atggccctgaagaagagcagccccagcctggacagcggcgacagcgactccgaggagttgcctacatttgcattcttgaagaaagaaccctcctcaacgaagcggcgccaacctgagcgcgaagagaaaatcgtggtcgtggacatctcagactgcgaggcatcctgccctcccgcgccagaacttttttctcctcccgtgcctgagatcgcagaaacggtcacccaaacacaaccagttcgactgttgtcttcagagtcagaagacgaggaggagttcattccgctggctcaacggctcacctgcaaattcctgacacataaacagctatctccggaagactcaagctctcccgtgaagagtgttttagaccatcagaacaacgaaggagcatcttgtgactggaaaaaacccttccccaaaatccctgaggtgccacttcatgatacaccagagcgatcagccgccgataacaaggatctgatactcgatccttgttgccagctgccagcttatcttagtacttgtcccggacaatctagcagcctggcagtaacgaaaaccaatagcgacatcctgccacctcaaaagaagaccaaaccttcacagaaggttcagggaagagggtctcatgggtgtaggcagcaaagacaagctcgccaaaaagagagtaccctcaggcggcaggagcgaaagaacgccgcactagtaaccaggatgaaagcccagcggcctgaggaatgtctcaagcacatcattgttgttctggatcctgtcctactgcaaatggagggcggagggcagctcttgggagccctccagaccatggagtgtcggtgcgtaattgaggcccaggccgtgccttgctctgtcacctggaggaggagggctggtccctcagaggacagagaagattgggtggaggagcccacagtgctcgttctgctacgagccgaagccttcgtaagtatgattgataacggcaaacagggttccctggattctactatgaagggtaaagaaactcttcagggcttcgtgaccgatatcacagctaaaactgccgggaaggccctctccttagtaattgtcgatcaggagaagtgcttctcactcgagttgcttttcttcgattttcttccctgtacttcggctcagaaccctcccagacgcgggaagcagggggcaaataaacagactaaaaagcagcagcagaggcagcctgaggcctcaatcggctccatggtctccagggtggacgctgaagaggcattggtggatctccaactacatacagaggcacaagcccaaattgtgcagtcttggaaggagctagccgatttcacctgcgcttttacaaaggctgttgctgaggcccctttcaaaaagctccgagatgaaaccacgttttctttttgtcttgagagcgattgggctgggggtgttaaggtggaccttgccgggagaggcctggccctagtctggagaaggcagattcagcagctcaatcgggtcagcttagagatggcatccgcggtcgtgaacgcctaccccagcccacagctgctggtgcaagcctatcagcagtgtttctccgacaaagagagacaaaatcttttagccgatatacaggtgcgcagaggggagggcgtaaccagcaccagcaggcggattggaccagaattatcgaggagaatctacttgcaaatgaccactctgcaacctcacctcagcctagactctgccgactag

SEQ ID NO: 317232 - DNA, 1752 bp, Artificial Sequence
  derived and/or modified sequence
atggccctgaagaagagcagccccagcctggacagcggcgacagcgactccgaagagcttccaacattcgccttcctcaagaaggagccgtctagtactaaacgacgccagccagagcgagaggagaaaatcgtagttgtggacatttccgattgtgaagccagctgcccaccagcccctgagctgttcagtcccccagtgcctgagattgctgaaactgttactcagacacagcccgttaggctcttgagctctgagtccgaagacgaagaagaatttatacctctcgcccagagattgacctgcaagtttctgactcataaacagctgtcgcccgaagacagctcatctccagtgaagtctgtgctggaccatcagaacaatgaaggggcctcctgtgactggaagaagcccttcccaaaaattcccgaggtgcctctgcacgatactccggaaaggagtgccgctgacaataaagacctgatccttgatccatgttgccagctgcccgcatatttgtctacgtgtccaggccagtcctcaagcctagctgtgacaaaaaccaatagcgatatcctgcctccccagaaaaaaactaaaccatctcagaaggtgcagggacggggcagtcatgggtgtaggcagcagcgccaggccagacagaaggagtctaccttgaggaggcaggaacgcaagaacgcggctctggtcacgcggatgaaagctcaacgtccagaggagtgtttaaagcacataatcgtggtgctcgatcccgttctgcttcagatggaggggggagggcagttactaggtgccctccagaccatggagtgtcggtgtgtcatcgaagctcaggcagttccttgctctgtaacatggaggcgtcgagctggaccatctgaagaccgcgaggactgggtggaggagcccactgtcttagttctgctgcgcgcagaggcatttgtgagtatgattgataatgggaagcaaggcagtctggactccactatgaaaggtaaggagacactccaagggtttgttacagacattaccgctaaaaccgccggtaaggccctgtccctggtgattgtcgaccaggagaaatgtttttccctcgagctcctattttttgattttctcccttgtacttccgcccaaaatcccccccggagaggcaagcagggcgctaataagcaaactaagaagcagcagcagcggcagcctgaggcctccatcggctccatggtcagccgcgtcgatgccgaagaggctctggtggacctgcagcttcacaccgaggcccaggcccagattgtgcagtcttggaaagagttggccgatttcacgtgcgcttttactaaagccgttgccgaagccccttttaaaaaactgcgggacgaaactacattttccttttgcctggagtctgactgggcgggaggagttaaggtggacctcgcggggcgtggcctggccctcgtatggcggagacaaatccagcagctcaacagagtgtcactcgaaatggcttctgcagtagttaacgcatatccctcgccacagctgctggtacaggcttaccagcaatgcttctcagacaaggaacgccagaatttactggctgatatccaggtcaggcgaggcgagggcgtgacctccacatctcggcggatcggcccagagctatctcggcgaatctacctgcagatgactactttgcagccccatctgtccttggatagcgctgattag

SEQ ID NO: 317233 - DNA, 1752 bp, Artificial Sequence
  derived and/or modified sequence
atggccctgaagaaatcatcaccgtcactggacagtggcgactctgactctgaagaactgccaacttttgcgtttctcaaaaaggagccttcctcaacgaagcggagacagccagagagagaagaaaaaattgtcgtagtggacattagcgactgcgaagcttcatgcccaccagctccagaactgttttctccacccgtccccgagatcgcggaaacagtgacccagacacagcctgttcggctgcttagctccgagtccgaggacgaggaagaattcattccacttgctcagaggcttacctgtaagttcctaacccataagcagcttagtcctgaagatagttcttcaccggttaagagcgtgttggaccaccagaacaacgagggtgcctcttgtgattggaaaaaaccttttcctaagattccggaggttcctttgcacgatacacccgagcgctccgccgctgataacaaagacctgatactcgacccctgttgtcagctccccgcttaccttagcacgtgtcctggccagtccagctccctggctgtgacaaagaccaactccgatatcctgcctccccagaaaaaaacgaagccctcgcagaaggttcagggacgtgggtcgcacggctgtaggcagcagagacaggcccgacagaaagagtccaccctgcgtcgacaggagaggaagaatgcagcgctggtgacaaggatgaaagcacagcgcccagaggaatgtctgaaacatattatagttgtcctggatcccgtgcttcttcagatggagggagggggacagctgttaggcgctttgcagacaatggagtgtcgctgcgtgatcgaggcacaggccgtgccgtgcagcgtgacttggcgcaggagagcaggtcctagtgaggaccgcgaggattgggtggaggaacctacagtacttgtcctcctacgcgcagaggctttcgtgtcaatgattgataatggcaagcagggttccctggatagcaccatgaagggcaaagaaactcttcaggggtttgtgacagacatcacagccaaaacagctgggaaagcactttccctcgtgatcgtggaccaagaaaagtgcttttcactggaactgctgttcttcgacttcctgccctgtacctccgcacagaatccacctcggagagggaaacagggcgcaaataagcaaactaagaagcagcagcagcggcagccggaagcttccatcggcagcatggttagtcgagtcgacgcagaggaggcccttgtggatctgcaactgcacacagaggctcaggcacagattgtgcagagctggaaagaactggctgattttacctgtgcattcacgaaagccgtggcagaggcccctttcaaaaagctccgagatgagaccacgttttcattctgcttagagtctgactgggccggtggcgtcaaggtggacctcgcgggaaggggacttgccctagtgtggaggagacagattcagcaactgaacagggtctcactcgaaatggcatccgcggtggtgaatgcttacccctccccccagctattagtgcaagcttaccagcagtgcttctctgacaaggaacgacaaaatctgctcgctgacatccaggttaggaggggcgagggagtaactagtacatctaggcgaatcggtcctgagctctcacggcgtatatatcttcagatgactaccctccaaccccacttgagcctggattccgcagattag

SEQ ID NO: 317234 - DNA, 1752 bp, Artificial Sequence
  derived and/or modified sequence
atggccttgaagaaatcttcccccagcctggactccggcgacagcgactccgaggagctcccgactttcgcgttccttaagaaggaaccgtcaagtaccaagcgacggcagcctgaaagggaggagaaaatcgtggtggttgatatttccgactgtgaggcttcttgtccacctgcccctgagcttttcagcccgcctgtcccagagatcgccgagaccgtaacacagacccagccagtgagactactgagtagtgagtccgaagatgaggaagagtttataccactggctcagcggctcacctgcaaatttctgactcacaagcaactgtctccagaggactcatcctcgcccgtcaagagcgtgctagaccaccaaaacaacgaaggcgcatcatgcgactggaaaaagccatttccgaagattcccgaggtcccgctgcacgacaccccagagcggtcggctgctgacaacaaagatctgatactagacccctgttgtcagcttccggcttaccttagcacctgtcccggacaatccagctctctggccgtcactaaaactaatagcgacatcctaccccctcaaaagaagacgaaaccgagtcagaaagtccagggccgaggtagccacggatgtcgccagcaacgccaggctaggcagaaggagagcacacttaggcgtcaggagaggaagaacgccgctctagtcactagaatgaaagcccagcggcctgaggagtgcctgaaacacatcatcgtggtgttggaccccgttctactgcagatggaaggcggaggccagctgttaggagccttgcaaaccatggaatgccggtgtgtaatcgaagctcaggctgtgccctgctcagtaacttggagaaggcgggctggtccatctgaggatcgcgaggactgggttgaggagcccacagtgttggttttattgcgcgcagaggccttcgtcagcatgatcgataacggcaagcagggttctctggacagcactatgaagggcaaggagacgctgcagggctttgtcacagacatcactgccaagactgccggtaaagccttgtctcttgttattgtggatcaggagaagtgtttttccttggagctcctgttcttcgacttccttccatgcaccagtgctcaaaaccctccaaggcgaggtaaacagggggcaaacaagcagaccaaaaagcagcaacaaagacagccggaagcaagtattggcagtatggtgtcccgtgttgacgccgaggaagctctcgtggatctgcagctgcataccgaagcgcaggcacagatcgttcaatcgtggaaggagcttgcggatttcacttgcgcatttactaaggccgtcgctgaggccccattcaaaaagctgcgggatgagacaaccttcagtttttgcttagagtctgattgggcaggcggtgttaaagtggacctggccggaaggggtctcgccctggtctggcggagacagattcaacagttaaaccgagttagtttggagatggcctccgccgttgtgaatgcttatcctagtccccagctgctggttcaggcttatcaacagtgtttttctgacaaggagaggcaaaatctgctggctgacatccaagtgcggagaggggagggagtgacgtctaccagtcgcagaattggaccagaattgagcagacgtatctaccttcagatgactacgctgcagccccatttgagtttagattctgcagattag

SEQ ID NO: 317235 - protein, 287 aa, Artificial Sequence
  derived and/or modified sequence
MLLPRSVSSERAPGVPEPEELWEAEMERLRGSGTPVRGLPYAMMDKRLIWQLREPAGVQTLRWQRWQRRRQTVERRLREAAQRLARGLGLWEGALYEIGGLFGTGIRSYFTFLRFLLLLNLLSLLLTASFVLLPLVWLRPPDPGPTLNLTLQCPGSRQSPPGVLRFHNQLWHVLTGRAFTNTYLFYGAYRVGPESSSVYSIRLAYLLSPLACLLLCFCGTLRRLLSTLASGPGAGGPWAPAHWPACPPLPGLPRLQLPPPHHAQVLRAAGAMGGDTWRGRSFLPWGW

SEQ ID NO: 317236 - DNA, 864 bp, Artificial Sequence
  derived and/or modified sequence
atgctgctgcccagaagcgtgagcagcgagagagcccccggcgtgcccgagcccgaggagctgtgggaggccgagatggagagactgagaggcagcggcacccccgtgagaggcctgccctacgccatgatggacaagagactgatctggcagctgagagagcccgccggcgtgcagaccctgagatggcagagatggcagagaagaagacagaccgtggagagaagactgagagaggccgcccagagactggccagaggcctgggcctgtgggagggcgccctgtacgagatcggcggcctgttcggcaccggcatcagaagctacttcaccttcctgagattcctgctgctgctgaacctgctgagcctgctgctgaccgccagcttcgtgctgctgcccctggtgtggctgagaccccccgaccccggccccaccctgaacctgaccctgcagtgccccggcagcagacagagcccccccggcgtgctgagattccacaaccagctgtggcacgtgctgaccggcagagccttcaccaacacctacctgttctacggcgcctacagagtgggccccgagagcagcagcgtgtacagcatcagactggcctacctgctgagccccctggcctgcctgctgctgtgcttctgcggcaccctgagaagactgctgagcaccctggccagcggccccggcgccggcggcccctgggcccccgcccactggcccgcctgcccccccctgcccggcctgcccagactgcagctgccccccccccaccacgcccaggtgctgagagccgccggcgccatgggcggcgacacctggagaggcagaagcttcctgccctggggctggtag

SEQ ID NO: 317237 - DNA, 864 bp, Artificial Sequence
  derived and/or modified sequence
atgttgttgccccgtagcgtctcatcagagcgggccccaggtgtgccagagcctgaggagctatgggaagccgagatggagagattaaggggctccgggacccctgttagagggctcccgtacgccatgatggataagagacttatctggcaactgcgcgagcccgctggcgtccagactcttcgttggcagcggtggcagcgccgtagacagaccgtcgagagaaggctgcgcgaggccgctcagaggctcgcccgcggcttaggcctgtgggagggcgcgctgtacgagattggcgggctcttcggaacagggataaggtcttactttactttcttgcgattcctgctcctgctgaatttgctcagcctactgctgacagcctcctttgtgctattgcctctggtgtggcttagacccccggacccaggacccaccctcaatctcacactgcagtgccctggctcccgccagtcgccacccggagttcttcgctttcataaccagctgtggcacgtcctgacgggcagagcattcactaacacctaccttttctacggcgcctaccgtgtaggccctgagagttcttccgtttactctattaggcttgcctatctgctttctccactggcttgcctcttactttgtttctgtggaactctgagaagactactcagcacgctagcatctggtcccggtgccggtggaccgtgggcccctgcacactggcccgcctgcccccccttaccagggctgcccaggctccagttgccaccaccccaccacgctcaagtactccgtgccgctggcgctatgggcggggacacctggcgtggcaggagcttcctgccttggggctggtag

SEQ ID NO: 317238 - DNA, 864 bp, Artificial Sequence
  derived and/or modified sequence
atgctgctgcccaggtctgtgtcctctgagcgggcccctggggtgcctgagcctgaggagctgtgggaggccgagatggagcggctgcggggcagcggcacccctgtgcggggcctgccctatgccatgatggacaagaggctcatctggcagctgcgggagcctgctggggtgcagaccctgcgctggcagcgctggcagaggcggcggcagacagtggagcggcggctgcgggaggccgcccagaggctggcccggggcctgggcctgtgggagggcgccctgtatgagatcggcggcctgtttggcaccggcatccgcagctacttcaccttcctgcgcttcctgctgctgctgaacctgctgagcctgctgctgacagccagctttgtgctgctgcccctggtgtggctgcggcccccagaccccggccccaccctgaacctgaccctgcagtgccccggcagccggcagagccccccaggagtgctgcgcttccacaaccagctgtggcacgtgctgaccggccgggccttcaccaacacctacctgttctacggggcctacagagtgggccctgagagcagctctgtgtacagcatccggctggcctacctgctgagccccctggcctgcctgctgctgtgcttctgtggcaccctgcggcggctgctgagcaccctggccagcggccctggggccggcggcccctgggccccagcccactggccagcctgcccccccctgcccggcctgccccggctgcagctgcccccaccccaccacgcccaggtgctgcgggctgctggggccatgggcggggacacctggaggggccgctccttcctgccctggggctggtag

SEQ ID NO: 317239 - DNA, 864 bp, Artificial Sequence
  derived and/or modified sequence
atgctgctgccccggagcgtgagcagcgagcgggcccccggcgtgccggaaccagaggagctatgggaagcagaaatggagcgactccgagggtccggaacacccgtgagaggacttccatacgctatgatggacaaaagactgatttggcaattgcgagagcctgccggcgtccaaacgctgagatggcaacgatggcagaggcggagacagacggtcgaaagacggctgagagaagcagcgcagcgactggcccgcgggcttgggctgtgggagggagccctatacgaaatcgggggcctcttcggaactgggattcgttcatacttcacgtttctccgtttcctgctgctgctgaacctgctgagtttactgctgaccgccagcttcgttctgctccccttagtctggctgcggcctccggatccggggcccactttgaaccttaccctgcagtgccccggctctcggcagtctccgccaggcgtgctgcgctttcacaaccagctttggcacgtgctgaccggaagggcctttacaaacacttatctgttctacggggcatatcgggttggtccagagtctagcagcgtctactctatacgtcttgcatacctgttaagccctctggcctgcttgctgctgtgcttttgcgggactttgcggagacttctttctacactggcaagcggtcccggtgccggagggccatgggccccagctcattggccagcttgtccaccactgccaggactaccaagacttcagctgcctccccctcatcatgcacaggttctccgtgcagcaggcgctatgggaggtgacacctggcgcgggagaagctttcttccctggggttggtag

SEQ ID NO: 317240 - DNA, 864 bp, Artificial Sequence
  derived and/or modified sequence
atgcttcttcctaggagtgtctcgtctgaaagagcacccggagtgcccgagccagaggagctgtgggaagcagaaatggaacggctgagaggctctgggacgcccgtgcggggacttccgtatgctatgatggataagagactgatttggcagctgagagagccagccggtgtccagacgttacgatggcagcggtggcagcgtcggagacaaaccgttgagagaagactgcgcgaagctgcccagagactggctcggggactcggtttatgggaaggcgcactgtatgagatcgggggactctttggcactggtattcgctcttacttcaccttcctccgatttcttctgctcttgaatctgctctcacttctgcttacagccagttttgtgctgctgccattagtttggctcaggccaccagacccaggacccacattgaatttgaccttgcaatgccccggttcacggcaaagccctcccggagttctgcggttccacaaccagttatggcacgtgctcaccggacgagccttcacaaatacttatttattttatggtgcctatagggttggcccagagtcttcaagtgtctactctatccggttagcttacctgttgtccccattggcttgccttctgctgtgcttctgcggcacacttcggagacttctaagcactttggcttcaggacccggtgccggtggaccctgggccccagctcactggccagcctgccctcctctgcccggactacctcgcctgcaactcccacctccacaccatgctcaggtgctgagggctgcgggtgccatgggaggggatacatggcggggtcgttcctttttaccctggggttggtag

SEQ ID NO: 317241 - DNA, 1246 bp, Artificial Sequence
  derived and/or modified sequence
caccaccctgcctggcttggcaggagtcgtctgagaaggggactcctccagggacttggtccctaggtccccagatggggagactgaggccgtggctgtgtgtccctctgagagttggagcggggctgggcccgaattcgaccgcagcaggattctctctcatttctgagccccggaggtggcagagcggcagacccgggcaagtgaaccctagggctgcaggagcccaggccccgacgccggcgcagaggggacggaagggcccgcccccagcccagcgtgcacagaggccatagccaaggccttaaggctcatccaaccggggactcatatcccccccaccggcagcccggcgccccagcctctacccgtgcccgccgagatgctgctgccgcggtcggtgtcatcggagcgggcccctggggtgccggagccggaggagctgtgggaggcagagatggagcggctgcgcggctctgggacgcccgtgcgcgggctgccctatgccatgatggacaagcgcctcatctggcagctgcgggagcccgcgggggtgcagaccttgcgctggcagcggtggcagcgccggcggcagacggtggaaaggcgcctgcgggaggcagcgcagcggctggcccggggccttgggctctgggagggggcgctctacgagatcgggggcctcttcggcacaggaattcggtcctacttcaccttcctccgcttcctgctgctactcaacctgctgagcctgctgctcaccgcaagcttcgtgctgctgcccctggtctggctccgcccccctgacccaggccccaccctgaacttgaccctccagtgccctggtagccgccagtccccgcctggcgttttgaggttccacaatcaactttggcatgttttgactggcagggccttcaccaacacctatctcttctacggtgcgtaccgagtggggccggagagcagctccgtgtacagcatccgcctggcctacctcctcagcccgctggcctgcctgctcctctgcttctgtgggactctgcggcgactactcagcaccctggcaagtggtcccggagctggtggcccttgggctcccgcccattggccagcgtgccctccactacctgggctcccacgccttcagcttccccctcctcatcatgctcaggttctcagggcagccggggccatgggaggggacacctggagggggaggtccttccttccatgggggtggtga

SEQ ID NO: 317242 - DNA, 549 bp, Artificial Sequence
  derived and/or modified sequence
atgcccatcccccccccccccccccccccccccggccccccccccccccccaccttccaccaggccaacaccgagcagcccaagctgagcagagacgagcagagaggcagaggcgccctgctgcaggacatctgcaagggcaccaagctgaagaaggtgaccaacatcaacgacagaagcgcccccatcctggagaccccccccccccccccccccgtgatcagaaacggcgccagagacgcccccccccccccccccccctacagaatgcacggcagcgagccccccagcagaggcaagcccccccccccccccagcagaacccccgccggcccccccccccccccccccccccccctgagaaacggccacagagacagcatcaccaccgtgagaagcttcctggacgacttcgagagcaagtacagcttccaccccgtggaggacttccccgcccccgaggagtacaagcacttccagagaatctaccccagcaagaccaacagagccgccagaggcgccccccccctgccccccatcctgagatag

SEQ ID NO: 317243 - DNA, 549 bp, Artificial Sequence
  derived and/or modified sequence
atgcctatcccacctcccccgcccccgccccccggcccccctcctcccccaacgtttcatcaagccaataccgagcagccaaaactctcccgcgatgaacaacggggacgaggagccctcctgcaggacatctgcaaggggacaaagctgaaaaaggtaaccaacataaacgataggagcgctccaatactggagactccgcctcctccaccccccgtcatcaggaatggcgccagagacgccccccctccaccccctccatatcgcatgcacggctctgaacctccgtctcgaggaaaacctcccccgcctcctagccgaactcctgccggccctcctccaccgccaccacctccgctgcggaatggacaccgggactccataacgacggtgagatcatttctagacgactttgagtccaagtacagctttcaccccgtggaggattttcctgcaccggaagaatacaaacattttcaaagaatataccccagtaagacaaatcgggcagcccgtggcgccccacccctcccgccaatcttgaggtag

SEQ ID NO: 317244 - DNA, 549 bp, Artificial Sequence
  derived and/or modified sequence
atgcccatcccaccaccccccccaccccccccgggacccccacccccccccacctttcaccaggccaatacagagcagcctaagttatccagggacgagcagcgaggaagaggggccctgttacaggacatctgtaagggcaccaaactgaagaaggttaccaatattaacgatagatccgcccccattctggagacacctccaccacccccgcccgtgatccgtaatggagctcgcgacgcgcccccccctccgcctccctacagaatgcacggctcggagcccccatctagaggcaagccaccacccccccccagccggaccccagctggacccccaccacccccaccaccccccctgcgcaacggacatagagactccatcaccaccgttcgctcattcctggacgactttgagagcaaatacagcttccacccagtggaggacttccccgcacctgaggaatacaaacattttcagcggatttacccaagcaagaccaaccgcgccgcccggggggcccctcctctaccccctatactgcgctag

SEQ ID NO: 317245 - DNA, 549 bp, Artificial Sequence
  derived and/or modified sequence
atgcccatccccccacctcctcctcctcctcctggccccccacctccacccaccttccaccaggccaacacagagcagcccaagctgagcagagatgagcagaggggccgcggggccctgctgcaggacatctgcaagggcaccaagctgaagaaggtgaccaacatcaatgacagaagtgcccccatcctggagaccccacctcctcctcctcctgtgatcagaaatggagccagagatgcccctcctcctcctccaccctacaggatgcacggcagcgagccccccagccggggcaagcccccacctccacccagcaggaccccagctggccccccacctcctcctcctccacccctgagaaatggccaccgggacagcatcaccaccgtgcgctccttcctggatgactttgagagcaagtacagcttccaccctgtggaggacttccctgcccctgaggagtacaagcacttccagaggatctaccccagcaagaccaacagagctgcccggggggccccacccctgccccccatcctgaggtag

SEQ ID NO: 317246 - DNA, 2378 bp, Artificial Sequence
  derived and/or modified sequence
aaaaggggcggtggcggcggcggcggcggcggcggcggcggcgacggcgagaaagagcttgccggggggcgagcaggacaggacgaagccggagtgtaggcggcagaggattcgctcccagagcagctgcggccaggtatatgaatgacctaaaggtacaaataaagacggagagagaacagtgccaactgggagcagggcaagaatgccaattcctcctcccccgccacccccacctggtcctcctccacctcccacatttcatcaggcaaacacagagcagcccaagctgagtagagatgagcagcggggtcgaggcgccctcttacaggacatttgcaaagggaccaagctgaagaaggtgaccaacattaatgatcggagtgctcccatcctcgagactcctccacccccaccacctgtgatccgaaatggtgccagggatgctccccctcccccaccaccataccgaatgcatgggtcagaacccccgagccgaggaaagcccccacctccaccctcaaggacgccagctgggccaccccctcctcctccaccgcccctgaggaatggccacagagattctatcaccactgtccggtctttcttggatgattttgagtcaaagtattccttccatccagtagaagactttcctgctccagaagaatataaacactttcagaggatatatcccagcaaaacaaaccgagctgcccgtggagccccacctctgccacccattctcaggtgaagcctggcttggtcccgttcctcaggaaaaggatggaccttctcttcttctcagatggtcccttccattcccctgaaacctgcatgagagctcctaacatgtttctccaatgcaatcaagccctagactccaaatgtcctcccagctcacctccatctatgcatctcatctctggatttggtgatcagactctatattgacagtaggatctcaaaccctgcatccatccttcctccagcaagccctgctagccacatgaggaacaagtttccgtgtcttctgccttcctcttggggaaaggtgccttgttgtgatgaattaactcactgttagggcagggtggagaatggtactccttccttctcctgtccactgtgggggaagcttggcaggtatattatatttcatcatttaggaggctggcatgaccaggacttatgggtgggaggggagcatttttagtgaagcaagaaaggagtttgccaagaagtgatctgttttaaaggtcatatttggagaaagggcaaggaattgggtctgctttatttttgggggtattttgtttttgttctcacctgctgcccccccaccccaccaccccagggataaattggatataaacactaaatactaatcagttgaacttaacatttaataaaaagaaagggtgaaataaactgaagaccattttagaactagtcagttctctgcagcaaagggaacaggagccatttgaaccctctgggacccctcaccccactgcttcagggtgctaggctgagggatgtttttcctcccccttaccgcccatgcccttgaaagaaaagtcactttttgtggagggcatcattcattcctgattcacaaaccccaaaaacctctggtgggagataggaagatagggcgtgggcctgggccttaacctcaatcttgtgtctgcctcagtcttttctgactggccctgaagttgtcagtggctctttctgtccttcagcccctggaaggtgctccaggataacaaagaagggcaggttgaagcccctcatggaaggagctggctttgtggggctgcaaaggacttttaagtcctgcctgtactgaagttcacagcccacctgactgagcagactcttcctgttcctttctctaccacccttgccttcccaggactgcacggtttaacacagcagagtacagaagggtgaagaagtgagcagaggcttatgaagatattcagatactcttctatgccaggaagcacaaagactttgttgagatttgcctcagttcagtagatcttccttggcagccagccataggttgtttctttgtcttccgggtcctaaagagcacagagaaaatggaggtccccagtctaggtaggaagctgattggatgaggacttctttttttccgacagcaggatggggctcttgggctccacacaccagatgctttggttttctacaactgttgctatgtgtagagggtgctcagagcgtggcatgagagcaaggagaccatggctactctttgaaatggatggggaaaattagcttaaaaatttaatcacgagattgcgccactgcactccagcctgggcgacagagccagactccgtctc

SEQ ID NO: 317247 - DNA, 549 bp, Artificial Sequence
  derived and/or modified sequence
atgcccatcccccccccccccccccccccccccggccccccccccccgccaacatttcatcaggccaacaccgaacagcctaaactgtcacgtgacgagcagcggggtcgtggggcgctgttacaagatatctgcaagggaaccaagctgaagaaggtgacaaacataaacgacagatcagccccaattttggaaacgccaccaccacctccacctgtgatccggaacggggctcgagacgcccccccccctccgccaccttaccgtatgcacggttctgaaccaccaagcagggggaagccaccgcccccaccctctcgcacaccggccggccctccaccgccaccgcccccaccactgcgcaacgggcacagggactctattaccacggtcaggtcatttctcgatgacttcgagagcaaatacagtttccatcccgtggaggatttccctgccccggaggaatacaagcatttccagcgtatctatccttcaaaaactaatcgcgccgctagaggggctccccccctgcctcccatcctacggtag

SEQ ID NO: 317248 - DNA, 549 bp, Artificial Sequence
  derived and/or modified sequence
atgcccatcccccccccccccccccccccccccggcccccccccccccccaaccttccaccaggctaataccgaacagcccaaactgagccgagacgaacaacgcgggcggggtgctctgctccaagatatttgcaaaggcactaagctcaagaaagtcaccaatataaatgatagatcggcacccatcctcgagacacccccacctcccccacccgtcatacggaatggggcacgggacgccccccccccaccacctccgtaccgcatgcacgggtctgaacctccaagccgcggcaagcctccaccacccccaagtcgcacccccgctggcccaccgcccccaccacctccccccctgagaaacggacaccgggacagcatcaccacagtgaggtccttcttggatgactttgagagcaagtattcctttcacccagtcgaagatttccccgcgccggaagaatacaaacacttccagagaatatacccgtccaaaactaatcgggcagcacgcggagcacctccactgccgcccatccttcgctag

SEQ ID NO: 317249 - DNA, 549 bp, Artificial Sequence
  derived and/or modified sequence
atgccgattcccccaccaccccctccaccacctggaccgcctccccctcctaccttccaccaagccaatacagaacaacccaagctctcccgagacgaacagcgtggtcggggtgctctgctgcaggacatctgcaaaggaaccaaactgaagaaggtgacaaacatcaacgatcgctccgctcctattttggaaacccctccacccccaccccctgttatccgcaacggcgcacgggacgccccaccaccccctcctccctacagaatgcatggttccgaaccaccatcacggggtaaaccccctcctcccccttctcgcacgcccgcaggcccaccacctccgcctcccccaccacttagaaacggccaccgcgattcgattactaccgtccggtctttcctggatgatttcgaatctaagtacagtttccaccctgtggaagactttcccgcaccagaagaatacaaacactttcagcgaatttatccatctaagacgaacagagcagctagaggagccccacctctgcctcctatcctgaggtag

SEQ ID NO: 317250 - DNA, 549 bp, Artificial Sequence
  derived and/or modified sequence
atgcctatccctccccctcctcctccacccccagggcctcctcccccacctacattccaccaggccaacacggagcaacctaagcttagccgcgacgagcagagaggtaggggagccctcctccaggatatttgcaaaggaacgaaacttaagaaagtgactaacataaacgacagaagcgcccctatcctggaaaccccgcctccgccaccccctgtgatccgcaatggcgctagagacgcccctccgcctccccctccttaccgcatgcacgggagtgagccacccagccgcggaaaacctcctccccctccaagccgtactccagcgggtcccccacctcctccgcctccaccactgcgcaatggtcaccgcgattctataactactgtgcgttcctttttggatgacttcgagagtaagtactcatttcaccccgtggaggactttcccgctcctgaggagtacaaacattttcaaagaatttacccgagcaaaactaatagagccgcacggggtgccccaccgttgccacccattttgcgatag

SEQ ID NO: 317251 - DNA, 2403 bp, Artificial Sequence
  derived and/or modified sequence
aaaaggggcggtggcggcggcggcggcggcggcggcggcggcgacggcgagaaagagcttgccggggggcgagcaggacaggacgaagccggagtgtaggcggcagaggattcgctcccagagcagctgcggccaggtcggaaagaggccggggcggctgggtatatgaatgacctaaaggtacaaataaagacggagagagaacagtgccaactgggagcagggcaagaatgccaattcctcctcccccgccacccccacctggtcctcctccacctcccacatttcatcaggcaaacacagagcagcccaagctgagtagagatgagcagcggggtcgaggcgccctcttacaggacatttgcaaagggaccaagctgaagaaggtgaccaacattaatgatcggagtgctcccatcctcgagactcctccacccccaccacctgtgatccgaaatggtgccagggatgctccccctcccccaccaccataccgaatgcatgggtcagaacccccgagccgaggaaagcccccacctccaccctcaaggacgccagctgggccaccccctcctcctccaccgcccctgaggaatggccacagagattctatcaccactgtccggtctttcttggatgattttgagtcaaagtattccttccatccagtagaagactttcctgctccagaagaatataaacactttcagaggatatatcccagcaaaacaaaccgagctgcccgtggagccccacctctgccacccattctcaggtgaagcctggcttggtcccgttcctcaggaaaaggatggaccttctcttcttctcagatggtcccttccattcccctgaaacctgcatgagagctcctaacatgtttctccaatgcaatcaagccctagactccaaatgtcctcccagctcacctccatctatgcatctcatctctggatttggtgatcagactctatattgacagtaggatctcaaaccctgcatccatccttcctccagcaagccctgctagccacatgaggaacaagtttccgtgtcttctgccttcctcttggggaaaggtgccttgttgtgatgaattaactcactgttagggcagggtggagaatggtactccttccttctcctgtccactgtgggggaagcttggcaggtatattatatttcatcatttaggaggctggcatgaccaggacttatgggtgggaggggagcatttttagtgaagcaagaaaggagtttgccaagaagtgatctgttttaaaggtcatatttggagaaagggcaaggaattgggtctgctttatttttgggggtattttgtttttgttctcacctgctgcccccccaccccaccaccccagggataaattggatataaacactaaatactaatcagttgaacttaacatttaataaaaagaaagggtgaaataaactgaagaccattttagaactagtcagttctctgcagcaaagggaacaggagccatttgaaccctctgggacccctcaccccactgcttcagggtgctaggctgagggatgtttttcctcccccttaccgcccatgcccttgaaagaaaagtcactttttgtggagggcatcattcattcctgattcacaaaccccaaaaacctctggtgggagataggaagatagggcgtgggcctgggccttaacctcaatcttgtgtctgcctcagtcttttctgactggccctgaagttgtcagtggctctttctgtccttcagcccctggaaggtgctccaggataacaaagaagggcaggttgaagcccctcatggaaggagctggctttgtggggctgcaaaggacttttaagtcctgcctgtactgaagttcacagcccacctgactgagcagactcttcctgttcctttctctaccacccttgccttcccaggactgcacggtttaacacagcagagtacagaagggtgaagaagtgagcagaggcttatgaagatattcagatactcttctatgccaggaagcacaaagactttgttgagatttgcctcagttcagtagatcttccttggcagccagccataggttgtttctttgtcttccgggtcctaaagagcacagagaaaatggaggtccccagtctaggtaggaagctgattggatgaggacttctttttttccgacagcaggatggggctcttgggctccacacaccagatgctttggttttctacaactgttgctatgtgtagagggtgctcagagcgtggcatgagagcaaggagaccatggctactctttgaaatggatggggaaaattagcttaaaaatttaatcacgagattgcgccactgcactccagcctgggcgacagagccagactccgtctc

SEQ ID NO: 317252 - DNA, 813 bp, Artificial Sequence
  derived and/or modified sequence
atgcagggcaataacctccagcctcccagcccccgaccactggagtgttggagcctacaccgggaagccccacaacgaacagaggcatcaagaacacaccctagcccgttcctggccctgcccggatcacacaggacggccaatcaggcacaggtcgttccaggccttgtacaccaccctcaggaaaacacacagcgtcttcgaatcagggcgggattaagtccgttccccagggccagactggcagccattggtagcacccacggtcacaggtgggtccctggcatatgcctgcccagatgcctgtgcccagctagctgcgccctgcatgcttgtcctccgcattgcaacaacgcagaggcccactcctggctgcgtttgggtggacctttacagtcacgctctgtagaacaccagcagcacgcctgcggatggggctgggttacacatgctacttatggagagagaggtacaagtcaggccgcagaacgccagaggattgcacatactcgggctctgtcagtcggcaactgccctcgttcgcattttcagtgcgaattttcgagtataagtaagtggtccgaaggaacaggaacattcagcccaagaccccgagctgtgaaatctggggtagggggacagccaagtccacatattagaataacatggagaagctgcactaccctgacaagcaagccctgttcacgagctatcacccccgaatgtgtggtggggtggagccgccgtagtagacattggtactcagacatgcggaccggggaatgccaggggctgagccccattacacgatag

SEQ ID NO: 317253 - protein, 207 aa, Artificial Sequence
  derived and/or modified sequence
MSTQSTHPLKPEAPRLPPGIPESPSCQRRHTLPASEFRCLTPEDAVSAFEIEREAFISVLGVCPLYLDEIRHFLTLCPELSLGWFEEGCLVAFIIGSLWDKERLMQESLTLHRSGGHIAHLHVLAVHRAFRQQGRGPILLWRYLHHLGSQPAVRRAALMCEDALVPFYERFSFHAVGPCAITVGSLTFMELHCSLRGHPFLRRNSGC

SEQ ID NO: 317254 - DNA, 1025 bp, Artificial Sequence
  derived and/or modified sequence
cgagaggtggggtggggggattacaaacctctaacagcaccacaggctgcccggggaacatctgctactacagccttgcagcccggagtcccggattttactggttcccgtgcctgcggacaggcccccagggctagcggctttgtggagggaacactgggtatcctctccacagtccaggtgctgggaggccctccttggcttaggaggacacttccaaagctggggcgccccaaggaggcaccagtggccagaatgtccacgcagagcacccaccccctgaaacctgaggccccacgtctgccacctgggatccccgagtccccgagctgtcagcggcgccacacactccctgccagtgagtttcgctgcctcaccccggaggacgctgtcagcgcctttgagatcgagcgtgaagccttcatctccgtcttgggcgtctgccccctgtacctggatgagatccggcacttcctgaccctatgtccagagctgtccctgggctggttcgaggagggctgccttgtggccttcatcatcggctcgctctgggacaaggagagactcatgcaggagtcactgacgctgcacaggtctgggggccacatagcccacctgcatgtgctggccgtgcaccgcgccttccggcagcagggcaggggccccatcctgctgtggcgctacctgcaccacctgggcagccagccggccgtgcgccgggccgcgctcatgtgcgaggacgcgctggtacccttctatgagaggttcagcttccacgccgtgggcccctgcgccatcaccgtgggctccctcaccttcatggagctccactgctccctgcggggccaccccttcctgcgcaggaacagcggctgctgaactgggctgcccacctggctgccaacatgatccccgtctctgccctgggctcctcttagctcagctgagcatggagacagcagtttccagagagtggagagagcagggctaaataaagaggagataaggtggcttctcacggcctg

SEQ ID NO: 317255 - DNA, 624 bp, Artificial Sequence
  derived and/or modified sequence
atgagcacccagagtacacacccactcaaacctgaggcccctagactaccgccagggatcccagaatcaccatcctgtcagcggcggcacacactgcccgccagcgagttcaggtgcctgacgcctgaggacgcagtgtcagcttttgagatcgagagggaagcattcatctccgtgctcggagtttgtccactctacctggatgaaatccgacactttctcactttgtgccctgaactgagtctgggctggttcgaggaaggatgcttagtggcattcataataggttctttatgggataaagagcgtcttatgcaggaatccctcaccctgcacaggtctggtgggcacattgcccacctgcacgtgttagctgtgcatagggccttccgccaacagggtaggggacctatcctgctctggcggtacctgcaccacctcggctcccagcctgccgtgaggagagcagccctgatgtgtgaagacgcactggtccccttctacgaacgcttctcctttcacgccgtgggaccatgcgccataaccgtgggaagcctgaccttcatggaactgcactgctctctaagaggccacccctttttacgacgtaactctggttgttag

SEQ ID NO: 317256 - DNA, 624 bp, Artificial Sequence
  derived and/or modified sequence
atgagcacccagagcacccaccccctgaagccagaggccccccggctgcccccaggcatccctgagagccccagctgccagaggaggcacaccctgcctgccagcgagttccgctgcctgaccccagaagatgctgtgtctgcctttgaaattgagcgggaggccttcatctctgtgctgggcgtgtgccccctgtacctggatgagatccgccacttcctgaccctgtgcccagagctgagcctgggctggtttgaggagggctgcctggtggccttcatcatcggcagcctgtgggacaaggagcggctgatgcaggagagcctgaccctgcacaggtctgggggccacatcgcccacctgcacgtgctggccgtgcaccgggccttccggcagcagggccggggccccatcctgctgtggagatacctgcaccacctgggcagccagcctgctgtgcggcgggccgccctgatgtgtgaagatgccctggtgcccttctatgagcgcttctccttccacgctgtgggcccctgtgccatcaccgtgggcagcctgaccttcatggagctgcactgcagcctgcggggccaccccttcctgcggagaaattctggctgctag

SEQ ID NO: 317257 - DNA, 624 bp, Artificial Sequence
  derived and/or modified sequence
atgagcacccagagcacccaccccctgaagcccgaggccccccggctaccccccggtatcccagaatctccatcatgtcagcgcaggcacactctaccagcatctgagtttaggtgcctcaccccagaagatgctgtgtcagccttcgagattgaaagagaagctttcatatcggtactgggagtgtgtcccctatatcttgacgaaatccgccattttctcacattgtgcccagaactgagtctgggctggtttgaggagggatgcctggttgcgttcattatcggaagtttgtgggacaaagaacggctgatgcaagagagcctgactttacaccgatccggcggccatatcgcccatctgcacgtattagccgtgcatcgcgcctttcgacagcaaggtcgcggacctatcctcctgtggcggtacctgcaccaccttggctctcaaccagctgtccggcgcgccgccttgatgtgtgaggacgcccttgtgccattttacgagcggttcagtttccacgccgtgggtccttgtgcaatcaccgttggctccctgacatttatggagctacactgctccctgcgggggcacccatttctgagaagaaattctggatgttag

SEQ ID NO: 317258 - DNA, 624 bp, Artificial Sequence
  derived and/or modified sequence
atgagcactcagtcgacacatcctctgaagccagaggcccctagactcccccctggcatccctgagtccccgagttgccagcgaagacatacccttcccgcaagcgagttcagatgcctgacacctgaggatgctgtgtctgctttcgagatcgagcgggaggctttcatctcagtgctgggggtctgtcctctttacttggatgagattcggcacttcctaacgttgtgccccgagttatcgttggggtggtttgaagagggctgtctggttgctttcattattggctccctttgggataaagaacgactcatgcaggagagcctgacgcttcatcgctctggcggacacatcgctcacctgcatgtactggccgtgcatcgggctttccgccagcaaggaagagggcctattcttctctggcgctatctccaccacctgggctcacagccagctgtgagacgcgctgccctgatgtgcgaagacgctctggtgcctttctatgaacgcttcagctttcatgccgtgggtccctgcgctataaccgtaggtagcctgacgtttatggagctacactgctccctgaggggccacccttttctcaggaggaactcaggctgttag

SEQ ID NO: 317259 - DNA, 624 bp, Artificial Sequence
  derived and/or modified sequence
atgagcacccagagcacccaccccctgaagcccgaggcccccagactgccccccggcatccccgagagccccagctgccagagaagacacaccctgcccgccagcgagttcagatgcctgacccccgaggacgccgtgagcgccttcgagatcgagagagaggccttcatcagcgtgctgggcgtgtgccccctgtacctggacgagatcagacacttcctgaccctgtgccccgagctgagcctgggctggttcgaggagggctgcctggtggccttcatcatcggcagcctgtgggacaaggagagactgatgcaggagagcctgaccctgcacagaagcggcggccacatcgcccacctgcacgtgctggccgtgcacagagccttcagacagcagggcagaggccccatcctgctgtggagatacctgcaccacctgggcagccagcccgccgtgagaagagccgccctgatgtgcgaggacgccctggtgcccttctacgagagattcagcttccacgccgtgggcccctgcgccatcaccgtgggcagcctgaccttcatggagctgcactgcagcctgagaggccaccccttcctgagaagaaacagcggctgctag

SEQ ID NO: 317260 - DNA, 180 bp, Artificial Sequence
  derived and/or modified sequence
atggccagcgagggcctggccggggccctggcctctgtgctggccggccagggcagctctgtgcacagctgtgacagcgccccagctggggagcccccagcccccagggctggctgcggccgcacctgtgccacctggtgctggccctgcagcagcgccagcaggatgcgctgctactag

SEQ ID NO: 317261 - DNA, 417 bp, Artificial Sequence
  derived and/or modified sequence
atggagggtggagcagctgcagccactcccaccgcactgccatattacgttgccttcagccaattactgggactaactctggttgcaatgactggtgcttggttaggactgtatagaggtgggatagcgtgggaatcagacctacaatttaatgcgcaccctctgtgtatggtcatcgggctcattttcttgcaaggcaatgccttgctcgtttaccgagtgttcagaaatgaggccaagcggaccaccaaggtgctgcatggactgctccacatttttgcactggtgatcgcactcgttggcctggtggctgtttttgactatcatcggaaaaagggctacgcagacttatactcgctacactcatggtgtgggattctggtgttcgttttatacttcgtacaggggcaggtgtag

SEQ ID NO: 317262 - DNA, 417 bp, Artificial Sequence
  derived and/or modified sequence
atggagggcggcgctgctgctgccacccccacagccctgccctactacgtggccttcagccagctgctgggcctgaccctggtggccatgactggagcctggctgggcctgtaccggggcggcatcgcctgggagagtgacctgcagttcaatgcccaccccctgtgcatggtgattggcctcatcttcctgcagggcaatgccctgctggtgtacagagtcttcagaaatgaggccaagaggaccaccaaggtgctgcacggcctgctgcacatctttgccctggtgattgccctggtgggcctggtggccgtgtttgactaccacaggaagaagggctatgctgacctgtacagcctgcacagctggtgtggcatcctggtgtttgtgctgtactttgtgcagggccaggtgtag

SEQ ID NO: 317263 - DNA, 417 bp, Artificial Sequence
  derived and/or modified sequence
atggagggcggcgccgccgccgccacccccaccgccctgccctactatgtggccttctctcaacttctgggtttaactctggtggccatgaccggtgcatggctgggcttgtatagaggcggaatcgcttgggagtctgaccttcaattcaacgcccacccactttgcatggtcattggactcatttttctgcagggaaacgccctgctggtttacagggtgtttcgcaacgaggcaaaacgcacaactaaggtgctccacgggttgcttcacatttttgctctagtgatcgccctggtgggtttggtcgccgtgttcgactaccaccgcaagaaggggtacgcggatttatactctctccatagctggtgtggcatcttggtgtttgtgctatatttcgtgcagggccaggtttag

SEQ ID NO: 317264 - DNA, 417 bp, Artificial Sequence
  derived and/or modified sequence
atggaggggggtgcggctgctgcaacccctacagctttaccttactacgtggccttcagccagctcctgggactaacactagtggctatgactggcgcttggttgggtctgtatcgcggaggtatagcttgggaatccgatctccagttcaatgcccacccactgtgtatggtcattggccttatttttcttcagggaaatgcattgctggtctatagagtcttccgaaacgaagcgaagaggactactaaggtattgcacggtctgcttcatatttttgctcttgtaatagccctggtgggccttgtagcagttttcgattaccaccgtaaaaagggatacgctgatctgtactcgctgcacagctggtgcggcattcttgtttttgttctgtatttcgtgcaagggcaggtctag

SEQ ID NO: 317265 - DNA, 1496 bp, Artificial Sequence
  derived and/or modified sequence
acccgggcgcggcgcggggaggctgaagggacgctcgggtaggcaagcgtttgcctcagcatggagggcggggccgcggcagccacccccacagcactgccttactacgtggccttctcccagctgctgggcctgaccttggtggccatgaccggcgcgtggctcgggctgtaccgaggcggcattgcctgggagagcgacctgcagttcaacgcgcaccccctctgcatggtcataggcctgatcttcctgcagggaaatgccctgctggtttaccgtgtcttcaggaacgaagctaaacgcaccaccaaggtcctgcacgggctgctgcacatctttgcgctcgtcatcgccctggttggcttggtggcggtgttcgactaccacaggaagaagggctacgctgacctgtacagcctacacagctggtgcgggatccttgtctttgtcctgtactttgtgcaggggcaagtatagcgcatttgagcccgagggtgtcctggccaacgtgctgggcctgctgctggcctgcttcggtggggcggtgctctacatcttgacccgggccgactggaagcggccttcccaggcggaagagcaggccctctccatggacttcaagacgctgacggagggagatagccccggctcccagtgatgcgcccggccggccctgggggttcgcggggtgtcttcttgcctgcccctgctgaggcgtcttcaggactgcaggctccggagagtggctctggcagcaggcgggcgcgtgggtgcagctgcatctgtttgagtgctgctttctggggtcaggtctccgcctcctctgcttctcctttctccgctgctatagaccagttcattgtgtgtggctcccgtgtctctgttgcccccttcagtgcagaaggctttgggtaggacttcgggtgttcggtcctggtcgcagagcacagatctttaaagaagcgagagaggaggccccaccctcctggcagcagatgcctggggcaaggccaggggaaactgggggggcctcagggacaggcctggaaaggccacgatggctgctgaattcaaacaaggagtccctccagcctgaataacacgtggcacaaatgggcccggcctttggcagaggagcaagtgatatgatgtgtaaagtatgttggtggtgaaagcaaggttccccaggagaggggagggactggcccctgggaagctctgagatgaggctgtggcccagctgtagtcctgaccttcctcttctttaaccctttagccctaggatggctttggtgggagaggggatagaagcccatgacttcagacagactttctcttggcagatgcaggcgggcctcctcccaggctgctccagacatgggggttggggatggggggcaccttgcagccccttcctgctggggctccctccttgtagcaccccccttgcggctcagctctggtttcctctcccaggctcacccaggctctgctca

SEQ ID NO: 317266 - DNA, 417 bp, Artificial Sequence
  derived and/or modified sequence
atggagggcggcgccgccgccgccacccccaccgccctgccctactacgtggccttcagccagctgctgggcctgaccctggtggccatgaccggcgcctggctgggcctgtacagaggcggcatcgcctgggagagcgacctgcagttcaacgcccaccccctgtgcatggtgatcggcctgatcttcctgcagggcaacgccctgctggtgtacagagtgttcagaaacgaggccaagagaaccaccaaggtgctgcacggcctgctgcacatcttcgccctggtgatcgccctggtgggcctggtggccgtgttcgactaccacagaaagaagggctacgccgacctgtacagcctgcacagctggtgcggcatcctggtgttcgtgctgtacttcgtgcagggccaggtgtag

SEQ ID NO: 317267 - DNA, 74 bp, Artificial Sequence
  derived and/or modified sequence
aacgtgacatacatacaaaaagtttttagagcaagtgaaattttagctgctatatgttaattggtggtaatccc

SEQ ID NO: 317268 - protein, 17 aa, Artificial Sequence
  derived and/or modified sequence
HNAAAAVPFFGGGSVLR

SEQ ID NO: 317269 - DNA, 1107 bp, Artificial Sequence
  derived and/or modified sequence
atggacatgaagcccctggtggtgctgggcctgcccgcccccaccgcccccagcggctgcctgagcttctgggaggccaaggcccagctggccaagagctgcaaggtgctggtggacgccctgagacacaacgccgccgccgccgtgcccttcttcggcggcggcagcgtgctgagagccgccgagcccgccccccacgccagctacggcggcatcgtgagcgtggagaccgacctgctgcagtggtgcctggagagcggcagcatccccatcctgtgccccatcggcgagaccgccgccagaagaagcgtgctgctggacagcctggaggtgaccgccagcctggccaaggccctgagacccaccaagatcatcttcctgaacaacaccggcggcctgagagacagcagccacaaggtgctgagcaacgtgaacctgcccgccgacctggacctggtgtgcaacgccgagtgggtgagcaccaaggagagacagcagatgagactgatcgtggacgtgctgagcagactgccccaccacagcagcgccgtgatcaccgccgccagcaccctgctgaccgagctgttcagcaacaagggcagcggcaccctgttcaagaacgccgagagaatgctgagagtgagaagcctggacaagctggaccagggcagactggtggacctggtgaacgccagcttcggcaagaagctgagagacgactacctggccagcctgagacccagactgcacagcatctacgtgagcgagggctacaacgccgccgccatcctgaccatggagcccgtgctgggcggcaccccctacctggacaagttcgtggtgagcagcagcagacagggccagggcagcggccagatgctgtgggagtgcctgagaagagacctgcagaccctgttctggagaagcagagtgaccaaccccatcaacccctggtacttcaagcacagcgacggcagcttcagcaacaagcagtggatcttcttctggttcggcctggccgacatcagagacagctacgagctggtgaaccacgccaagggcctgcccgacagcttccacaagcccgccagcgaccccggcagctag

SEQ ID NO: 317270 - DNA, 1107 bp, Artificial Sequence
  derived and/or modified sequence
atggatatgaaacccctggtcgtgctgggactccccgctcctactgcccccagtggctgtttatcgttctgggaggctaaggcacaacttgcaaagtcttgtaaggtgctggtggacgcgctccggcacaatgcggctgctgctgtgccatttttcggggggggatctgtcctgcgggccgccgaacctgcaccacacgcgtcctatgggggcatcgtgagtgttgagaccgatctactacagtggtgtctcgaatcagggagtatacccatactgtgtccaatcggcgagaccgcggcccgcaggtctgtcctactggactccctcgaggttacagcttcactggctaaggcactgaggccaactaaaatcatcttcctgaataataccggcggcctccgggattcctcccacaaagttctttccaacgttaacctgccagctgatctcgatttggtctgcaatgccgaatgggtgtccaccaaagagcggcagcaaatgcgccttatagtagatgtgctgtcccgtctcccccaccactcatctgctgttattactgctgcatctactctgctcaccgagctgttttccaacaaaggctcagggacactgttcaaaaatgccgaaagaatgctgcgcgtccgtagtctcgataaactggatcagggacgtctcgtcgatctggtgaacgctagttttggaaagaaactgagggacgactatcttgcctctcttagacccagactgcacagcatttacgtgtcagaaggatataatgccgccgcaatccttactatggagcccgtgctcggcggtacaccgtacttggacaagtttgttgtctccagcagtcgccaaggacagggttccggccagatgttgtgggaatgcctgagaagggaccttcagaccctcttctggcgatcccgagtgaccaaccccatcaacccctggtactttaaacacagtgacggatcctttagtaacaagcaatggatctttttctggtttggcctagctgacattcgcgatagttacgaactcgtgaatcacgccaaggggcttccggacagctttcacaaaccggcaagcgaccccggaagttag

SEQ ID NO: 317271 - DNA, 1107 bp, Artificial Sequence
  derived and/or modified sequence
atggacatgaagcccctggtggtgctgggcctgcctgcccccacagcccccagcggctgcctgtccttctgggaggccaaggcccagctggccaagagctgcaaggtgctggtggatgccctgcggcacaatgctgctgctgctgtgcccttcttcggcggcggctctgtgctgcgggctgctgagcccgccccccacgccagctatggaggcatcgtgtctgtggagacagacctgctgcagtggtgcctggagagcggcagcatccccatcctgtgccccatcggggagacagctgccaggagatctgtgctgctggacagcctggaggtgacagccagcctggccaaggccctgcggcccaccaagatcatcttcctgaacaacacaggaggcctgcgggacagcagccacaaggtgctgagcaatgtgaacctgcctgctgacctggacctggtgtgcaatgctgagtgggtgtccaccaaggagcggcagcagatgaggctcatcgtggatgtgctgagccggctgccccaccacagcagcgctgtgatcacagctgccagcaccctgctgacagagctgttcagcaacaagggcagcggcaccctcttcaagaatgctgagaggatgctgcgggtgcgcagcctggacaagctggaccagggccgcctggtggacctggtgaatgccagctttgggaagaagctgagagatgactacctggccagcctgcggccccggctgcacagcatctacgtgtctgagggctacaatgctgctgccatcctgaccatggagcctgtgctgggcggcaccccctacctggacaagtttgtggtgagcagcagccggcagggccagggcagcggccagatgctgtgggagtgcctgcggcgggacctgcagaccctcttctggaggagccgggtgaccaaccccatcaacccctggtacttcaagcacagtgatggcagcttcagcaacaagcagtggatcttcttctggtttggcctggccgacatccgggacagctatgagctggtgaaccacgccaagggcctgcctgacagcttccacaagccagccagtgaccccggcagctag

SEQ ID NO: 317272 - DNA, 1107 bp, Artificial Sequence
  derived and/or modified sequence
atggacatgaagcccctggtggtgctgggcctgcccgcccccaccgcgccaagcggctgcctttccttctgggaagccaaagctcaactggctaaatcatgtaaagtgctggtagatgcgctgaggcacaacgctgccgccgccgtgccattctttggcggggggtccgtactcagggcagcggagcctgcacctcacgcctcctacggcggcatcgtttctgtcgagactgatcttttgcagtggtgcctggaaagtggcagtattccaatactatgtcctattggggagactgcagcccggcggagcgtgcttctcgactccttagaggtgactgcatcgttagccaaggccttgaggccaactaagattatcttcttgaataacacagggggcctccgagactccagccataaggtgttgtcaaacgtcaaccttccagcagatctggatctcgtatgcaatgccgaatgggtgtcaacgaaggagagacagcagatgcggctcatcgtggatgtcttgtcccgactaccacaccattcctccgcagttattacagccgcttccacactactaacggagctcttcagtaacaaagggtcaggaacgttattcaaaaatgcagaaaggatgctccgggtaaggtctctggacaagctggatcagggacgactggtcgatcttgtaaatgcatccttcggaaaaaagcttcgcgacgactatcttgcaagcctcaggccccggctgcacagtatttatgtcagcgaaggatataacgcggcagctatattaactatggaaccagtcctaggaggaacaccatacctggataagtttgtggtgtcatcgtccaggcagggccagggctcgggtcagatgctctgggaatgtctcagacgtgacctgcagactttgttctggcgctcccgcgtcactaatccaatcaacccgtggtatttcaaacattccgacggatcctttagcaacaagcagtggatctttttctggtttggcttggctgatatccgcgactcctacgaattggttaaccacgccaaaggactgcccgacagttttcacaagccggcctccgacccgggtagttag

SEQ ID NO: 317273 - DNA, 1107 bp, Artificial Sequence
  derived and/or modified sequence
atggacatgaagcctctcgtggttctgggacttcccgctcccacagcgccttccggctgcctgtctttctgggaagctaaagcacagttagccaaatcctgtaaggtgctggttgatgccctcaggcacaacgccgcagctgcagttccctttttcggcggtggttctgtgctgcgggctgccgaaccagcgccacacgcatcctacgggggaattgtgtctgttgagacagatcttctacagtggtgtttggagtcagggagtatccctatcctctgtcctattggagaaaccgctgctagacgttctgtcttgctggacagcctcgaagttacagcatccttagcaaaagccttgagaccaacaaagatcatcttcctaaataatactggcggtctacgtgactcatcccacaaagtgttaagcaatgttaatcttccagcagacctagatcttgtatgcaacgcagagtgggtgagcacaaaagaacggcaacagatgaggctgatagtggatgtactctcccgcctgcctcaccacagttctgcggtgattactgccgcaagcaccctgctcacagagttgttcagcaacaaaggaagcggcacattgtttaagaacgctgagcgtatgctaagagtaagaagcttggataagctcgatcagggacgcctggtagatctagtgaacgctagttttggcaaaaagctgagagacgattatttggcttcccttcgccctcggctccactctatttatgtgtcagaaggttacaatgccgctgccattttgaccatggagccagtgcttggcggtacaccatatctggacaagtttgttgtaagctcttctcgacagggacagggctccggccagatgctgtgggaatgtttgagaagagatctgcagactctgttctggcggtcccgagtgactaatcctatcaacccgtggtactttaagcatagcgatggttcgtttagtaacaagcagtggatctttttttggttcggacttgccgatatacgggatagttacgagctggtcaatcacgctaagggcctgcccgatagtttccataaacccgctagtgatcccggttcttag

SEQ ID NO: 317274 - protein, 544 aa, Artificial Sequence
  derived and/or modified sequence
MSGYSSDRDRGRDRGFGAPRFGGSRAGPLSGKKFGNPGEKLVKKKWNLDELPKFEKNFYQEHPDLARRTAQEVETYRYLLPAIVHINHQPFLERGDGPICLVLAPTRELAQQVQQVAAEYCRACRLKSTCIYGGAPKGPQIRDLERGVEICIATPGRLIDFLECGKTNLRRTTYLVLDEADRMLDMGFEPQIRKIVDQIRPDRQTLMWSATWPKEVRQLAEDFLKDYIHINIGALELSANHNILQIVDVCHDVEKDEKLIRLMEEIMSEKENKTIVFVETKRRCDELTRKMRRDGWPAMGIHGDKSQQERDWVLNEFKHGKAPILIATDVASRGLDVEDVKFVINYDYPNSSEDYIHRIGRTARSTKTGTAYTFFTPNNIKQVSDLISVLREANQAINPKLLQLVEDRGSGRSRGRGGMKDDRRDRYSAGKRGGFNTFRDRENYDRGYSSLLKRDFGAKTQNGVYSAANYTNGSFGSNFVSAGIQTSFRTGNPTGTYQNGYDSTQQYGSNVPNMHNGMNQQAYAYPATAAAPMIGYPMPTGYSQ

SEQ ID NO: 317275 - protein, 168 aa, Artificial Sequence
  derived and/or modified sequence
MKLSVLPPRSLLAPYTVLCCPPDSEKPRLSPEPSERRPQAPAKKLRKPRTIYSSLQLQHLNQRFQHTQYLALPERAQLAAQLGLTQTQVKIWFQNKRSKYKKLLKQNSGGQEGDFPGRTFSVSPCSPPLPSLWDLPKAGTLPTSGYGNSFGAWYQHHSSDVLASPQMM

SEQ ID NO: 317276 - DNA, 1405 bp, Artificial Sequence
  derived and/or modified sequence
ctaaagccgcaggcgccgcggtaccctggctgtggccctcggcgctttcttcctagggtcacaggacccatacgagtgggagctccctgggagcagaactgcgtcttgtatcacctggcgcggtgaacgtgggggttgaaacgctccacgcggaaggtagagggcaggggccaagggggcgatcctggtggctgcgctttttgctatttgctgccgacggcatgcagacgagatgcaaataagcttatgaaactgtccgtcctaccccctcgctccctcctcgccccctacaccgtgttgtgctgcccaccagactcggagaagccgcggctgtccccggaaccctccgagcggcgccctcaggcccccgccaaaaagctccgcaagccgaggaccatctactccagcctgcagctgcagcacctaaaccagcgtttccagcacacgcagtacctggcgctgcccgagagggcccagctggcagcgcagctcggcctcacccagacccaggtaaagatctggtttcagaacaaacgctccaagtataagaagctcctgaagcagaattctggggggcaggaaggggacttccctgggaggaccttctctgtgtctccctgctccccacccctcccctccctctgggatctacccaaggcagggaccctgcccaccagtggctatggcaacagctttggagcctggtatcagcatcactcctcagatgtcctggcttcgcctcagatgatgtgaatctggggaagggcgggtcaggcccacagccttcctgcaaagcccaggacccaggcagtccacctgcaccccttctgggctgggaggaaaccagctccagatgggttttctctggaggacaagcagttagaggagaaaaaggaatggagcagagcctgtacccctaaccctaacagctaaatcaaggacctcagccttatataatcattgtccccaccactaccatggactggacaccttcactccagctggacaaagactctggagagagagccattggctggagttgagactgtccccagaacccttggtcttgccactcccccactccttcttccctctctccctttctcctctccctgctttcttgaaaaggactgaatcgccactacagcctgggtgcaaaatcagcaagaaacattgagtatttttttttctttgtatgcctttggccttgcacaacccatttgtgagcaaaagcagaagtggaccaccatcagctcccacccacccagcgatttttccttggaggtcagcccgttacccccataactgatttacctacttaccatactgggaggtagaagagatgcagagaaatgtggaatttgtggacctatgggtaatttatgctttcctcctaaaaaaaaaa

SEQ ID NO: 317277 - DNA, 507 bp, Artificial Sequence
  derived and/or modified sequence
atgaaactgtcggtcctccctccgcggagcctactggctccctacacggtcctgtgttgccctcccgactcagaaaaacctcgcctatcaccggaaccttcagagagacgacctcaagcaccagcaaagaagttgaggaaaccccggaccatctactcgtctctgcaactgcagcatctcaatcagcggttccaacatactcagtacttggccctacctgaacgcgcacagctcgctgcacagctgggcctcacgcagacacaagttaagatctggttccaaaacaaacgtagtaagtacaaaaagctgctgaaacagaacagtggtggccaagaaggggatttccctgggaggacattcagtgttagtccatgctcaccacccctccctagcctctgggacctgcctaaggctggcactctgccaacatctggttatggcaattccttcggggcttggtaccagcaccactctagtgacgtcctggcctcgcctcaaatgatgtag

SEQ ID NO: 317278 - DNA, 507 bp, Artificial Sequence
  derived and/or modified sequence
atgaagctgtctgtgctgcccccaagaagcctgctggccccctacacagtgctgtgctgccccccagacagcgagaagccccggctgagccctgagcccagcgagcggcggccccaggccccagccaagaagctgaggaagcccaggaccatctacagcagcctgcagctgcagcacctgaaccagcgcttccagcacacccagtacctggccctgcctgagcgggcccagctggccgcccagctgggcctgacccagacccaggtgaagatctggttccagaacaagaggagcaagtacaagaagctgctgaagcagaacagcggcggccaggagggggacttccctggccgcaccttctctgtgagcccctgcagcccccccctgcccagcctgtgggacctgcccaaggccggcaccctgcccaccagcggctacggcaacagctttggagcctggtaccagcaccacagcagtgatgtgctggccagcccccagatgatgtag

SEQ ID NO: 317279 - DNA, 507 bp, Artificial Sequence
  derived and/or modified sequence
atgaagctgagcgtgctgcccccccggagcctgctggccccctacacagtactgtgctgccccccagattcggagaaacctcgcctgagcccggagccttccgagaggaggcctcaggcccctgccaaaaagctgagaaaaccgaggactatctactcttcccttcagctgcagcatctcaaccagaggtttcaacacactcagtacctggcactgcctgagcgagcccaactggccgcccaactgggcctcactcagacccaggtaaaaatttggttccagaataaacggtcgaagtacaagaaactgcttaagcaaaacagcggcgggcaagaaggcgatttccccggaagaacgttctccgtttccccctgttctcccccacttccatctttatgggatctacccaaagccggaaccctccccacatccggctacggcaactcttttggggcttggtaccagcaccacagcagtgatgtgctggcctcacctcagatgatgtag

SEQ ID NO: 317280 - DNA, 507 bp, Artificial Sequence
  derived and/or modified sequence
atgaagctttccgtcctcccccctcgcagtttgctggccccttacacagtgctgtgttgtccgcctgactctgaaaaacctcgcttgtcgcctgagccctcggagcgcaggcctcaggctccggctaagaagctgagaaaacctcggactatctactcttctttgcagctccagcaccttaatcagagatttcagcatactcagtatttggccctgccggagagggcacaacttgcggctcaactgggcctgacccagactcaagttaaaatctggttccagaacaaacggagcaaatacaagaagctgttaaagcagaactctggtggccaagaaggggacttcccaggcagaactttttctgtttccccttgcagccccccactcccaagtctctgggaccttccaaaggcaggtaccctacctacttcggggtatggaaacagctttggagcctggtatcaacaccactccagtgacgtgctggcatctccacagatgatgtag

SEQ ID NO: 317281 - DNA, 507 bp, Artificial Sequence
  derived and/or modified sequence
atgaagctgagcgtgctgccccccagaagcctgctggccccctacaccgtgctgtgctgcccccccgacagcgagaagcccagactgagccccgagcccagcgagagaagaccccaggcccccgccaagaagctgagaaagcccagaaccatctacagcagcctgcagctgcagcacctgaaccagagattccagcacacccagtacctggccctgcccgagagagcccagctggccgcccagctgggcctgacccagacccaggtgaagatctggttccagaacaagagaagcaagtacaagaagctgctgaagcagaacagcggcggccaggagggcgacttccccggcagaaccttcagcgtgagcccctgcagcccccccctgcccagcctgtgggacctgcccaaggccggcaccctgcccaccagcggctacggcaacagcttcggcgcctggtaccagcaccacagcagcgacgtgctggccagcccccagatgatgtag

SEQ ID NO: 317282 - DNA, 1399 bp, Artificial Sequence
  derived and/or modified sequence
ccgcaggcgccgcggtaccctggctgtggccctcggcgctttcttcctagggtcacaggacccatacgagtgggagctccctgggagcagaactgcgtcttgtatcacctggcgcggtgaacgtgggggttgaaacgctccacgcggaaggtagagggcaggggccaagggggcgatcctggtggctgcgctttttgctatttgctgccgacggcatgcagacgagatgcaaataagcttatgaaactgtccgtcctaccccctcgctccctcctcgccccctacaccgtgttgtgctgcccaccagactcggagaagccgcggctgtccccggaaccctccgagcggcgccctcaggcccccgccaaaaagctccgcaagccgaggaccatctactccagcctgcagctgcagcacctaaaccagcgtttccagcacacgcagtacctggcgctgcccgagagggcccagctggcagcgcagctcggcctcacccagacccaggtaaagatctggtttcagaacaaacgctccaagtataagaagctcctgaagcagaattctggggggcaggaaggggacttccctgggaggaccttctctgtgtctccctgctccccacccctcccctccctctgggatctacccaaggcagggaccctgcccaccagtggctatggcaacagctttggagcctggtatcagcatcactcctcagatgtcctggcttcgcctcagatgatgtgaatctggggaagggcgggtcaggcccacagccttcctgcaaagcccaggacccaggcagtccacctgcaccccttctgggctgggaggaaaccagctccagatgggttttctctggaggacaagcagttagaggagaaaaaggaatggagcagagcctgtacccctaaccctaacagctaaatcaaggacctcagccttatataatcattgtccccaccactaccatggactggacaccttcactccagctggacaaagactctggagagagagccattggctggagttgagactgtccccagaacccttggtcttgccactcccccactccttcttccctctctccctttctcctctccctgctttcttgaaaaggactgaatcgccactacagcctgggtgcaaaatcagcaagaaacattgagtatttttttttctttgtatgcctttggccttgcacaacccatttgtgagcaaaagcagaagtggaccaccatcagctcccacccacccagcgatttttccttggaggtcagcccgttacccccataactgatttacctacttaccatactgggaggtagaagagatgcagagaaatgtggaatttgtggacctatgggtaatttatgctttcctcctaaaaaaaaaa

SEQ ID NO: 317283 - protein, 955 aa, Artificial Sequence
  derived and/or modified sequence
MEVGSEEEKWEKLDAEFDHFVVDMKPFVLKLPHRTERQRCALWIRKLCEPSGTGAGIMGRKNRNLYAKLLLHMLKRGALEGPFTHRPEPGTLKILPSYMSIYFDEPNPARAKGSSPEGLPAWVLGELETSEHKLNESWKLSSGEDNTLVQSPTDVYSREQYTGKLRVRSHSLSPTHREDGQNITPKICEVYSKKSPVSLDDSDIEARLNSWNLGIENPRYLRQKPIPVSLMTPKFSLRKSSSFHDDHFLSRIREKELDMKTKMMEAKFHEEKLKLQQKHDADVQKILERKNNEIEELKTLYRSKQHETEETIRKLEKKVQTLIRDCQVIRETKEDQIAELKKICEQSTESLNNDWEKKLHNAVAEMEQEKFDLQKQHTENIQELLEDTNVRLNKMESEYMAQTQSTNHMIKELEARVQQLTGEAENSNLQRQKLIQEKAELERCYQITCSELQEVKARRNTLHKEKDHLVNDYEQNMKLLQTKYDADINLLKQEHALSASKASSMIEELEQNVCQLKQQLQESELQRKQQLRDQENKFQMEKSHLKHIYEKKAHDLQSELDKGKEDTQKKIHKFEEALKEKEEQLTRVTEVQRLQAQQADAALEEFKRQVELNSEKVYAEMKEQMEKVEADLTRSKSLREKQSKEFLWQLEDIRQRYEQQIVELKLEHEQEKTHLLQQHNAEKDSLVRDHEREIENLEKQLRAANMEHENQIQEFKKRDAQVIADMEAQVHKLREELINVNSQRKQQLVELGLLREEEKQRATREHEIVVNKLKAESEKMKIELKKTHAAETEMTLEKANSKLKQIEKEYTQKLAKSSQIIAELQTTISSLKEENSQQQLAAERRLQDVRQKFEDEKKQLIRDNDQAIKVLQDELENRSNQVRCAEKKLQHKELESQEQITYIRQEYETKLKGLMPASLRQELEDTISSLKSQVNFLQKRASILQEELTTYQGRR

SEQ ID NO: 317284 - DNA, 2868 bp, Artificial Sequence
  derived and/or modified sequence
atggaggtgggcagcgaggaggagaagtgggagaagctggacgccgagttcgaccacttcgtggtggacatgaagcccttcgtgctgaagctgccccacagaaccgagagacagagatgcgccctgtggatcagaaagctgtgcgagcccagcggcaccggcgccggcatcatgggcagaaagaacagaaacctgtacgccaagctgctgctgcacatgctgaagagaggcgccctggagggccccttcacccacagacccgagcccggcaccctgaagatcctgcccagctacatgagcatctacttcgacgagcccaaccccgccagagccaagggcagcagccccgagggcctgcccgcctgggtgctgggcgagctggagaccagcgagcacaagctgaacgagagctggaagctgagcagcggcgaggacaacaccctggtgcagagccccaccgacgtgtacagcagagagcagtacaccggcaagctgagagtgagaagccacagcctgagccccacccacagagaggacggccagaacatcacccccaagatctgcgaggtgtacagcaagaagagccccgtgagcctggacgacagcgacatcgaggccagactgaacagctggaacctgggcatcgagaaccccagatacctgagacagaagcccatccccgtgagcctgatgacccccaagttcagcctgagaaagagcagcagcttccacgacgaccacttcctgagcagaatcagagagaaggagctggacatgaagaccaagatgatggaggccaagttccacgaggagaagctgaagctgcagcagaagcacgacgccgacgtgcagaagatcctggagagaaagaacaacgagatcgaggagctgaagaccctgtacagaagcaagcagcacgagaccgaggagaccatcagaaagctggagaagaaggtgcagaccctgatcagagactgccaggtgatcagagagaccaaggaggaccagatcgccgagctgaagaagatctgcgagcagagcaccgagagcctgaacaacgactgggagaagaagctgcacaacgccgtggccgagatggagcaggagaagttcgacctgcagaagcagcacaccgagaacatccaggagctgctggaggacaccaacgtgagactgaacaagatggagagcgagtacatggcccagacccagagcaccaaccacatgatcaaggagctggaggccagagtgcagcagctgaccggcgaggccgagaacagcaacctgcagagacagaagctgatccaggagaaggccgagctggagagatgctaccagatcacctgcagcgagctgcaggaggtgaaggccagaagaaacaccctgcacaaggagaaggaccacctggtgaacgactacgagcagaacatgaagctgctgcagaccaagtacgacgccgacatcaacctgctgaagcaggagcacgccctgagcgccagcaaggccagcagcatgatcgaggagctggagcagaacgtgtgccagctgaagcagcagctgcaggagagcgagctgcagagaaagcagcagctgagagaccaggagaacaagttccagatggagaagagccacctgaagcacatctacgagaagaaggcccacgacctgcagagcgagctggacaagggcaaggaggacacccagaagaagatccacaagttcgaggaggccctgaaggagaaggaggagcagctgaccagagtgaccgaggtgcagagactgcaggcccagcaggccgacgccgccctggaggagttcaagagacaggtggagctgaacagcgagaaggtgtacgccgagatgaaggagcagatggagaaggtggaggccgacctgaccagaagcaagagcctgagagagaagcagagcaaggagttcctgtggcagctggaggacatcagacagagatacgagcagcagatcgtggagctgaagctggagcacgagcaggagaagacccacctgctgcagcagcacaacgccgagaaggacagcctggtgagagaccacgagagagagatcgagaacctggagaagcagctgagagccgccaacatggagcacgagaaccagatccaggagttcaagaagagagacgcccaggtgatcgccgacatggaggcccaggtgcacaagctgagagaggagctgatcaacgtgaacagccagagaaagcagcagctggtggagctgggcctgctgagagaggaggagaagcagagagccaccagagagcacgagatcgtggtgaacaagctgaaggccgagagcgagaagatgaagatcgagctgaagaagacccacgccgccgagaccgagatgaccctggagaaggccaacagcaagctgaagcagatcgagaaggagtacacccagaagctggccaagagcagccagatcatcgccgagctgcagaccaccatcagcagcctgaaggaggagaacagccagcagcagctggccgccgagagaagactgcaggacgtgagacagaagttcgaggacgagaagaagcagctgatcagagacaacgaccaggccatcaaggtgctgcaggacgagctggagaacagaagcaaccaggtgagatgcgccgagaagaagctgcagcacaaggagctggagagccaggagcagatcacctacatcagacaggagtacgagaccaagctgaagggcctgatgcccgccagcctgagacaggagctggaggacaccatcagcagcctgaagagccaggtgaacttcctgcagaagagagccagcatcctgcaggaggagctgaccacctaccagggcagaagatag

SEQ ID NO: 317285 - DNA, 2868 bp, Artificial Sequence
  derived and/or modified sequence
atggaagtgggcagtgaggaggagaaatgggagaaactggatgcggagtttgatcacttcgtggtggatatgaaaccttttgtgctgaaactgccccacagaaccgaaaggcagcgctgtgcgctgtggatacgtaaactctgtgaaccttccggaaccggcgcggggatcatgggtaggaagaaccgcaacctgtatgccaaactgctgctacatatgctgaaacgcggggccctggaaggcccatttacccaccgcccggagccaggcacactaaagatcctgccgtcatatatgtctatatattttgatgaaccaaatcctgcacgggcgaagggcagctctcctgagggtttgcccgcctgggtcctcggcgaactcgagaccagtgagcacaagctgaacgaaagctggaagctgtcctcaggggaagacaacacactagtgcagtcccccacagacgtgtacagtagagaacaatataccggcaagctgcgggttcgttctcactctctgtctccgacccatcgtgaggacgggcaaaatattactccaaaaatttgcgaagtgtatagcaagaagtctccggtctcactcgatgactctgacatcgaggcccggttgaactcctggaacctcggtatcgagaacccccgttacttgagacagaaaccaattcccgtgtccctaatgacgccaaagttctcgctgcgcaagagttccagttttcacgatgaccattttctgtctcggatccgggagaaggaactggacatgaagaccaagatgatggaggccaagtttcacgaggagaagctcaagctgcagcagaagcatgatgcggatgtccagaaaatactggaacggaagaacaatgagatcgaggagctcaaaaccctttacaggtctaaacaacacgaaacagaagaaacgatccggaagcttgaaaaaaaggtccagaccctcatacgggattgtcaagtaatcagagagactaaagaagatcagattgccgaactgaaaaaaatttgcgagcagtcaacagaaagcctcaacaatgactgggagaaaaagctacataacgccgtggcagagatggagcaagaaaagttcgatctgcaaaagcaacacaccgaaaatatccaagagctgctagaagacacaaacgtccgccttaataagatggagagtgaatacatggctcaaacccagtccaccaatcacatgatcaaagaactggaagcgcgggtgcagcagctgacaggtgaggctgagaatagcaacctgcagcgacagaaactgatccaagagaaggccgagctggaaagatgttaccagattacttgctctgaactgcaggaggtgaaagctagaaggaataccctgcacaaagaaaaagaccacttagtgaatgattacgaacagaacatgaaactgctccagacgaagtacgacgctgatatcaatctgttaaaacaggaacatgcgctgtcggcaagcaaggccagctctatgattgaagaactggagcaaaacgtatgccaactgaagcaacaactgcaggagagcgagctgcagagaaaacagcagctgagagatcaggaaaacaagtttcaaatggagaagagccatctgaagcatatctacgagaagaaggcccatgacctacagagtgagctcgacaaaggaaaagaagacacccagaaaaaaatacacaagtttgaggaagcacttaaggagaaggaggagcagcttacacgtgtcactgaggttcagcggctgcaggcccagcaggccgatgccgctctggaggagttcaagcgacaggtggagctgaactccgagaaggtgtacgctgagatgaaagaacagatggaaaaagtggaggctgatctaacgagatccaagagtttaagagaaaaacagtctaaagagtttttatggcagctcgaagacatccgccaacgctacgagcagcagatcgttgaacttaaactggagcatgagcaagaaaagacacacctcctacagcagcataatgcagaaaaagacagcctcgttcgggatcatgagagagaaatcgaaaacttggaaaagcagctgagggcagctaacatggaacacgagaaccagatacaagaatttaagaaacgcgacgcacaagtcattgctgacatggaagcccaggtgcacaagctgcgggaggagctgataaatgtgaattcacaacgcaaacagcagctcgtggagctgggcctactgagagaagaggaaaaacagagagccaccagggagcacgaaattgtggtgaataagttgaaggccgaatcagagaaaatgaaaatcgagctgaaaaaaacccacgctgccgaaactgaaatgaccctcgagaaagccaacagcaaactcaagcaaatcgaaaaagaatatactcagaagctggcaaagtcgtctcagataatcgccgagctacagacgaccataagtagtcttaaggaagaaaacagccagcagcaattagccgcagagagacgtcttcaagacgtgcggcagaaattcgaagatgagaagaagcagctgatcagagataatgatcaggccatcaaggtgttacaggatgagcttgagaataggtcgaaccaagtgagatgtgccgagaagaaactccaacataaggaactggagtcacaagaacagatcacttacatcagacaggagtatgaaactaagctgaagggacttatgcctgccagtctaaggcaggaactcgaggacacaatttctagcctcaagagccaggttaatttcctccagaagcgggcaagcattctgcaggaagaacttacaacctatcaaggcaggaggtag

SEQ ID NO: 317286 - DNA, 2868 bp, Artificial Sequence
  derived and/or modified sequence
atggaagtggggagtgaggaggaaaagtgggagaaacttgacgcagaatttgatcactttgttgtagacatgaagcccttcgtgctgaagctccctcaccggacggagcgccagcgatgtgccctctggattcggaagctctgcgagcctagtggaaccggggctggcattatggggaggaaaaatcgaaatttatacgctaagctgttgttacatatgctcaagaggggcgcattggagggtccattcacccatagacctgagccaggcacacttaagatacttccaagttacatgtcaatctactttgatgagcccaaccccgccagagccaaaggatcttctcctgagggcctgcccgcctgggtgttgggcgaattggagaccagcgaacataagttgaatgaaagttggaagctctccagtggcgaggataacactctggttcagagcccaaccgacgtgtatagtcgtgaacaatatactggaaagctgagagttcggagccactcgctctcacctacacaccgcgaagatggacagaacattacccccaagatctgcgaggtttattccaaaaaatccccggtgagcttggacgacagcgatattgaggcgagactgaactcgtggaatctgggaatcgagaaccctcggtacctgcgccagaaacctattcccgtatccctcatgactccgaaattttctcttcgcaaaagtagctctttccatgatgaccattttctctccagaatccgagagaaagagttggacatgaaaactaagatgatggaggcaaagttccacgaagagaagctcaagttgcaacagaaacatgacgccgacgttcagaaaatcctggaacggaagaataatgagattgaggagctgaaaacgctgtatcgcagcaaacaacacgagactgaagaaactatcagaaaactggagaagaaagtgcagaccctgataagagattgccaagtgatacgggagacaaaagaagaccagatcgctgaactcaagaagatctgcgaacaaagtactgagtctctaaacaatgactgggaaaaaaagctacacaacgccgtggccgagatggagcaagaaaaatttgacctacaaaaacagcacacggaaaacatccaggagctgttggaggacactaacgtacgcctgaacaagatggagtccgaatatatggcccagactcagagcactaaccatatgatcaaggagctggaggcacgagtgcagcagctaaccggagaagctgagaatagtaaccttcaacggcagaaactgatccaggaaaaagcggaattagagaggtgctatcaaatcacttgttctgagttgcaggaagtgaaggcacgccgtaatactctgcataaggaaaaagaccatcttgtgaacgattacgaacagaacatgaaactcctgcagacaaagtacgacgccgatattaaccttctcaagcaagagcacgccctgagcgcaagcaaggcatcatcgatgattgaagagttggaacagaatgtctgccagcttaagcagcagctgcaggaatcggaactccagcggaagcagcaactccgtgaccaggagaataaattccagatggaaaaaagccacctgaagcatatctacgagaaaaaggctcacgatctccagagtgaactggataaggggaaggaggatacccagaaaaagattcacaaattcgaggaggccttgaaagaaaaggaggagcagttgacgcgcgtcaccgaagtacagcgattacaggcccagcaggccgacgcggcactcgaggaattcaagcgacaggtggaactcaactccgagaaggtttatgcagaaatgaaagagcaaatggaaaaagtggaagcagatttaacccgctcaaagagcctcagggagaagcagagcaaagaatttctatggcaacttgaggacattcgccagcgctatgaacagcaaattgtcgagttaaagctcgagcacgagcaagagaagacccacctattgcaacaacacaacgctgaaaaggactcattagtacgggatcatgagcgcgagatagagaatctcgagaagcaactgagagcggcaaatatggagcatgaaaaccagattcaggaattcaagaagagggatgcccaggtcatcgctgacatggaagcccaggtgcataagctccgggaagagttgataaatgtaaattcacaaaggaaacagcagcttgtcgaactggggttactccgggaggaagagaaacagagagccacacgcgagcacgaaatcgtcgtgaataaactcaaggcagagtcagagaaaatgaagatcgaactgaagaagacgcacgcagctgagacggagatgacattggagaaggctaattcaaagctgaagcagatcgaaaaagaatacacacagaagctggccaagtccagccagataatcgccgaactgcaaacaacaatctcaagcctgaaggaagaaaattcgcaacagcagcttgcagcagagcgcaggttacaggatgtaaggcagaaattcgaagacgagaagaagcagctgatccgcgacaatgatcaggctatcaaggtcctccaggatgaattggagaacagaagtaatcaagtgagatgcgccgaaaaaaaactgcagcataaagaactcgaatctcaggaacaaatcacctatatcaggcaggaatatgaaaccaagctgaaaggattgatgcctgcatctcttcgccaggagctagaagacaccatttccagtctcaaatctcaggttaatttcctccagaaacgggctagcatactgcaagaggagctgactacttaccaggggagacggtag

SEQ ID NO: 317287 - DNA, 2868 bp, Artificial Sequence
  derived and/or modified sequence
atggaggtgggcagcgaggaggagaagtgggagaagctggatgctgagtttgaccactttgtggtggacatgaagccctttgtgctgaagctgccccacaggacagagcggcagagatgtgccctgtggatcaggaagctgtgtgagcccagcggcactggagctggcatcatgggcaggaagaacagaaacctgtatgccaagctgctgctgcacatgctgaagagaggagccctggagggccccttcacccacaggcctgagcccggcaccctgaagatcctgcccagctacatgagcatctactttgatgagcccaacccagcccgggccaagggcagcagccctgagggcctgcctgcctgggtgctgggggagctggagaccagcgagcacaagctgaatgaatcctggaagctgagcagcggggaggacaacaccctggtgcagagccccacagatgtgtacagccgggagcagtacaccgggaagctgcgggtgcgcagccacagcctgagccccacccaccgggaggatggccagaacatcacccccaagatctgtgaggtgtacagcaagaagagccctgtgtccctggatgacagcgacatcgaggcccggctgaacagctggaacctgggcatcgagaacccccgctacctgcggcagaagcccatccctgtgtccctgatgacccccaagttcagcctgaggaagagcagcagcttccatgatgaccacttcctgagccgcatccgggagaaggagctggacatgaagaccaagatgatggaggccaagttccacgaggagaagctgaagctgcagcagaagcatgatgctgatgtgcagaagatcctggagaggaagaacaatgaaattgaggagctgaagaccctgtaccgcagcaagcagcacgagacagaggagaccatcaggaagctggagaagaaggtgcagaccctcatccgggactgccaggtgatccgggagaccaaggaggaccagattgctgagctgaagaagatctgtgagcagagcacagagagcctgaacaatgactgggagaagaagctgcacaatgctgtggccgagatggagcaggagaagtttgacctgcagaagcagcacacagagaacatccaggagctgctggaggacaccaacgtgcggctgaacaagatggagagcgagtacatggcccagacccagagcaccaaccacatgatcaaggagctggaggcccgggtgcagcagctgactggagaggccgagaacagcaacctgcagaggcagaagctgatccaggagaaggccgagctggagcgctgctaccagatcacctgcagcgagctgcaggaggtgaaggcccggaggaacaccctgcacaaggagaaggaccacctggtgaatgactatgagcagaacatgaagctgctgcagaccaagtatgatgctgacatcaacctgctgaagcaggagcacgccctgagcgccagcaaggccagctccatgattgaggagctggagcagaatgtgtgccagctgaagcagcagctgcaggagagcgagctgcagaggaagcagcagctgcgggaccaggagaacaagttccagatggagaagagccacctgaagcacatctatgagaagaaggcccatgacctgcagagcgagctggacaagggcaaggaggacacccagaagaagatccacaagtttgaggaggccctgaaggagaaggaggagcagctgaccagggtgacagaggtgcagaggctgcaggcccagcaggctgatgctgccctggaggagttcaagaggcaggtggagctgaacagcgagaaggtgtatgcagagatgaaggagcagatggagaaggtggaggccgacctgaccaggagcaagagcctgcgggagaagcagagcaaggagttcctgtggcagctggaggacatccggcagagatatgagcagcagatcgtggagctgaagctggagcacgagcaggagaagacccacctgctgcagcagcacaatgctgagaaggacagcctggtgcgggaccacgagcgggagattgagaacctggagaagcagctgcgggccgccaacatggagcacgagaaccagatccaggagttcaagaagagagatgcccaggtgattgctgacatggaggcccaggtgcacaagctgcgggaggagctgatcaacgtgaacagccagaggaagcagcagctggtggagctgggcctgctgcgggaggaggagaagcagagggccacccgggagcacgagatcgtggtgaacaagctgaaggccgagagcgagaagatgaagattgagctgaagaagacccatgctgctgagacagagatgaccctggagaaggccaacagcaagctgaagcagatcgagaaggagtacacccagaagctggccaagagcagccagatcatcgccgagctgcagaccaccatcagcagcctgaaggaggagaacagccagcagcagctggccgctgagcggcggctgcaggatgtgcggcagaagtttgaagatgagaagaagcagctgatccgggacaatgaccaggccatcaaggtgctgcaggatgagctggagaacagaagcaaccaggtgcgctgtgccgagaagaagctgcagcacaaggagctggagagccaggagcagatcacctacatccggcaggagtatgagaccaagctgaagggcctgatgcctgccagcctgcggcaggagctggaggacaccatcagcagcctgaagagccaggtgaacttcctgcagaagagggccagcatcctgcaggaggagctgaccacctaccagggcagaagatag

SEQ ID NO: 317288 - DNA, 3517 bp, Artificial Sequence
  derived and/or modified sequence
gggcccgttctccgggcctggggggcgcgcgcccctggggtcccggcgctgcccgctgtggtgtccccggcaggcagagcgcgatccaggccgggacgacttgggaaagttctaagtaaagtttgatcagccggtttgatcggtctgacgtggtccaagagtctgacccaagggtttgcgactgggagaggaaatctgtgtcctggacaagattggattatggaagtgggaagtgaagaagaaaaatgggagaagctggatgcagaatttgatcactttgtggttgatatgaagccctttgttctaaaattacctcataggacagaacggcagaggtgtgctctttggattagaaagctgtgcgaaccttcaggaacaggtgcaggaataatggggaggaagaatcggaacctgtatgcaaaattgttattgcatatgcttaaacgaggtgcgcttgaaggcccttttacacaccgacctgaacccgggacactaaaaattctaccttcatacatgtccatctattttgatgaaccaaatccagcacgagcaaaaggttcaagcccagagggattaccagcctgggtactgggtgagctggagacaagtgaacacaaattaaatgaatcatggaaactctcttctggagaagataacactttagtacagtcgccaactgatgtctacagcagggaacagtacactgggaagctccgagtgagatcacactccttgagtccaactcacagagaagatggacaaaatattaccccaaagatttgtgaagtttattcgaaaaaatctcctgtttctttggatgatagtgacattgaagctcgccttaatagttggaatcttgggatagaaaatcctcgatacctgagacagaagcctatcccagtttctctgatgacaccgaaattcagcctgagaaaatccagcagtttccatgatgatcattttctctctcgaatacgtgagaaagagctggacatgaaaacaaaaatgatggaagctaaatttcatgaagaaaagcttaaactgcaacagaaacatgatgctgatgttcagaagattttagaaagaaagaataatgaaatagaagaactgaaaactttatacaggagtaaacaacatgaaactgaagagactattagaaagcttgaaaagaaagttcagacactgatacgtgactgtcaagttatcagagagactaaagaagaccagattgcagagctgaaaaagatatgtgaacaaagtacggaatctctaaataatgactgggaaaaaaagcttcacaatgctgtagcagaaatggaacaggaaaagtttgatcttcaaaagcaacacactgaaaacattcaagaattgcttgaggatacaaatgtgcgtctgaataaaatggagagtgaatacatggcgcaaacacagtccacaaaccacatgatcaaagaactggaggcccgtgtccagcagctgactggagaagcagagaacagtaatttacagaggcagaaattaattcaagaaaaagcagaacttgaaagatgttaccagataacgtgtagtgaattacaagaagtaaaggcaaggcgtaacacactgcataaagagaaggaccatcttgtaaatgattatgagcaaaacatgaaactgttacaaaccaaatatgatgctgatataaaccttctaaaacaagaacatgctctttcagcttctaaggcatctagtatgattgaagaattagagcagaatgtctgtcaattaaaacagcagttacaggaatcagaacttcaaagaaagcaacaactaagggatcaagaaaataagtttcagatggagaaaagtcatttaaaacacatctatgaaaaaaaggctcatgacttgcagagtgaacttgataaaggaaaagaagatactcaaaagaaaattcataaatttgaggaagctttgaaggaaaaagaggagcagctaactcgtgtgactgaagttcagaggttgcaggcccagcaggcagatgccgctctggaagagtttaagcggcaggtggaactgaactcagagaaagtctatgctgaaatgaaagagcagatggaaaaagtggaggcagatctaactagatccaaatctcttcgtgagaaacaatcaaaggagtttttatggcaactggaggacatcagacagcggtatgaacaacagatagtagagctgaagctggagcatgaacaggagaagacgcacctattacagcagcataacgcagagaaggatagcctagtccgagaccatgaacgggaaattgaaaacctggaaaaacagcttcgcgctgccaatatggagcacgaaaatcaaattcaggagttcaagaaacgagatgcacaggttattgccgacatggaggcccaggttcacaagttgagagaagaattgatcaatgtgaactcacagcggaaacagcagctggtagagcttggtcttcttcgtgaagaggaaaagcaaagggctacaagggaacatgagattgtcgtcaataaactgaaggctgaatcagaaaagatgaaaatagagctgaaaaagactcatgctgctgagacagagatgacactggaaaaggccaacagcaagctgaagcagattgagaaggaatacactcagaagcttgccaaatcttcacagatcatagcagaacttcagacaaccatttcctctctgaaagaagagaacagccagcagcagcttgctgcagaaaggcggctccaggatgttagacaaaagtttgaagatgagaagaagcagctgattagagataatgaccaagcaatcaaggttttacaagatgaattagaaaaccgttctaatcaggtgcgatgtgcagagaaaaaattacaacacaaagaattggagtcacaggaacagataacttacatacgacaagaatatgaaacaaaattgaaaggattgatgccagcatccctaagacaagaacttgaagacaccatttcctccctaaaatcacaggttaattttctgcaaaagagagcttccatccttcaggaagaactgactacatatcaaggcagaaggtaactgcacgagagaatgcaacggatgcaatttccaggctgtgctgtggacttcttccagcaggtttgaagatttggatattgtaaactgtgagatcagtggcattttttaaatccttaaatgtaattaagatcataaaaacatgcatcattcatacactagtggggtggttttatttgtgtctgcctaagttatttttttaacattcctttatttccgattttcatgtttgtgtgcatttgagtatgtgctgagaactgcttatattgggcaaagtgatttcctatgatatgccttgttaatccttttgcatagaattttaccagttgcgtacgatcaaaatcacgtttgtagtatcatatcaaaaattctaacctgtttacattgttttcatgttcatgttcctatgttattaaaatattattttgtactt

SEQ ID NO: 317289 - DNA, 2868 bp, Artificial Sequence
  derived and/or modified sequence
atggaggtgggcagcgaggaggagaagtgggagaagctggacgccgagttcgaccatttcgtcgttgatatgaagccctttgtactaaagctgcctcatcgaaccgaaaggcagagatgtgcactttggattcgtaagctatgcgagcccagcgggacaggcgcaggtatcatggggcggaaaaacagaaacttatacgcaaaactattgctgcacatgctcaagcgtggagcgctcgaaggcccattcacacatcggcctgagcccggaacccttaaaatacttccatcttatatgtccatctacttcgatgaacctaatccagctcgggccaagggtagctcccccgaaggtctcccggcttgggtgctgggcgagctggagacatctgagcacaaactaaatgaaagttggaagctcagcagcggcgaagacaatacactcgtgcagtctcctacagatgtctatagcagagaacagtacacaggtaaactaagggtcaggagccattccctgtcaccaacccaccgggaggacggacaaaatattacgccaaagatctgcgaggtgtacagcaagaagtcccctgtttctctggacgacagcgatattgaggctaggctaaattcgtggaatctagggatcgagaatcccagatacctgcgccagaaaccaatcccagtcagcctgatgaccccaaaattcagcctcaggaagtcctctagcttccatgatgaccatttcctatcgcgcatacgagagaaagagctggacatgaagacaaagatgatggaggccaaattccacgaagaaaagttaaaattgcaacaaaaacacgacgcggatgttcagaagatcctcgagcggaagaacaatgagatagaggagctgaaaactctgtacaggtccaagcagcacgagacggaagagaccatccgcaaactcgagaaaaaggtgcagacactcatcagggactgccaggttattagagagaccaaggaggaccagattgctgaactgaagaagatctgcgagcagagcactgaatctcttaacaatgattgggaaaaaaagctccataacgccgtcgccgagatggagcaggagaagttcgatctgcagaagcagcacaccgagaatattcaggagctacttgaagacactaacgttcgcctgaataaaatggagagcgagtatatggcacagactcaatccacaaatcatatgatcaaggaacttgaggcccgggtgcagcagctcaccggtgaagccgagaacagcaacctccaaagacagaagctaatccaggagaaagcagaactggaacgctgctaccagatcacttgttctgagctccaggaggtaaaggcgcgcaggaatactctgcacaaagagaaagatcatctggtgaatgactacgagcagaacatgaaattactgcaaactaaatatgatgctgatattaatttgttaaaacaggagcacgccctcagtgcatctaaggcatctagcatgattgaggagctcgagcagaacgtgtgccagctcaaacaacagctgcaggagtcggagcttcagaggaaacagcagttgagagatcaagagaataaattccaaatggagaaatcacatctgaagcacatttatgagaaaaaggcccatgatctccaaagcgagctcgacaaaggcaaggaggatacccaaaaaaaaatccacaaattcgaagaggcactgaaggagaaggaggaacagctgacccgggtgacggaggttcagcggctgcaagcccagcaggcagacgctgccttggaggaattcaagcgccaggtggaactgaattctgaaaaagtgtatgccgaaatgaaggagcagatggagaaggtggaagcagatctcactcggtcgaagtcgctcagggaaaaacagagcaaggaattcctgtggcagttggaggacatcaggcagcggtacgaacagcagattgttgaactgaaactggagcacgaacaagagaagactcatttattgcagcagcacaacgctgagaaggatagtctggtgagagaccacgagagagagattgagaacttagagaagcagctccgtgccgccaatatggagcacgagaatcagattcaggagtttaagaagcgggacgcccaggtgatagccgacatggaagcccaggttcataagttgagggaagaactgatcaacgttaactcccagaggaagcagcagttggtcgaactgggcttgctgcgagaagaggagaagcagagggccacccgggagcatgaaatcgtggtaaacaaactcaaagccgagtccgagaagatgaagatcgaactgaagaagacacacgctgccgagactgagatgacgctggaaaaagccaatagtaagttaaaacagatcgagaaagaatacacccagaagctggccaagagctcccagattattgccgagttacagacaacaatctctagtctgaaggaggagaattcccagcagcaactggctgccgagcgaagattacaagacgttagacaaaaattcgaagatgaaaagaagcagctgatcagagacaacgatcaagctattaaagtgctccaggatgaactggaaaaccgcagtaaccaagtacggtgcgccgagaagaaactgcagcataaggagctcgaatcacaggaacagattacatacatccgacaagaatacgaaacaaagctgaaggggttgatgcctgcatctctgaggcaggaactggaagacacaatctcatcccttaagtcacaagttaatttcttacaaaagcgtgccagcatacttcaggaggaacttaccacgtatcagggcagacgctag

SEQ ID NO: 317290 - DNA, 2868 bp, Artificial Sequence
  derived and/or modified sequence
atggaggtgggcagcgaggaggagaagtgggagaagctggacgccgaatttgatcactttgttgtagatatgaaaccatttgtcctcaaactgccccatcggactgaacgacagcgatgcgcgctgtggattcggaagctctgtgagccctcaggaaccggtgcaggcatcatgggcagaaaaaatcggaatctctatgcaaagctccttttgcatatgctcaagagaggcgcacttgaaggaccctttactcatagaccagagcccggcacattgaagatccttccatcttatatgtctatctacttcgacgagccgaacccggcaagggcaaagggctcctctcccgagggtttacctgcctgggtcctcggcgagttagagacctctgaacataaattaaatgagagctggaagctcagctctggcgaggataacacgctggtacagtcgcccactgacgtgtactcaagggaacagtataccggcaaattgcgcgtaagatcacactcattgtcgcctacccacagagaagatgggcagaacatcacacctaagatatgcgaggtgtactcgaagaagagtccggtgtctctcgatgacagtgatatcgaggcgagactcaactcttggaatctcgggatcgaaaatccacgatacttacgccagaagcccatcccggtgtccctcatgacccccaagtttagtctgcgaaaaagcagttcattccatgatgatcattttcttagtaggatcagagaaaaagagttggacatgaaaacaaagatgatggaggcaaagtttcacgaggaaaaacttaagcttcagcagaaacatgacgccgacgtgcagaagatcctcgagaggaaaaacaatgaaatcgaagagcttaagactctctaccgctccaaacagcacgagaccgaagagacgattagaaagctcgaaaagaaagtgcagactctcatccgcgactgtcaggtgattcgcgaaaccaaggaggaccagatcgctgagctcaaaaaaatttgcgagcagagtaccgagagccttaacaacgactgggaaaaaaagctgcacaatgctgtagccgagatggaacaggagaagtttgaccttcagaaacagcacacagaaaatattcaggagctactggaagacacaaatgtccgattaaacaagatggagtcagagtatatggcccagacccagtccacaaaccacatgattaaggagctagaggccagagtgcagcagcttactggagaagccgagaactccaatctacagcgtcagaagctgatccaggaaaaggccgagctggagagatgctaccagattacctgtagcgagctgcaggaggtaaaagctcgcaggaacactctgcataaggaaaaagaccaccttgttaacgactacgagcagaatatgaaactgctccagacaaagtacgacgccgatataaatttactaaagcaggaacacgccctgtcagcctccaaagcttcttctatgattgaggagctggaacagaacgtttgccagctcaaacagcagcttcaggaatcagagttgcaacgaaagcaacagctgcgagaccaggagaataagttccagatggaaaaatcccacttgaaacacatctatgaaaaaaaggcccacgacctccagtccgagctagataagggcaaagaggacacgcagaagaaaatacacaagttcgaagaggccctgaaagaaaaagaggagcagctgacccgggtcaccgaagtgcagcgactgcaagcccaacaggccgacgccgcgctcgaagagtttaagcggcaggttgaactcaattccgaaaaggtctacgctgagatgaaagaacagatggaaaaggtcgaagccgatctgacaagaagtaaatcactgcgtgaaaagcagagcaaggaatttttgtggcagctcgaggacattcggcagcggtacgaacaacagatagttgagctgaaacttgagcacgaacaagagaagactcacctgcttcaacagcacaacgccgaaaaagactctttggtgagagaccacgagcgcgagatcgaaaatcttgagaaacagctgagagccgctaacatggaacatgagaaccaaatccaggagttcaagaagagagacgcgcaggttatagctgacatggaagctcaagtacacaagctaagggaagaacttatcaatgtgaattcacagcgaaagcaacagttagtcgagctgggtctcctccgcgaggaggaaaagcagagggccactcgcgaacacgagattgtggtaaacaaattgaaagccgagtctgaaaagatgaaaatcgagctgaagaagacacacgctgcagaaacggaaatgacgctggagaaggcaaatagcaagctgaagcagatcgaaaaagaatatactcaaaagctcgccaaatcctctcaaatcatagccgaactccagactaccatttcttcgcttaaggaagagaactctcagcagcaattggccgccgagaggcgcctgcaggatgtgagacagaagttcgaagacgaaaagaagcagcttataagggataatgaccaggcgataaaagtgctccaagatgaactggaaaacaggtccaaccaagtgcgatgtgccgagaaaaaactacagcacaaggagcttgagtcacaggagcaaatcacatacatccgtcaagaatacgaaactaaactcaagggactaatgccagcctcgctcagacaggaactggaggatactatctcttcactgaagtcccaggttaattttctccagaagagggccagcatcctgcaggaagaactaacaacataccaggggcggcggtag

SEQ ID NO: 317291 - DNA, 2868 bp, Artificial Sequence
  derived and/or modified sequence
atggaagttggatctgaggaggaaaagtgggaaaaacttgacgcagagtttgaccacttcgtggtcgatatgaaacctttcgtgctgaaactgccccacagaaccgaacgccagaggtgtgctctgtggatccgcaagctgtgtgaaccaagcgggacaggggctgggattatgggcagaaagaatcgtaatctctacgccaagcttctgttgcatatgctgaaaagaggtgccctggaagggcctttcactcaccgccctgagcctggcaccctgaaaattctgcctagttatatgtctatttactttgacgaacccaaccctgcccgagcgaaagggagctccccagaaggtctccccgcttgggttctgggggaactcgaaacgagcgagcataagttgaatgagagttggaaactatctagcggggaagacaacaccctggtccagagcccgactgatgtatattccagggagcagtacacgggcaaactccgcgttcgaagtcatagtctgtctccgacacatagagaggacggacagaacataactccaaagatttgcgaggtgtacagtaagaagtctccagtgtccttagacgactccgatatagaggccaggcttaattcgtggaacctcggaatcgaaaaccccagatatctgaggcaaaagcctattccggtttccctgatgactccgaagttctcgcttaggaaaagttccagttttcacgatgatcacttcctctctaggatccgagaaaaggagctggacatgaaaactaagatgatggaggccaaatttcacgaggagaaattgaagctacagcaaaagcacgatgctgacgttcaaaaaatcctggagagaaagaataacgaaatcgaagagctgaagaccctgtatcgcagcaaacagcatgaaaccgaggagacgattaggaaactggaaaaaaaagtgcagactctgatccgagattgtcaggtgattagagagacaaaggaagaccagattgcagagctcaagaagatctgtgagcagtccaccgagtccctcaacaatgattgggagaagaagctacataacgccgtcgcagagatggaacaggagaaattcgatctccagaagcagcacacagaaaacatccaggaattgttagaggatacaaatgtccgcctgaataaaatggagtcagagtacatggcccagacacaaagcactaatcatatgatcaaagaactggaagcccgtgtgcagcaattgaccggagaagctgagaatagtaatctgcagcggcagaaactcattcaggagaaggcggaactggagaggtgttaccaaattacttgttccgagctccaggaagtcaaggcccgtaggaacaccctgcacaaggagaaggatcacttggtgaatgattatgagcagaatatgaagttgctgcagaccaaatatgacgcagacataaacctgctgaagcaagagcatgccctaagtgcctctaaagccagttcaatgatcgaggagttagagcaaaatgtgtgtcaattgaagcagcagctccaggaatcagagctgcaaagaaaacaacaactgcgtgaccaggaaaacaagttccagatggagaagtcccatttaaagcatatttacgagaagaaggcgcacgatctgcagagcgaattggacaaggggaaagaggatactcagaaaaaaattcataagtttgaggaagcccttaaagaaaaggaggagcagctcaccagggtcacagaggtccaacgccttcaagcccagcaggccgacgccgcactcgaggagtttaagaggcaggtcgaactcaactcagagaaggtgtatgctgaaatgaaagaacagatggagaaagtggaggctgatttgacaagatcaaagtccctgagagagaaacagtctaaagaattcctgtggcaactggaagatattcggcaacggtatgaacaacagatcgtggagctgaaactcgagcatgagcaggaaaaaacacacttactacagcagcacaatgcagagaaagactcgctcgtgagagatcacgagcgcgaaatcgaaaatctggaaaaacaacttcgggctgccaatatggagcacgagaaccagattcaggaatttaaaaaaagggatgctcaggtaatcgcggacatggaggcccaagtgcacaagctccgagaagaactgatcaacgtaaatagccaacggaaacagcaactggtcgaactcggattattaagagaggaggagaaacaaagagccacacgtgaacacgagattgtcgtgaataagctgaaagccgaatctgaaaagatgaagattgagctgaaaaaaacccatgctgctgagaccgagatgaccctggagaaagcaaattctaaactgaagcaaattgagaaagagtatactcaaaagctggcaaagtcctcccagattattgccgagctccagactacaatcagcagtctgaaggaagaaaactcccagcagcagctcgcagccgaaagacgactgcaggatgtgagacagaagtttgaggacgaaaaaaagcagcttattagggataacgaccaagccattaaagtacttcaggatgagctcgagaacagatcaaatcaggtgcgttgcgccgagaagaagctgcagcacaaggagctggagtctcaggagcaaataacctacattagacaagagtacgagacgaagctgaaaggccttatgccagcttcgcttcgtcaggaactcgaggatactataagcagcctgaagagtcaagttaacttcctgcagaagcgcgcaagcatcctacaggaggaattgaccacttatcaaggccgaaggtag

SEQ ID NO: 317292 - DNA, 2868 bp, Artificial Sequence
  derived and/or modified sequence
atggaggtcggatctgaagaagagaaatgggaaaaactcgacgccgaatttgatcacttcgtagtcgacatgaaaccctttgtcttgaaactcccccataggacagagaggcaacgctgcgccttgtggattagaaagctgtgtgagccatccggtaccggtgcagggattatggggaggaagaataggaacctctatgccaaactgttgctacacatgttaaaacggggagctctggaaggcccttttactcacaggccagagcccggaacgttgaagatacttccgtcctatatgtctatctactttgacgaacctaatcccgctcgcgctaaggggtcttctcctgaggggctccccgcatgggtcctcggggagcttgagactagcgagcataaactgaacgagtcctggaagttatcaagcggcgaggacaacacgctcgtacaatcacccaccgacgtgtatagtcgtgaacagtacaccggcaaactgagagttcgttctcactccctctcacccacacacagagaagacggccagaatataacaccgaaaatttgtgaggtgtactccaaaaagtctcccgtgagcctcgatgacagcgacatcgaggcgcgactgaacagctggaacttgggtatcgagaatcctagatatctccgccagaagcccatacctgtgtccctcatgacacccaagtttagtttgaggaaaagtagctcatttcacgatgaccattttctctccagaattcgagagaaagaactggacatgaaaactaaaatgatggaggctaaattccatgaggaaaagctgaagctccaacagaaacacgacgccgacgttcagaagattctggaaagaaagaataatgagattgaagagctcaaaaccctgtaccgatcaaaacagcacgaaacagaagagactatccgaaagcttgagaagaaagtgcagacactaatacgggactgtcaggtgattcgagaaacaaaagaggaccagatcgctgaactgaagaagatttgcgagcagagcactgaatcactgaataatgactgggagaagaaactgcacaatgccgtggccgaaatggagcaagaaaaattcgatctccagaaacaacacacagagaacatccaagagctgttggaggacacaaatgtgcggcttaataagatggagtcggagtacatggctcagacccaaagtactaaccacatgatcaaagagctggaagctagagttcagcaactcacaggcgaggcggagaactcaaatctccagcgacaaaaactgattcaggaaaaggctgagctggaacgttgctaccagatcacctgctctgagttacaagaagtgaaagcacgaaggaacaccctccacaaagaaaaagatcatctggtaaacgattacgaacagaacatgaagttgcttcagacgaaatacgatgccgacatcaacctgcttaaacaggaacacgcactgagcgcaagcaaggcatcttccatgattgaggagctcgaacagaatgtgtgccagttaaaacagcagttgcaagagtcagagctccagcggaaacagcaactgagggatcaggaaaataagttccagatggagaagagccatctgaagcatatctatgaaaaaaaggctcacgacctgcagagcgaactggacaagggaaaggaggacactcagaaaaaaatacacaaattcgaagaagccctcaaagagaaagaagaacagctcactcgtgtcaccgaagtgcagcgattacaggcccaacaggcagatgctgcactggaggagttcaagcgtcaggttgaacttaatagtgagaaggtgtatgcagagatgaaagagcagatggaaaaagtcgaggcggatcttacccggtccaaaagtcttagggagaagcaatcaaaggagtttctgtggcaactggaggatattagacaacgctacgaacagcaaatcgtggaattaaaactggagcacgaacaggagaaaacccacctcctgcaacagcataacgcggagaaggactcgctcgtgcgtgatcatgaacgcgagatcgaaaacctggagaagcagttgcgggctgcaaacatggagcatgagaatcaaattcaggagttcaaaaagcgcgatgcacaggttattgctgatatggaagcccaggtgcataagctgcgggaggaactgatcaatgtgaattctcagcgcaaacagcagcttgtcgagttaggtctgctccgagaagaagaaaaacagcgggctacgcgcgaacatgagatcgtggtgaacaagctaaaagctgaatctgagaaaatgaagattgagctgaagaaaactcatgccgctgagaccgaaatgactctggaaaaggcgaactccaagctgaaacagatcgaaaaagagtatactcagaagctcgctaagagtagtcagataatcgccgagctgcagactaccattagctccctcaaggaggaaaattcccaacaacaactggccgcagaacgaagacttcaggatgtccgccaaaagtttgaagacgagaaaaaacagctgattagggataatgatcaggccataaaggtcctgcaggacgaactagagaacagatccaatcaggtaagatgcgcagaaaagaagctccagcataaagaactagaatctcaagaacagataacatatattaggcaggagtacgagacaaaactcaaggggcttatgccagcatcactgcggcaggagctggaagacacaatctcttcgctcaagtcacaggtgaattttctgcagaagagggcatcaatactccaggaagagctcaccacatatcaggggagaagatag

SEQ ID NO: 317293 - DNA, 3389 bp, Artificial Sequence
  derived and/or modified sequence
gaaaccgtttggcaggggcggcggtggcggcggcgttggcggcagcggccgagcggaaagcttgcgtgtggtggtgccagattggattatggaagtgggaagtgaagaagaaaaatgggagaagctggatgcagaatttgatcactttgtggttgatatgaagccctttgttctaaaattacctcataggacagaacggcagaggtgtgctctttggattagaaagctgtgcgaaccttcaggaacaggtgcaggaataatggggaggaagaatcggaacctgtatgcaaaattgttattgcatatgcttaaacgaggtgcgcttgaaggcccttttacacaccgacctgaacccgggacactaaaaattctaccttcatacatgtccatctattttgatgaaccaaatccagcacgagcaaaaggttcaagcccagagggattaccagcctgggtactgggtgagctggagacaagtgaacacaaattaaatgaatcatggaaactctcttctggagaagataacactttagtacagtcgccaactgatgtctacagcagggaacagtacactgggaagctccgagtgagatcacactccttgagtccaactcacagagaagatggacaaaatattaccccaaagatttgtgaagtttattcgaaaaaatctcctgtttctttggatgatagtgacattgaagctcgccttaatagttggaatcttgggatagaaaatcctcgatacctgagacagaagcctatcccagtttctctgatgacaccgaaattcagcctgagaaaatccagcagtttccatgatgatcattttctctctcgaatacgtgagaaagagctggacatgaaaacaaaaatgatggaagctaaatttcatgaagaaaagcttaaactgcaacagaaacatgatgctgatgttcagaagattttagaaagaaagaataatgaaatagaagaactgaaaactttatacaggagtaaacaacatgaaactgaagagactattagaaagcttgaaaagaaagttcagacactgatacgtgactgtcaagttatcagagagactaaagaagaccagattgcagagctgaaaaagatatgtgaacaaagtacggaatctctaaataatgactgggaaaaaaagcttcacaatgctgtagcagaaatggaacaggaaaagtttgatcttcaaaagcaacacactgaaaacattcaagaattgcttgaggatacaaatgtgcgtctgaataaaatggagagtgaatacatggcgcaaacacagtccacaaaccacatgatcaaagaactggaggcccgtgtccagcagctgactggagaagcagagaacagtaatttacagaggcagaaattaattcaagaaaaagcagaacttgaaagatgttaccagataacgtgtagtgaattacaagaagtaaaggcaaggcgtaacacactgcataaagagaaggaccatcttgtaaatgattatgagcaaaacatgaaactgttacaaaccaaatatgatgctgatataaaccttctaaaacaagaacatgctctttcagcttctaaggcatctagtatgattgaagaattagagcagaatgtctgtcaattaaaacagcagttacaggaatcagaacttcaaagaaagcaacaactaagggatcaagaaaataagtttcagatggagaaaagtcatttaaaacacatctatgaaaaaaaggctcatgacttgcagagtgaacttgataaaggaaaagaagatactcaaaagaaaattcataaatttgaggaagctttgaaggaaaaagaggagcagctaactcgtgtgactgaagttcagaggttgcaggcccagcaggcagatgccgctctggaagagtttaagcggcaggtggaactgaactcagagaaagtctatgctgaaatgaaagagcagatggaaaaagtggaggcagatctaactagatccaaatctcttcgtgagaaacaatcaaaggagtttttatggcaactggaggacatcagacagcggtatgaacaacagatagtagagctgaagctggagcatgaacaggagaagacgcacctattacagcagcataacgcagagaaggatagcctagtccgagaccatgaacgggaaattgaaaacctggaaaaacagcttcgcgctgccaatatggagcacgaaaatcaaattcaggagttcaagaaacgagatgcacaggttattgccgacatggaggcccaggttcacaagttgagagaagaattgatcaatgtgaactcacagcggaaacagcagctggtagagcttggtcttcttcgtgaagaggaaaagcaaagggctacaagggaacatgagattgtcgtcaataaactgaaggctgaatcagaaaagatgaaaatagagctgaaaaagactcatgctgctgagacagagatgacactggaaaaggccaacagcaagctgaagcagattgagaaggaatacactcagaagcttgccaaatcttcacagatcatagcagaacttcagacaaccatttcctctctgaaagaagagaacagccagcagcagcttgctgcagaaaggcggctccaggatgttagacaaaagtttgaagatgagaagaagcagctgattagagataatgaccaagcaatcaaggttttacaagatgaattagaaaaccgttctaatcaggtgcgatgtgcagagaaaaaattacaacacaaagaattggagtcacaggaacagataacttacatacgacaagaatatgaaacaaaattgaaaggattgatgccagcatccctaagacaagaacttgaagacaccatttcctccctaaaatcacaggttaattttctgcaaaagagagcttccatccttcaggaagaactgactacatatcaaggcagaaggtaactgcacgagagaatgcaacggatgcaatttccaggctgtgctgtggacttcttccagcaggtttgaagatttggatattgtaaactgtgagatcagtggcattttttaaatccttaaatgtaattaagatcataaaaacatgcatcattcatacactagtggggtggttttatttgtgtctgcctaagttatttttttaacattcctttatttccgattttcatgtttgtgtgcatttgagtatgtgctgagaactgcttatattgggcaaagtgatttcctatgatatgccttgttaatccttttgcatagaattttaccagttgcgtacgatcaaaatcacgtttgtagtatcatatcaaaaattctaacctgtttacattgttttcatgttcatgttcctatgttattaaaatattattttgtacttacc

SEQ ID NO: 317294 - protein, 519 aa, Artificial Sequence
  derived and/or modified sequence
MEQEKFDLQKQHTENIQELLEDTNVRLNKMESEYMAQTQSTNHMIKELEARVQQLTGEAENSNLQRQKLIQEKAELERCYQITCSELQEVKARRNTLHKEKDHLVNDYEQNMKLLQTKYDADINLLKQEHALSASKASSMIEELEQNVCQLKQQLQESELQRKQQLRDQENKFQMEKSHLKHIYEKKAHDLQSELDKGKEDTQKKIHKFEEALKEKEEQLTRVTEVQRLQAQQADAALEEFKRQVELNSEKVYAEMKEQMEKVEADLTRSKSLREKQSKEFLWQLEDIRQRYEQQIVELKLEHEQEKTHLLQQHNAEKDSLVRDHEREIENLEKQLRAANMEHENQIQEFKKRDAQVIADMEAQVHKLREELINVNSQRKQQLVELGLLREEEKQRATREHEIVVNKLKAESEKMKIELKKTHAAETEMTLEKVLQDELENRSNQVRCAEKKLQHKELESQEQITYIRQEYETKLKGLMPASLRQELEDTISSLKSQVNFLQKRASILQEELTTYQGRR

SEQ ID NO: 317295 - DNA, 1560 bp, Artificial Sequence
  derived and/or modified sequence
atggagcaggagaagttcgacctgcagaagcagcacaccgagaacatccaggagctgctggaggacaccaacgtgagactgaacaagatggagagcgagtacatggcccagacccagagcaccaaccacatgatcaaggagctggaggccagagtgcagcagctgaccggcgaggccgagaacagcaacctgcagagacagaagctgatccaggagaaggccgagctggagagatgctaccagatcacctgcagcgagctgcaggaggtgaaggccagaagaaacaccctgcacaaggagaaggaccacctggtgaacgactacgagcagaacatgaagctgctgcagaccaagtacgacgccgacatcaacctgctgaagcaggagcacgccctgagcgccagcaaggccagcagcatgatcgaggagctggagcagaacgtgtgccagctgaagcagcagctgcaggagagcgagctgcagagaaagcagcagctgagagaccaggagaacaagttccagatggagaagagccacctgaagcacatctacgagaagaaggcccacgacctgcagagcgagctggacaagggcaaggaggacacccagaagaagatccacaagttcgaggaggccctgaaggagaaggaggagcagctgaccagagtgaccgaggtgcagagactgcaggcccagcaggccgacgccgccctggaggagttcaagagacaggtggagctgaacagcgagaaggtgtacgccgagatgaaggagcagatggagaaggtggaggccgacctgaccagaagcaagagcctgagagagaagcagagcaaggagttcctgtggcagctggaggacatcagacagagatacgagcagcagatcgtggagctgaagctggagcacgagcaggagaagacccacctgctgcagcagcacaacgccgagaaggacagcctggtgagagaccacgagagagagatcgagaacctggagaagcagctgagagccgccaacatggagcacgagaaccagatccaggagttcaagaagagagacgcccaggtgatcgccgacatggaggcccaggtgcacaagctgagagaggagctgatcaacgtgaacagccagagaaagcagcagctggtggagctgggcctgctgagagaggaggagaagcagagagccaccagagagcacgagatcgtggtgaacaagctgaaggccgagagcgagaagatgaagatcgagctgaagaagacccacgccgccgagaccgagatgaccctggagaaggtgctgcaggacgagctggagaacagaagcaaccaggtgagatgcgccgagaagaagctgcagcacaaggagctggagagccaggagcagatcacctacatcagacaggagtacgagaccaagctgaagggcctgatgcccgccagcctgagacaggagctggaggacaccatcagcagcctgaagagccaggtgaacttcctgcagaagagagccagcatcctgcaggaggagctgaccacctaccagggcagaagatag

SEQ ID NO: 317296 - DNA, 1560 bp, Artificial Sequence
  derived and/or modified sequence
atggaacaagaaaagtttgacttgcaaaaacaacacaccgaaaacattcaggaacttttagaagacacgaacgttcggctgaataaaatggaaagcgagtacatggcccagactcagagtaccaaccacatgatcaaagaattggaggcccgcgttcagcaactgactggagaagctgagaattccaatctacagcgccagaaactaatacaggagaaagctgagttggaaagatgctatcagattacctgttctgagctgcaggaggtgaaggctcgtcgaaacacactgcataaagaaaaagaccaccttgttaatgattatgagcagaatatgaagctacttcagacgaaatatgatgccgatatcaaccttctgaaacaggagcacgccctcagtgcatcgaaggcaagttctatgatagaagaattggagcagaacgtttgccagctaaagcagcagctacaggagtcggaacttcagcgcaagcagcagctgcgggatcaggagaacaaattccaaatggaaaaatctcatctcaaacacatctatgaaaaaaaagcccacgatcttcagtctgagctagacaagggcaaagaggatacacaaaaaaaaattcacaaattcgaagaagcccttaaggaaaaagaagagcagcttacccgcgtgaccgaagtgcagaggttgcaagcacaacaggccgatgccgcactggaggagttcaaaagacaagtggagttaaactccgagaaagtgtacgctgaaatgaaagagcaaatggaaaaggtcgaagctgacttgactcgatccaagtccctgcgcgagaagcagtctaaagaatttctgtggcagctggaggatatccgccagagatatgagcagcagatagttgagctaaagcttgagcacgaacaggaaaagacccatctcttgcagcagcataacgcggaaaaggattcactggtgcgagatcatgagagagagatagaaaatctcgagaagcagctccgagcggctaacatggagcatgagaaccaaattcaggagtttaaaaaacgtgacgctcaagttattgcagatatggaggcgcaggttcacaagctgcgagaagagctcatcaacgtgaactcacagcgcaagcagcagttggtggagctgggcttactccgggaagaggagaaacaacgggcgacgagggagcacgaaattgtggtcaataagctgaaggcagagtccgagaagatgaaaatcgagctcaagaagacccacgccgctgagacggagatgactctcgagaaggtcttgcaggatgagctggagaaccggagcaaccaggtgaggtgtgctgagaagaagctgcagcataaggagctggagtcacaggagcagatcacctacattcgacaggaatacgagaccaagctgaaaggtttgatgcccgcctcactacgccaggaattggaagataccattagttccctcaaatctcaagtgaatttcttacagaagagagcatccatcctgcaagaggaactaacaacttaccaggggaggcggtag

SEQ ID NO: 317297 - DNA, 1560 bp, Artificial Sequence
  derived and/or modified sequence
atggagcaggagaagtttgacctgcagaagcagcacacagagaacatccaggagctgctggaggacaccaacgtgcggctgaacaagatggagagcgagtacatggcccagacccagagcaccaaccacatgatcaaggagctggaggcccgggtgcagcagctgaccggggaggccgagaacagcaacctgcagaggcagaagctgatccaggagaaggccgagctggagcgctgctaccagatcacctgcagcgagctgcaggaggtgaaggcccggaggaacaccctgcacaaggagaaggaccacctggtgaatgactatgagcagaacatgaagctgctgcagaccaagtatgatgctgacatcaacctgctgaagcaggagcacgccctgagcgccagcaaggccagctccatgattgaggagctggagcagaatgtgtgccagctgaagcagcagctgcaggagagcgagctgcagaggaagcagcagctgcgggaccaggagaacaagttccagatggagaagagccacctgaagcacatctatgagaagaaggcccatgacctgcagagcgagctggacaagggcaaggaggacacccagaagaagatccacaagtttgaggaggccctgaaggagaaggaggagcagctgaccagggtgacagaggtgcagaggctgcaggcccagcaggctgatgctgccctggaggagttcaagaggcaggtggagctgaacagcgagaaggtgtatgcagagatgaaggagcagatggagaaggtggaggccgacctgaccaggagcaagagcctgcgggagaagcagagcaaggagttcctgtggcagctggaggacatccggcagagatatgagcagcagatcgtggagctgaagctggagcacgagcaggagaagacccacctgctgcagcagcacaatgctgagaaggacagcctggtgcgggaccacgagcgggagattgagaacctggagaagcagctgcgggccgccaacatggagcacgagaaccagatccaggagttcaagaagagagatgcccaggtgattgctgacatggaggcccaggtgcacaagctgcgggaggagctgatcaacgtgaacagccagaggaagcagcagctggtggagctgggcctgctgcgggaggaggagaagcagagggccacccgggagcatgaaattgtggtgaacaagctgaaggccgagagcgagaagatgaagattgagctgaagaagacccacgccgctgagacagagatgaccctggagaaggtgctgcaggatgagctggagaacagaagcaaccaggtgcgctgtgccgagaagaagctgcagcacaaggagctggagagccaggagcagatcacctacatccggcaggagtatgagaccaagctgaagggcctgatgcctgccagcctgcggcaggagctggaggacaccatcagcagcctgaagagccaggtgaacttcctgcagaagagggccagcatcctgcaggaggagctgaccacctaccagggcagaagatag

SEQ ID NO: 317298 - DNA, 1560 bp, Artificial Sequence
  derived and/or modified sequence
atggagcaggagaagttcgacctgcagaagcagcacaccgagaacatccaggaactcctggaggacacaaatgttaggctcaacaaaatggaatccgagtacatggcacaaacacagagcacgaatcatatgatcaaggaactcgaagccagagttcaacagctgacaggtgaagccgaaaatagtaacctgcagaggcagaagctgatacaagaaaaagctgaactggagcggtgttatcagattacatgttccgaactccaggaagttaaggcgcggagaaataccctgcataaagagaaggatcacctggttaatgactacgaacaaaacatgaaacttttgcagactaaatatgatgccgacattaatctccttaagcaagagcacgccctctcagcttctaaagctagctccatgatcgaagaactggagcagaacgtgtgccaacttaaacaacaactgcaggagagcgagctacagcggaagcagcagctgcgggaccaggagaataagtttcagatggagaagtcccacctgaagcacatttatgagaagaaggcccacgacctgcagtctgaactggataagggaaaagaagacactcagaagaagattcacaagttcgaagaagccctgaaagagaaagaggagcagctgacaagggtgacagaggttcagagactccaagcccagcaagcagacgccgcgctagaagaatttaagcgacaggtagagctcaacagcgagaaggtatacgccgaaatgaaagagcagatggagaaggtggaggccgatctcactcgaagtaaatcactacgagagaagcaaagcaaagagtttctgtggcagctggaagacatccgccaacgatatgagcagcaaatcgttgaactgaaactcgagcatgagcaggagaagacgcacctcttacaacagcataatgccgagaaggacagcttggtgagagatcacgaacgggagattgaaaatctggagaagcagttgcgggcggctaatatggaacatgagaatcagatccaggagtttaaaaaacgtgacgcccaggtgatagccgatatggaagcccaggtacacaaactccgggaagagcttattaacgtgaacagccagcggaaacagcaattagttgaactgggattgctgagagaggaagagaagcagagggcaacgcgtgaacacgagatcgtggttaacaaattgaaggccgagtcagagaagatgaaaatagagctgaagaagacacacgcagccgaaacagagatgaccttagaaaaagtcctgcaggacgaattagagaaccgatccaaccaggtgcggtgcgctgaaaaaaagctccagcataaggaactggagagccaggaacagataacctacatacggcaggagtacgaaacaaaactgaaggggttaatgcctgcatcgctcagacaggaactggaggacaccatttcctcattgaagagtcaagtgaatttcctgcagaagcgggctagtatcctccaggaagaactgacaacttatcagggccggcgctag

SEQ ID NO: 317299 - DNA, 1560 bp, Artificial Sequence
  derived and/or modified sequence
atggagcaggaaaaatttgatctacagaagcaacataccgaaaatattcaggagctcctggaggatacaaacgtgcgccttaataaaatggaaagcgagtatatggctcagacccagtccactaatcacatgatcaaggaactggaggctcgcgtccaacagctgactggtgaggctgagaattcaaacctgcagcggcagaagctgatccaggagaaagcagaactggaaagatgctatcaaataacatgttcagagctccaagaagtgaaagccaggcgaaatactctgcacaaagagaaagatcatctggtcaacgactacgaacaaaacatgaagttactgcaaactaagtatgatgcagacataaacctcttgaagcaggagcatgccctctctgcctccaaggccagcagtatgattgaagaactggaacaaaacgtctgccaactgaaacagcagcttcaggaatcggaacttcaacgcaagcagcagttgcgggaccaggagaataagttccagatggagaagagtcatctcaaacacatatacgaaaagaaggcacatgacttgcagagtgagctggacaaaggaaaggaggatacgcagaaaaagatccataagttcgaggaagccttgaaagaaaaggaggagcagttaacccgcgtgacagaagtgcagcgattgcaggctcaacaggccgatgcagcacttgaggagtttaaaagacaggttgagctgaactccgaaaaggtgtacgcggagatgaaggaacagatggaaaaagtggaggccgacctgacacggagcaagtccctcagagagaagcaatcaaaagaatttctctggcagctggaagatatcagacagaggtacgaacagcaaatagtggaactgaagttggagcacgagcaggaaaagacccacctattgcagcagcacaacgctgagaaggacagtctggttagagatcacgagcgcgagatcgagaacttggaaaagcagctgagggcagcaaatatggagcacgagaatcaaatccaagaatttaagaagcgagacgcccaagtgatcgccgacatggaggcccaggttcataagctgcgagaggagcttataaatgttaatagtcagcgaaagcagcagcttgtggaattagggctgttaagagaggaggaaaaacaacgcgcaacacgggaacacgaaattgtcgtgaacaagctgaaggcggagagtgaaaagatgaagatagagctgaagaagacacatgccgctgaaacagaaatgacactggagaaagtgctgcaagacgagctcgaaaacaggtctaaccaggtcaggtgtgctgaaaagaaactgcaacataaagagttggaatctcaggagcagattacatacatcagacaggaatatgagaccaagctcaagggacttatgcccgcttccctgagacaggagctggaagatacaataagtagcttgaaatcacaggtgaatttcctccagaagcgtgcgtcaatcctgcaggaggagttgactacataccagggaagaagatag

SEQ ID NO: 317300 - DNA, 1980 bp, Artificial Sequence
  derived and/or modified sequence
caacagaaacatgatgctgatgttcagaagattttagaaagaaagaataatgaaatagaagaactgaaaactttatacaggagtaaacaacatgaaactgaagagactattagaaagcttgaaaagaaagttcagacactgatacgtgactgtcaagttatcagagagactaaagaagaccagattgcagagctgaaaaagatatgtgaacaaagtacggaatctctaaataatgactgggaaaaaaagcttcacaatgctgtagcagaaatggaacaggaaaagtttgatcttcaaaagcaacacactgaaaacattcaagaattgcttgaggatacaaatgtgcgtctgaataaaatggagagtgaatacatggcgcaaacacagtccacaaaccacatgatcaaagaactggaggcccgtgtccagcagctgactggagaagcagagaacagtaatttacagaggcagaaattaattcaagaaaaagcagaacttgaaagatgttaccagataacgtgtagtgaattacaagaagtaaaggcaaggcgtaacacactgcataaagagaaggaccatcttgtaaatgattatgagcaaaacatgaaactgttacaaaccaaatatgatgctgatataaaccttctaaaacaagaacatgctctttcagcttctaaggcatctagtatgattgaagaattagagcagaatgtctgtcaattaaaacagcagttacaggaatcagaacttcaaagaaagcaacaactaagggatcaagaaaataagtttcagatggagaaaagtcatttaaaacacatctatgaaaaaaaggctcatgacttgcagagtgaacttgataaaggaaaagaagatactcaaaagaaaattcataaatttgaggaagctttgaaggaaaaagaggagcagctaactcgtgtgactgaagttcagaggttgcaggcccagcaggcagatgccgctctggaagagtttaagcggcaggtggaactgaactcagagaaagtctatgctgaaatgaaagagcagatggaaaaagtggaggcagatctaactagatccaaatctcttcgtgagaaacaatcaaaggagtttttatggcaactggaggacatcagacagcggtatgaacaacagatagtagagctgaagctggagcatgaacaggagaagacgcacctattacagcagcataacgcagagaaggatagcctagtccgagaccatgaacgggaaattgaaaacctggaaaaacagcttcgcgctgccaatatggagcacgaaaatcaaattcaggagttcaagaaacgagatgcacaggttattgccgacatggaggcccaggttcacaagttgagagaagaattgatcaatgtgaactcacagcggaaacagcagctggtagagcttggtcttcttcgtgaagaggaaaagcaaagggctacaagggaacatgagattgtcgtcaataaactgaaggctgaatcagaaaagatgaaaatagagctgaaaaagactcatgctgctgagacagagatgacactggaaaaggttttacaagatgaattagaaaaccgttctaatcaggtgcgatgtgcagagaaaaaattacaacacaaagaattggagtcacaggaacagataacttacatacgacaagaatatgaaacaaaattgaaaggattgatgccagcatccctaagacaagaacttgaagacaccatttcctccctaaaatcacaggttaattttctgcaaaagagagcttccatccttcaggaagaactgactacatatcaaggcagaaggtaactgcacgagagaatgcaacggatgcaatttccaggctgtgctgtggacttcttccagcaggtttgaagatttggatattgtaaactgtgagatcagtggcattttttaaatccttaaatgtaattaagatcataaaaacatgcatcattc

SEQ ID NO: 317301 - DNA, 2168 bp, Artificial Sequence
  derived and/or modified sequence
gtttccctgttgccctgtgccagcactggggtagtgcccctgggctctacccccaaaaccttcccagggctctgtcccggcagttcagaggggccaggatggtggacataatcgccaaagtgaccaggaggcagagtcgagccttgccggcacaggtggacgacccaccggagcccgtgtacgcgaacatagagaggcagccccgggccacttcaccgggcgccgctgcagccccccttcccagcccggtgtgggagacgcacacggacgcgggcaccgggcgcccctactactacaacccagacacgggagttaccacctgggagtcgccctttgaggctgccgagggtgccgccagcccagccacctcccctgcctcggtggacagccacgtgagccttgagaccgagtggggccagtactgggatgaggagagccgcagggtgttcttctacaacccgctgacgggcgagacggcctgggaggacgaggccgagaacgagcccgaggaggagttggagatgcagccgggcctgagccctggcagcccaggggacccgcggccccccactcccgagacggactaccccgagtcgctgaccagttaccccgaggaggactattctcccgtgggctctttcggtgagcccggccctacctctcccttgaccacaccccccggctggtcttgtcatgtcagccaggacaagcagatgctctacaccaaccacttcactcaggagcagtgggtgaggctggaggacccccacgggaagccatacttctacaatccagaggactcctctgttcgatgggagctgccccaggtccctgtccctgcccctcgaagcatccataaatccagccaggatggtgacaccccagcccaggccagccctccagaggagaaggtcccagcagagctggatgaggttgggagctgggaggaagtctctcctgccacagctgctgtgaggaccaagaccttggacaaggcaggggtgctccatcgcaccaagacggcagacaagggaaagcggctccggaagaagcactggagtgcctcctggactgtgctggagggtggcgtcctgacattcttcaaggactcaaagacctcggctgcaggcggcctgaggcagccttccaagttttccacccctgagtacacagtggagctgaggggggccactctctcctgggcccccaaagacaaatccagtaggaagaatgtgctggagctacggagccgagatggctctgagtacctgatccagcacgactcggaggccatcatcagcacctggcataaggccattgctcagggcatccaggagctgtccgcagagctgcccccagaggagagcgagagcagcagagtggacttcgggtcgagcgagcgcttgggaagctggcaggagaaagaggaggacgcgcgaccgaatgcagccgcgcccgccctgggccccgtgggcctggagagcgacttgagcaaggtccggcacaagctccgcaagttcctccagaggcggcccacactgcagtcgctgcgggagaagggctacatcaaagaccaggtgttcggctgcgcgctggccgcgctgtgtgagcgcgagaggagccgggtgccacgcttcgtgcagcagtgcatccgcgccgtcgaggcccgcgggctggacatcgacgggctgtaccgcatcagtggaaacctggccaccatccagaagctacgctataaggtggaccacgatgagcgccttgacctggatgacgggcgctgggaggacgtccacgttatcaccggagccctgaagctcttctttcgggagctgcccgagcccctcttccccttctcgcacttccgccagttcattgcggccatcaagttgcaggaccaggcccggcgcagccgctgtgtgcgtgacttggtgcgctcgctgcccgctcccaaccacgacactctgcggatgctcttccagcacctctgccgggtgatcgagcacggcgagcagaaccgcatgtcggtgcagagcgtggccattgtgttcgggcccacgctgctgcggcccgaggtggaagagaccagcatgcccatgaccatggtgttccagaaccaggtggtggagctcatcctgcagcagtgcgcggacatcttcccgccgcactga

SEQ ID NO: 317302 - DNA, 560 bp, Artificial Sequence
  derived and/or modified sequence
gcttccagcgaacctgttccctctccccacatcccccgccctccatctcccccggctctgggacccttcccgccgacctcacccccacccccgggatggagcggctcgagcccgcccggagccccccgcggccggggtgacggtccccccacccctctcctgcccggcccccgcctcgagcaccatgggcctgaggggttcccggggcgccagacgctgaagatgaccgatgccggagatttgattggacagttgatgattgaaagcttttaggggatgctaatgatgcgaaggcccaagacagtgaaggggagaagttcagtgacccacgtgaaggcacacagcaaatcagtggaccaggataccaggaccacagggctcagcctgtgtctgtgccttggttttgcgtctgcccccaccctcctactatactgcctgccccggcgcccaccatctgggttatgattccagtggcttctcttccaggggacagaagaagggttctaagctctcttgagtcatggcttcttcaaagctccgagaacccgtggatgaagttt

SEQ ID NO: 317303 - DNA, 501 bp, Artificial Sequence
  derived and/or modified sequence
agtccccggggcgcaggcgcactcgtcgccgcggcggcgtccggggctggcgttcccctggaggctgggacagagggtctcacggatggccccgctgccaggagcagaactggttcggaggccactgcagctctaccgatacttgctgcgctgttgccagcagctgccgaccaagggcatccagcagcattacaagcatgctgtcaggcagagttttcgggttcattcagatgaagacaaccctgagagaatccagcagattattaaaagagccattgaagatgctgactggatcatgaacaaatataaaaaacaaaactgagagctccgagggtgagccttcctggcctctggaagttgagaggcccctcttctggagctcagcagcagcagctggtttggaagagccattggccttgttggctgaaagccagaaatcaggggagaagctgaccttgctccagaggctcctcttgccgcggccatgttgctagcatcctt

SEQ ID NO: 317304 - protein, 139 aa, Artificial Sequence
  derived and/or modified sequence
MAELVPFAVPIESDKTLLVWELSSGPTAEALHHSLFTAFSQFGLLYSVRVFPNAAVAHPGFYAVIKFYSARAAHRAQKACDRKQLFQKSPVKVRLGTRHKAVQHQALALNSSKCQELANYYFGFNGCSKRIIKDHYHSL

SEQ ID NO: 317305 - DNA, 420 bp, Artificial Sequence
  derived and/or modified sequence
atggccgaactggtgccatttgcagtccccattgagtctgataagactctcctggtttgggaactgtcttccggcccaaccgctgaggcactgcaccactccctgttcactgctttcagtcagttcggtctgctttattcagtgcgcgtcttccctaatgcagccgtggcacacccagggttctatgcggttatcaagttctattctgctagggctgcgcatcgcgcccaaaaggcatgtgatcggaagcaactgttccagaagtcccccgttaaagtgagacttgggacaaggcacaaggcagtccagcatcaggcccttgcccttaacagtagcaaatgccaggaactcgccaactactatttcggatttaatggctgttccaagcgtattattaaagatcattatcactcgctgtag

SEQ ID NO: 317306 - DNA, 420 bp, Artificial Sequence
  derived and/or modified sequence
atggccgagctggtgccctttgctgtgcccattgaaagtgacaagaccctgctggtgtgggagctgagcagcggccccacagctgaggccctgcaccacagcctcttcaccgccttcagccagtttggcctgctgtacagcgtgcgggtcttccccaatgctgctgtggcccaccctggcttctatgctgtgatcaagttctacagcgcccgggccgcccaccgggcccagaaggcctgtgacaggaagcagctgttccagaagagccctgtgaaggtgcggctgggcaccaggcacaaggctgtgcagcaccaggccctggccctgaacagcagcaagtgccaggagctggccaactactacttcggcttcaacggctgcagcaagaggatcatcaaggaccactaccacagcctgtag

SEQ ID NO: 317307 - DNA, 420 bp, Artificial Sequence
  derived and/or modified sequence
atggccgagctggtgcccttcgccgtgcccatcgagagcgacaagacactgctggtctgggagctgtccagcggaccgaccgcagaagctctccatcatagtttatttacagcattttctcaatttggacttctgtatagcgtgagagtttttcctaacgctgcagtagcccatcctgggttttatgccgttattaagttctacagcgcccgcgctgcgcatcgcgcccaaaaagcttgcgacagaaagcagctgtttcagaagagtcccgtgaaagttcggctgggcacaaggcataaggccgtccaacaccaggccctggcattgaacagcagtaaatgccaggagctagcaaattattattttgggtttaacggctgttcgaaaagaatcattaaagatcactatcacagcctctag

SEQ ID NO: 317308 - DNA, 420 bp, Artificial Sequence
  derived and/or modified sequence
atggccgagctggtgcccttcgcggtccccatcgaaagcgacaagactctgcttgtttgggagttgtccagtggacccaccgcagaggcgctgcatcactcactgtttacggccttttcacagtttgggctcctgtacagcgtgcgtgtgtttcccaacgctgccgtggctcatccagggttttacgctgtgattaagttctactccgcaagagctgcccaccgcgcacagaaagcctgcgaccgcaagcagttgtttcagaagagcccagtgaaagtcaggctcggcactcgccataaggcggtccagcaccaggctcttgctctgaattctagcaagtgccaagagctcgcaaattattatttcgggttcaatggttgtagtaagaggatcatcaaggatcactaccattctttgtag

SEQ ID NO: 317309 - DNA, 997 bp, Artificial Sequence
  derived and/or modified sequence
ggcgcaatgctggggcgagggttagccgcgcaggtgcggtgaagggaggatggcggagttggtaccttttgcggttcccatcgagagtgacaaaaccttgctagtgtgggagctgagctccggacccacggccgaggctttgcatcattctctgttcacagcattttctcagtttggccttctgtattcagtccgggtcttcccaaatgctgcagtggcccatcctggtttctatgccgtcattaagttttattctgcaagggctgcccacagagcccaaaaggcatgcgaccggaagcagctttttcagaaatctccagtcaaggttcgtcttggcaccagacataaggcagttcaacatcaagcccttgccctgaacagttccaaatgccaagaactggcgaattactactttggtttcaatgggtgttccaaaaggatcatcaaggaccattatcattccttatgaaaaggaagacagcccagaagcttgctattcagaaggctttgtcagatgcattccagaaactgttgattgttgttctagaaagtggtaaaatagctgtggagtacagacccagtgaagacatcgtaggtgtcagatgcgaagaagaactacacggtttaattcaagtcccttgctctccctggaagcagtatggccaagaggaggaagggtatctctcggatttcagcttggaggaggaagagttcaggctgccagaacttgactagcatttctgaatatcccaaggcgaggtcatgtaacttccttgggaagctctgtcgtgcccctaccccacgccgccccaccactataggctgctggagtcctggaaccacctgggtcggccgcccaaatctttcctggcgaaggggagggaaggggtgttctggtggagtgggaagggaggcttgggtaggattgtgggataagatcgccctggtgacgaggagcggatctcgaacggaacttaataaaggttgcctagataaa

SEQ ID NO: 317310 - DNA, 420 bp, Artificial Sequence
  derived and/or modified sequence
atggccgagctggtgcccttcgccgtgcccatcgagagcgacaagaccctgctggtgtgggagctgagcagcggccccaccgccgaggccctgcaccacagcctgttcaccgccttcagccagttcggcctgctgtacagcgtgagagtgttccccaacgccgccgtggcccaccccggcttctacgccgtgatcaagttctacagcgccagagccgcccacagagcccagaaggcctgcgacagaaagcagctgttccagaagagccccgtgaaggtgagactgggcaccagacacaaggccgtgcagcaccaggccctggccctgaacagcagcaagtgccaggagctggccaactactacttcggcttcaacggctgcagcaagagaatcatcaaggaccactaccacagcctgtag

SEQ ID NO: 317311 - DNA, 1775 bp, Artificial Sequence
  derived and/or modified sequence
gcgcccgaaaaacaagtcggtgcgctggggacccggggccggggccgccttactccggcctagccccgcggccctcggtgcgggctccagggcatgctcgggaccccccgcggctccagcccagacgccccggcctcagaaatcgcccggaaatgggagcttgcgcgaagcgctgatcggcccgctggggaagctcatggacccgggctccctgccgcccctcgactctgaagatctcttccaggatctaagtcacttccaggagacgtggctcgctgaagctcaggtaccagacagtgatgagcagtttgttcctgatttccattcagaaaacctagctttccacagccccaccaccaggatcaagaaggagccccagagtccccgcacagacccggccctgtcctgcagcaggaagccgccactcccctaccaccatggcgagcagtgcctttactccagtgcctatgacccccccagacaaatcgccatcaagtcccctgcccctggtgcccttggacagtcgcccctacagccctttccccgggcagagcaacggaatttcctgagatcctctggcacctcccagccccaccctggccatgggtacctcggggaacatagctccgtcttccagcagcccctggacatttgccactccttcacatctcagggagggggccgggaacccctcccagccccctaccaacaccagctgtcggagccctgcccaccctatccccagcagagctttaagcaagaataccatgatcccctgtatgaacaggcgggccagccagccgtggaccagggtggggtcaatgggcacaggtacccaggggcgggggtggtgatcaaacaggaacagacggacttcgcctacgactcagatgtcaccgggtgcgcatcaatgtacctccacacagagggcttctctgggccctctccaggtgacggggccatgggctatggctatgagaaacctctgcgaccattcccagatgatgtctgcgttgtccctgagaaatttgaaggagacatcaagcaggaaggggtcggtgcatttcgagaggggccgccctaccagcgccggggtgccctgcagctgtggcaatttctggtggccttgctggatgacccaacaaatgcccatttcattgcctggacgggccggggaatggagttcaagctcattgagcctgaggaggtcgccaggctctggggcatccagaagaaccggccagccatgaattacgacaagctgagccgctcgctccgatactattatgagaaaggcatcatgcagaaggtggctggtgagcgttacgtgtacaagtttgtgtgtgagcccgaggccctcttctctttggccttcccggacaatcagcgtccagctctcaaggctgagtttgaccggcctgtcagtgaggaggacacagtccctttgtcccacttggatgagagccccgcctacctcccagagctggctggccccgcccagccatttggccccaagggtggctactcttactagcccccagcggctgttccccctgccgcaggtgggtgctgccctgtgtacatataaatgaatctggtgttggggaaaccttcatctgaaacccacagatgtctctggggcagatccccactgtcctaccagttgccctagcccagactctgagctgctcaccggagtcattgggaaggaaaagtggagaaatggcaagtctagagtctcagaaactcccctgggggtttcacctgggccctgg

SEQ ID NO: 317312 - protein, 448 aa, Artificial Sequence
  derived and/or modified sequence
MDPKYFILILFCGHLNNTFFSKTETITTEKQSQPTLFTSSMSQVLANSQNTTGNPLGQPTQFSDTFSGQSISPAKVTAGQPTPAVYTSSEKPEAHTSAGQPLAYNTKQPTPIANTSSQQAVFTSARQLPSARTSTTQPPKSFVYTFTQQSSSVQIPSRKQITVHNPSTQPTSTVKNSPRSTPGFILDTTSNKQTPQKNNYNSIAAILIGVLLTSMLVAIIIIVLWKCLRKPVLNDQNWAGRSPFADGETPDICMDNIRENEISTKRTSIISLTPWKPSKSTLLADDLEIKLFESSENIEDSNNPKTEKIKDQVNGTSEDSADGSTVGTAVSSSDDADLPPPPPLLDLEGQESNQSDKPTMTIVSPLPNDSTSLPPSLDCLNQDCGDHKSEIIQSFPPLDSLNLPLPPVDFMKNQEDSNLEIQCQEFSIPPNSDQDLNESLPPPPAELL

SEQ ID NO: 317313 - DNA, 1986 bp, Artificial Sequence
  derived and/or modified sequence
atttcagtttgctagaggaacattttaaatctgaattgaaccacccattttcctttcttagccaaatcaccaaaatgtccagttagaacaagaatttagcattctgcaaaagaagttaacagctgagataacgaggaaatattctgaaatggatcccaaatatttcatcttaattttgttttgtggacacctgaacaatacatttttttcaaagacagagacaattacaacagagaagcagtcacagcctaccttattcacatcatcaatgtcacaggtattggctaattctcaaaacacaacagggaatcctttgggtcaaccaacacaattcagcgacactttttctggacaatcaatatcacctgccaaagtcactgctggacaaccaacaccagctgtctatacctcttctgaaaaaccagaagcacatacttctgctggacaaccacttgcctacaacaccaaacaaccaacaccaatagccaacacctcctcccagcaagccgtgttcacctctgccagacaactaccatctgcccgtacttctaccacacaaccaccaaagtcatttgtctatacttttactcaacaatcatcatctgtccagatcccttctagaaaacaaataactgttcataatccatccacacaaccaacatcaactgtcaaaaattcacctaggagtacaccaggatttatcttagatactaccagtaacaaacaaaccccacaaaaaaacaattataattcaatagctgccatactaattggtgtacttctgacttctatgttggtagctataatcatcattgtactttggaaatgcttaaggaaaccagttttaaatgatcaaaattgggcaggtagatctccatttgctgatggagaaacccctgacatttgtatggataacatcagagaaaatgaaatatccacaaaacgtacatcaatcatttcacttacaccctggaaaccaagcaaaagcacacttttagcagatgacttagaaattaagttgtttgaatcaagtgaaaacattgaagactccaacaaccccaaaacagagaaaataaaagatcaagtaaatggtacatcagaagatagtgctgatggttcaacagttggaactgctgtttcttcttcagatgatgcagatctgcctccaccacctccccttctggatttggaaggacaggaaagtaaccaatctgacaaacccacaatgacaattgtatctcctcttccaaatgattctactagtctccctccatctctggactgtctcaatcaagactgtggagatcataaatctgagataatacaatcatttccaccgcttgactcacttaacttgcccctgccaccagtagattttatgaaaaaccaagaagattccaaccttgagatccagtgtcaggagttctctattcctcccaactctgatcaagatcttaatgaatccctgccacctccacctgcagaactgttataaatattacaacttgctttttagctgatcttccatcctcaaatgactcttttttctttatatgttaacatatataaaatggcaactgatagtcaattttgatttttattcaggaactatctgaaatctgctcagagcctatgtgcatagatgaaacttttttttaaaaaaagttatttaacagtaatctatttactaattatagtacctatctttaaagtatagtacattttacatatgtaaatggtatgtttcaataatttaagaactctgaaacaatctacatatacttattacccagtacagttttttttcccctgaaaagctgtgtataaaattatggtgaataaacttttatgtttccatttcaaagaccagggtggagaggaataagagactaagtatatgcttcaagttttaaattaatacctcaagtattaaataaatattccaagtttgtgggaatgggagattaaaatgcatgtttgagaata

SEQ ID NO: 317314 - protein, 251 aa, Artificial Sequence
  derived and/or modified sequence
MISTTSKETKKDTKLYCICKTPYDESKFYIGCDLCTNWYHGECVGITEKEAKKMDVYICNDCKRAQEGSSEELYCICRTPYDESQFYIGCDRCQNWYHGRCVGILQSEAELIDEYVCPQCQSTEDAMTVLTPLTEKDYEGLKRVLRSLQAHKMAWPFLEPVDPNDAPDYYGVIKEPMDLATMEERVQRRYYEKLTEFVADMTKIFDNCRYYNPSDSPFYQCAEVLESFFVQKLKGFKASRSHNNKLQSTAS

SEQ ID NO: 317315 - protein, 151 aa, Artificial Sequence
  derived and/or modified sequence
RFYIGCDLCTNCYYGECVGIAEKEAKKMDVYICNDCKWAQEGSSEELYCICRTPAGSCRFFIGHDRCQNWYHGCCIGILQSEAELIDEYVCPQCQSTEDAMAVLTPLTEKDDEELKRVLCSLQTHKMAQPFLEPVDPNDAPDYYGVIKEPM

SEQ ID NO: 317316 - protein, 152 aa, Artificial Sequence
  derived and/or modified sequence
SRFYIGCDLCTNCYYGECVGIAEKEAKKMDVYICNDCKWAQEGSSEELYCICRTPAGSCRFFIGHDRCQNWYHGCCIGILQSEAELIDEYVCPQCQSTEDVMTVLTPLTEKDDEELKRVLRSLQAHKMARPFLEPVDPNDAPDYYGVIKEPV

SEQ ID NO: 317317 - DNA, 756 bp, Artificial Sequence
  derived and/or modified sequence
atgatcagcaccaccagcaaggagaccaagaaggacaccaagctgtactgcatctgcaagaccccctacgacgagagcaagttctacatcggctgcgacctgtgcaccaactggtaccacggcgagtgcgtgggcatcaccgagaaggaggccaagaagatggacgtgtacatctgcaacgactgcaagagagcccaggagggcagcagcgaggagctgtactgcatctgcagaaccccctacgacgagagccagttctacatcggctgcgacagatgccagaactggtaccacggcagatgcgtgggcatcctgcagagcgaggccgagctgatcgacgagtacgtgtgcccccagtgccagagcaccgaggacgccatgaccgtgctgacccccctgaccgagaaggactacgagggcctgaagagagtgctgagaagcctgcaggcccacaagatggcctggcccttcctggagcccgtggaccccaacgacgcccccgactactacggcgtgatcaaggagcccatggacctggccaccatggaggagagagtgcagagaagatactacgagaagctgaccgagttcgtggccgacatgaccaagatcttcgacaactgcagatactacaaccccagcgacagccccttctaccagtgcgccgaggtgctggagagcttcttcgtgcagaagctgaagggcttcaaggccagcagaagccacaacaacaagctgcagagcaccgccagctag

SEQ ID NO: 317318 - DNA, 756 bp, Artificial Sequence
  derived and/or modified sequence
atgatctccaccacttctaaagagaccaagaaagacacaaagctatactgtatctgtaaaaccccgtatgatgaaagcaaattttatatcggctgcgacctgtgcaccaattggtatcatggtgaatgcgtcgggatcactgaaaaggaagccaaaaaaatggacgtttacatatgcaacgattgcaaacgagcacaggaagggtcgagtgaagagttgtattgtatctgcaggactccctacgatgagagtcagttctatattggctgtgatagatgtcagaactggtatcacggccgctgcgtgggcatccttcaatccgaagctgaactgatcgatgaatatgtctgtcctcaatgccaaagcacagaggatgccatgaccgtgctgacgccactaaccgaaaaagattatgagggactgaagagagtgttgcgatcgctgcaggcacacaagatggcgtggccatttttggagcccgtggatcctaatgatgcccccgattactacggagtgatcaaggaacccatggacctggcgaccatggaggagagagtccagcgaaggtactatgagaagctaacggagttcgtcgcggacatgactaaaatcttcgataactgccggtattacaaccctagtgattcccccttttaccagtgcgcagaggtcctcgaaagcttcttcgtacaaaagttgaagggtttcaaagcctcccgttctcacaataacaaactgcagagtactgcctcctag

SEQ ID NO: 317319 - DNA, 756 bp, Artificial Sequence
  derived and/or modified sequence
atgatcagcaccaccagcaaggagaccaagaaggacaccaagctgtactgcatctgcaagaccccctatgatgagagcaagttctacatcggctgtgacctgtgcaccaactggtaccacggggagtgtgtgggcatcacagagaaggaggccaagaagatggatgtgtacatctgcaatgactgcaagagggcccaggagggcagcagcgaggagctgtactgcatctgcaggaccccctatgatgagagccagttctacatcggctgtgaccgctgccagaactggtaccacggccgctgtgtgggcatcctgcagagcgaggccgagctgattgatgaatatgtgtgcccccagtgccagagcacagaagatgccatgacagtgctgacccccctgacagagaaggactatgagggcctgaagagggtgctgcggagcctgcaggcccacaagatggcctggcccttcctggagcctgtggaccccaatgatgccccagactactacggcgtcatcaaggagcccatggacctggccaccatggaggagcgggtgcagaggcgctactatgagaagctgacagaatttgtggccgacatgaccaagatctttgacaactgccgctactacaaccccagcgacagccccttctaccagtgtgccgaggtgctggagagcttctttgtgcagaagctgaagggcttcaaggccagccgcagccacaacaacaagctgcagagcacagccagctag

SEQ ID NO: 317320 - DNA, 756 bp, Artificial Sequence
  derived and/or modified sequence
atgatcagcaccaccagcaaggagaccaagaaggacaccaagctgtattgcatctgcaagactccctacgatgagagcaaattctatattggttgtgacctatgcaccaactggtaccacggggaatgtgtaggtattacggagaaggaggctaaaaaaatggatgtgtacatctgcaacgattgtaaacgtgcccaagagggtagcagtgaggaactgtactgcatttgcagaacgccatacgacgaaagccaattttacatagggtgcgataggtgccagaactggtaccatggaaggtgtgtcggcatacttcagtctgaggccgagcttatcgatgagtatgtttgcccccaatgtcagtccaccgaggacgcaatgaccgtgctgacgccactaacagaaaaggactatgaaggtttgaagcgagtgctgagatcactgcaggcccataagatggcatggccttttctggagccagtcgatcctaatgacgcccccgactactacggggtgattaaagagcccatggacctcgctaccatggaggaaagagttcagagacgctactacgaaaagctgacagagtttgttgctgatatgaccaaaatcttcgacaactgtcgctactataaccctagcgattcacctttctaccagtgcgctgaggtcctagagtctttctttgtgcagaaactgaaggggtttaaagccagtcgtagccacaacaataaacttcagagtacagcgtcctag

SEQ ID NO: 317321 - DNA, 756 bp, Artificial Sequence
  derived and/or modified sequence
atgatctcaacaacttcaaaggaaacaaagaaagataccaaattgtactgtatctgcaagaccccctacgacgaatcaaaattctatattgggtgtgacctgtgtaccaattggtaccacggagagtgcgttggaattaccgaaaaggaggcaaagaaaatggatgtgtatatctgtaacgactgcaagagggcacaggagggatcctctgaagagctgtactgcatctgccgtaccccctacgatgagagtcaattttatatagggtgcgatcggtgtcaaaactggtatcatggacggtgtgtgggaatcctgcagtcagaggcagagttgatcgacgaatatgtgtgtccccagtgccagtcaactgaggacgctatgaccgtgctaaccccgttaacagagaaagattatgaaggcctcaagagggttctgcgctcgttacaggcccacaagatggcttggccatttcttgagcccgtcgaccccaacgatgcacccgactattacggtgtgatcaaagaacccatggatttagctaccatggaggagagggtccagcgaagatactatgagaaactgaccgaattcgtcgctgatatgactaagatctttgacaactgcaggtattacaaccccagcgactctcccttttaccagtgcgccgaggttctcgaatccttttttgtccagaagctgaagggttttaaggccagtcgatcccacaacaacaagttgcagagcactgctagttag

SEQ ID NO: 317322 - DNA, 177 bp, Artificial Sequence
  derived and/or modified sequence
atgcccaacagacacaagaccaaggaccagaccctgctgcccgcccagcagtacatctggctgctgaacagccacacccagatgaccgcccccgtgccccagttcaagctgagcgagaccgccagcctgctgtgcaagagaaagatcagcaccgccatgagcagcacctgcctgtag

SEQ ID NO: 317323 - DNA, 1224 bp, Artificial Sequence
  derived and/or modified sequence
atggtgctgttcagcgacagcagcctgccccactggcagcagcagcccccccagcccgccccccccccccccctgttccccagacagcagcaggtgcaggtgaacaagggcagagtgaactgccaccccagatgcagatacatcaagaccaagccctgccaccagctgagccaccaggtgtgggtgcagcagaagcccagccacagactgctgagcctgcagctgagccccagccccaagcccagccccagcccccagctgagcctgaagttcagactgagcctgaagttcagacccaagcagctgttccaccccatgagcctgctgaagcacaacccccccacccacagccaccccagccccaagctgcagcagagccagccccagagcaacgtgcagggccagagccccgtgagagtgcagagccccagccagaccagaatcagacccagcacccccagccagctgagccccggccagcagagccaggtgcagaccaccaccagccagcccatccccatccagccccacaccagcctgcagatccccagccagggccagccccagagccagccccaggtggtgatgaagcacaacgccgtgatcgagcacctgaagcagaagaagagcatgacccccgccgagagagaggagaaccagagaatgatcgtgtgcaaccaggtgatgaagtacatcctggacaagatcgacaaggaggagaagcaggccgccaagaagagaaagagagaggagagcgtggagcagaagagaagcaagcagaacgccaccaagctgagcgccctgctgttcaagcacaaggagcagctgagagccgagatcctgaagaagagagccctgctggacaaggacctgcagatcgaggtgcaggaggagctgaagagagacctgaagatcaagaaggagaaggacctgatgcagctggcccaggccaccgccgtggccgccccctgcccccccgtgacccccgccccccccgccccccccgcccccccccccagccccccccccccccccgccgtgcagcacaccggcctgctgagcacccccaccctgcccgccgccagccagaagagaaagagagaggaggagaaggacagcagcagcaagagcaagaagaagaagatgatcagcaccaccagcaaggagaccaagaaggacaccaagctgtactgcatctgcaagaccccctacgacgagagctag

SEQ ID NO: 317324 - DNA, 1224 bp, Artificial Sequence
  derived and/or modified sequence
atggttctgttctctgatagtagccttccccattggcagcagcaaccaccacagcccgcgccaccccctcccttgttccccagacagcaacaggtccaggtgaacaaaggccgagtgaactgtcaccctagatgcaggtatatcaagacgaagccctgccatcagctgtcccatcaagtctgggtgcagcagaagccgtcacacagattgctctcactgcagttgtcccctagcccgaagccttcaccgagtcctcagttgtctctcaagtttcgtctgagcctcaaattccgccccaagcagctgttccatcctatgtccttgctgaagcataatccccctacccacagtcaccctagccctaagctgcagcagtcccaacctcagtctaatgttcagggacagtcacccgtgagagttcagtccccctctcagacacggattcggccatccacaccctcccagctgtccccaggccagcagagtcaggtgcagaccacaacgtcccagccaatcccgatacagccccacacatccctgcaaattccaagtcagggccagcctcaaagccagccccaagtggtaatgaaacataacgctgtgatcgaacatctgaaacagaaaaagagtatgacaccagccgaaagagaggagaatcagagaatgatcgtttgcaaccaggtaatgaagtacattctagacaagatagataaggaagagaaacaggccgcaaaaaaacgtaaaagggaggaatccgtggagcagaaacgatccaagcagaatgctacgaagctgtcagccttgttgttcaaacataaggagcaactaagagcggagattctcaaaaagagggccctgttagataaagacctgcagatagaagtacaggaggaactaaagagggacctgaagatcaagaaggaaaaggacctgatgcagcttgcccaagcaaccgcagtcgccgccccatgcccacctgttaccccggctccgccggccccccccgcccctcccccttcccctccaccgccgcctgccgtgcaacacacagggctcttatccacccctactctgccagctgccagccaaaaaaggaagcgtgaagaagaaaaggatagcagctccaagagcaaaaagaaaaaaatgatcagtacaaccagtaaagaaacaaaaaaagacaccaaactatactgtatatgcaagacaccctatgacgaatcctag

SEQ ID NO: 317325 - DNA, 1224 bp, Artificial Sequence
  derived and/or modified sequence
atggtgctcttcagtgacagcagcctgccccactggcagcagcagcccccccagcctgcccctcctcctcctctcttcccccggcagcagcaggtgcaggtgaacaagggccgggtgaactgccacccccgctgccgctacatcaagaccaagccctgccaccagctgagccaccaggtgtgggtgcagcagaagcccagccaccggctgctgagcctgcagctgagccccagccccaagcccagccccagcccccagctgagcctgaagttccggctgagcctgaagttccggcccaagcagctgttccaccccatgagcctgctgaagcacaacccccccacccacagccaccccagccccaagctgcagcagagccagccccagagcaatgtgcagggccagagccctgtgcgggtgcagagccccagccagacccgcatccggcccagcacccccagccagctgagccctggccagcagagccaggtgcagaccaccaccagccagcccatccccatccagccccacaccagcctgcagatccccagccagggccagccccagagccagccccaggtggtgatgaagcacaatgctgtgattgagcacctgaagcagaagaagtccatgaccccagctgagcgggaggagaaccagaggatgattgtgtgcaaccaggtgatgaagtacatcctggacaagattgacaaggaggagaagcaggccgccaagaagaggaagcgggaggagagcgtggagcagaagaggagcaagcagaatgccaccaagctgagcgccctgctcttcaagcacaaggagcagctgcgggcagagatcctgaagaagagggccctgctggacaaggacctgcagatcgaggtgcaggaggagctgaagagggacctgaagatcaagaaggagaaggacctgatgcagctggcccaggccacagctgtggccgccccctgcccccctgtgaccccagcccccccagcccccccagcccccccacccagccccccacctcctcctgctgtgcagcacacaggcctgctgagcacccccaccctgcctgctgccagccagaagaggaagcgggaggaggagaaggacagcagcagcaagagcaagaagaagaagatgatcagcaccaccagcaaggagaccaagaaggacaccaagctgtactgcatctgcaagaccccctatgatgagagctag

SEQ ID NO: 317326 - DNA, 1224 bp, Artificial Sequence
  derived and/or modified sequence
atggtgctgttcagcgacagcagcctgccccactggcagcagcagcctccccagcccgccccacccccgccattgttcccacgtcaacagcaggtccaggttaacaaagggagagtcaattgccatcctcgttgccgctacatcaagaccaagccctgtcaccagctcagccatcaggtatgggtccagcagaaacctagtcatcgtctgttgtctttacagctgtcaccctcgccaaaaccatctcctagtccacagttgtctttgaagtttaggctcagcttgaaatttaggcctaagcagctgttccaccccatgtctctcctcaaacacaatccacctactcactcccatcccagtcctaaactccaacagtctcagcctcagagcaatgtccaaggccagtcccctgtcagagtccagagcccatcccagacaaggatcaggcctagtactccttctcagctgtcacctggccagcagtctcaggtccaaacgaccactagccagcctattccaatccagccgcatacttccttacaaatcccctctcagggtcagcctcagtcacaacctcaagtggtgatgaaacataatgcagttatagaacacctaaagcaaaaaaagtcgatgacacccgctgagcgggaagaaaatcagaggatgatcgtgtgtaaccaggtgatgaaatatatacttgataagatcgataaggaggagaaacaagccgcaaaaaagagaaaacgtgaagaaagtgtcgagcaaaagaggtccaagcagaatgcgaccaagctgtctgcactgctgtttaagcacaaggagcagttacgagccgaaatcctgaagaaacgcgctcttcttgacaaagacctgcagattgaagtccaagaggagttgaagagagatctgaaaatcaagaaggaaaaggaccttatgcagctggcccaggccacagccgtggccgccccctgcccacccgtaacacctgccccacctgcgcctcccgctcctcctccctccccaccacctcctcctgctgttcaacataccggcttgctttcaacacctactctccccgccgcttcacagaagcggaaacgtgaagaagagaaggatagctcctccaagtccaaaaaaaaaaagatgatctccactacctccaaggagaccaagaaggataccaagttgtactgcatctgcaaaactccctatgacgaatcttag

SEQ ID NO: 317327 - DNA, 1224 bp, Artificial Sequence
  derived and/or modified sequence
atggtactgttttcggactccagtctgccacattggcagcagcagccccctcagccagcgcctcccccaccgctgtttcctaggcaacaacaggtgcaagtcaataagggtcgagtaaactgtcaccccagatgtcgctacataaagacaaaaccttgccaccagttgagccaccaggtgtgggttcagcagaagccctcacacagactgctcagcctgcaactgagcccttccccaaagcctagcccaagcccacagctttctctgaaattccgtctctcactgaagtttagacccaagcagttgttccatcccatgtcattgctgaaacacaatccgccaactcacagtcacccttccccaaaactgcagcaatctcagccacagagcaacgtgcaggggcagtcgcctgtccgggttcagagcccgtcacaaacaaggattcggccatcaacgccctcgcagttgagcccagggcagcaatcccaggtgcagactacaacaagccagcccatccccattcaacctcataccagcctgcagatccctagccagggccaaccccaatcacagcctcaggtcgttatgaagcacaacgcggtcattgagcacctgaagcagaagaaatccatgaccccagctgagagagaggagaaccagaggatgattgtgtgtaaccaggttatgaaatacatcttggataaaatcgacaaggaggagaagcaggctgccaaaaaaaggaagagagaagagtccgtggagcagaagagaagcaagcagaacgctacaaagttgtcggctcttctcttcaaacataaagagcagcttagggccgagatactcaagaaacgggcactcctggataaagatctgcaaatagaggtccaagaagagctgaaaagggacctgaagattaagaaggagaaggacctgatgcagctggctcaggcaacagctgtggccgcaccctgccctcctgttacgcctgctccccctgctccccctgcaccgcctccatccccccctccgcctcccgctgttcagcacaccggacttctgagtaccccaaccctgcccgctgcctcacaaaaaaggaagcgggaggaggagaaggacagcagttcaaagtcgaaaaaaaaaaagatgatcagcaccacctcgaaagaaactaaaaaggacactaagctgtactgcatctgtaagaccccttacgatgagtcctag

SEQ ID NO: 317328 - DNA, 1146 bp, Artificial Sequence
  derived and/or modified sequence
atgaccacctgcaaggctggagttgttccacttgctagccaacaacacccacaggcgcatgtggatatctacgagaagcagcccgtacccttcggcttagttcgcttcggtgtcgccccggatcatccagaagtaaaaaatgtgataaacacttttacccagacggcccactccgggcggtgcgcattctggggtaatgtcgaggtgggtagagatgtgacggtgcccgaactgagagaggcctaccacgcagtggtgttgagttatggcgcggaagatcatcgggcactggagattccgggggaagagctccccggcgtgtgttcagcccgcgcttttgtggggtggtataatggtctccctgagaaccaggaactggagccagacctctcctgcgacacagccgtgattctgggccagggcaacgtggcattagacgtggctagaattctgttaacccccccagaacatctcgagcgtaccgatatcacaaaagccgctcttggagttctgcgccagtcacgggttaagactgtgtggctggtggggagacgcgggccactccaggtggccttcactataaaggaactccgggagatgatacagctccccggggcacggcctattctggatcctgtcgatttcctggggctgcaggataagataaaagaagtgcctcggccaagaaaaaggttgacagagcttctcctcaggactgctactgagaaacccgggcccgccgaggccgcgcgacaggcatcagcctcccgggcttggggcctgcggttttttcgttccccccagcaagtcctcccatcccccgacggtaggagggccgcgggcgtgcgattggctgttacccggcttgaggttagcttgatgttccttaaagacacccccttccccggtttatgtcatccaccgggagtcgcacatacattgccaaacagggtgagcatgagacccccagtgcagtgtccaagagagacatggaaaacatcactcgtgggttggtgctccgcagccctcgggatccgcgctgcactgagcactcaggcatgtcctctgaccccatcactgggctcttcaccgatgtggcgcgcaggcttatggatgtgtcaagcctccacagccgcagccggctag

SEQ ID NO: 317329 - DNA, 1146 bp, Artificial Sequence
  derived and/or modified sequence
atgaccacctgcaaggccggcgtggtgcccctggccagccagcagcacccccaggcccacgtggacatctatgagaagcagcctgtgcccttcggcctggtgcgcttcggcgtggccccagaccaccctgaggtgaagaatgtcatcaacaccttcacccagacagcccacagcggccgctgtgccttctggggcaatgtggaggtgggcagagatgtgacagtgcctgagctgcgggaggcctaccacgctgtggtgctgtcctatggagctgaggaccaccgggccctggagatccctggagaggagctgcccggggtgtgcagcgcccgggcctttgtgggctggtacaacggcctgcctgagaaccaggagctggagccagacctgagctgtgacacagctgtgatcctgggccagggcaatgtggccctggatgtggcccgcatcctgctgaccccacctgagcacctggagaggacagacatcaccaaggccgccctgggcgtgctgcggcagagccgggtgaagacagtgtggctggtgggccggcggggccccctgcaggtggccttcaccatcaaggagctgcgggagatgatccagctgcccggggcccggcccatcctggaccctgtggacttcctgggcctgcaggacaagatcaaggaggtgccccggcccaggaagaggctgacagagctgctgctgaggacagccacagagaagccaggccctgctgaggccgcccggcaggccagcgccagccgggcctggggcctgcgcttcttccgcagcccccagcaggtgctgcccagcccagatggaagaagagctgctggggtgcggctggccgtgacccggctggaggtgtccctgatgttcctgaaggacacccccttccctggcctgtgccaccccccaggagtggcccacaccctgcccaacagagtgtccatgaggcctcctgtgcagtgcccccgggagacctggaagaccagcctggtgggctggtgcagcgctgccctgggcatccgggccgccctgagcacccaggcctgccccctgacccccagcctgggcagcagccccatgtggagggctggcctgtggatgtgccaggccagcacagctgctgctggatag

SEQ ID NO: 317330 - DNA, 1146 bp, Artificial Sequence
  derived and/or modified sequence
atgaccacctgcaaggccggcgtggtgcccctggccagccagcagcacccgcaggcacacgtggatatttatgagaagcagcctgtgccattcgggttagtccggttcggagtagcccccgaccatccagaagtcaagaacgttatcaacacctttacacagaccgcacactcaggccggtgcgcgttttgggggaatgtcgaggtggggcgggacgtgactgtgccagagctgcgggaggcatatcacgccgttgtcttgagttacggagcagaggaccacagggctttggaaattcccggggaggaacttcctggcgtctgcagcgctagggcctttgttggctggtacaatggccttcccgagaaccaggagctagagcctgatctttcatgtgacacagccgtgatactagggcagggcaatgtggcccttgacgtcgcaaggattctcctcactccccccgagcatctggagcgaaccgacataaccaaggccgctttgggtgtgttgagacagtcccgagtgaagacagtatggttggtgggacggagaggaccgttgcaggttgccttcaccattaaagagctgcgagaaatgattcagctccctggagccaggccaattctcgatccagttgatttcctgggacttcaggacaaaatcaaagaagtcccacggcccagaaagcgactgaccgagttgctgctccgaacggcgaccgaaaagccgggaccggctgaggccgcccggcaggcctcagccagtcgggcctggggtcttaggttcttcagatcgcctcagcaggtcctcccttcgcccgacggacggcgagcagccggagtgcgattggccgtcacgcgcttagaggtgtcactcatgttcctcaaggacaccccctttccaggactgtgccatcctcccggcgttgcccataccctgcccaaccgcgtatcgatgcggccccccgtgcagtgccctcgagaaacttggaagacttcactcgttgggtggtgtagcgctgccctcggtattcgcgccgcccttagtacacaggcctgtccactgactccaagcctaggttcgagtcctatgtggcgggcagggctgtggatgtgccaggcctctacagctgccgccggatag

SEQ ID NO: 317331 - DNA, 1146 bp, Artificial Sequence
  derived and/or modified sequence
atgaccacttgtaaagcaggtgtggttccattggcttctcaacagcacccgcaggcccatgtagacatctatgagaaacaaccagtgcctttcggcttggtgcgctttggggtagctcccgaccacccggaggtcaagaacgttattaatacgtttacccagacagcccactctggcagatgcgccttctggggtaacgtcgaggtcggccgagatgtgaccgtgcctgagctcagagaagcataccatgccgtggttctgagttatggggcagaggaccaccgcgcactggaaattcctggagaagagctcccgggtgtatgctctgcacgagcttttgtcggctggtataatgggctccccgaaaatcaggagttggaaccagatctgtcgtgcgatactgcggtaattctggggcagggtaacgtcgccctggatgtggcgcgaatcctgctgacgccaccagaacacctagagagaaccgacatcaccaaagcagcccttggagttctcaggcaaagtcgcgtcaagactgtgtggctggttggcaggaggggcccacttcaagtggcttttactatcaaggaactgagggagatgatccagcttccaggagcacggcctatcctggatccagtagatttcctgggtctccaggacaaaatcaaagaggtgccaaggccaagaaagcgtctaacagagttgttactgcgcaccgccacggagaaacctgggcctgcagaggccgctcgccaggcaagcgctagccgcgcatggggtttaagattcttcaggagtccgcaacaggtgctgccgtcacccgacggccgaagagctgcaggcgtgcgactggccgtgacaaggctcgaggtgtccttgatgttcctcaaggatactcccttcccaggtctgtgccatcccccaggggtggcacacaccctgcctaacagagtatcaatgcgcccaccagtgcagtgtccaagagagacatggaaaacctctctggtgggttggtgttctgccgcattgggcattcgtgctgcgttatcaacgcaagcctgtccactgaccccctcactggggtcctcgcctatgtggagagccggtctgtggatgtgtcaagcttctacggccgcagcagggtag

SEQ ID NO: 317332 - DNA, 1146 bp, Artificial Sequence
  derived and/or modified sequence
atgaccacctgcaaggccggcgtggtgcccctggccagccagcagcacccccaggcccacgtggacatctacgagaagcagcccgtgcccttcggcctggtgagattcggcgtggcccccgaccaccccgaggtgaagaacgtgatcaacaccttcacccagaccgcccacagcggcagatgcgccttctggggcaacgtggaggtgggcagagacgtgaccgtgcccgagctgagagaggcctaccacgccgtggtgctgagctacggcgccgaggaccacagagccctggagatccccggcgaggagctgcccggcgtgtgcagcgccagagccttcgtgggctggtacaacggcctgcccgagaaccaggagctggagcccgacctgagctgcgacaccgccgtgatcctgggccagggcaacgtggccctggacgtggccagaatcctgctgaccccccccgagcacctggagagaaccgacatcaccaaggccgccctgggcgtgctgagacagagcagagtgaagaccgtgtggctggtgggcagaagaggccccctgcaggtggccttcaccatcaaggagctgagagagatgatccagctgcccggcgccagacccatcctggaccccgtggacttcctgggcctgcaggacaagatcaaggaggtgcccagacccagaaagagactgaccgagctgctgctgagaaccgccaccgagaagcccggccccgccgaggccgccagacaggccagcgccagcagagcctggggcctgagattcttcagaagcccccagcaggtgctgcccagccccgacggcagaagagccgccggcgtgagactggccgtgaccagactggaggtgagcctgatgttcctgaaggacacccccttccccggcctgtgccacccccccggcgtggcccacaccctgcccaacagagtgagcatgagaccccccgtgcagtgccccagagagacctggaagaccagcctggtgggctggtgcagcgccgccctgggcatcagagccgccctgagcacccaggcctgccccctgacccccagcctgggcagcagccccatgtggagagccggcctgtggatgtgccaggccagcaccgccgccgccggctag

SEQ ID NO: 317333 - protein, 381 aa, Artificial Sequence [sequence omitted]

SEQ ID NO: 317334 - protein, 1083 aa, Artificial Sequence
  derived and/or modified sequence
MKGTRAIGSVPERSPAGVDLSLTGLPPPVSRRPGSAATTKPIVRSVSVVTGSEQKRKVLEATGPGGSQAINNLRRSNSTTQVSQPRSGSPRPTEPTDFLMLFEGSPSGKKRPASLSTAPSEKGATWNVLDDQPRGFTLPSNARSSSALDSPAGPRRKECTVALAPNFTANNRSNKGAVGNCVTTMVHNRYTPSERAPPLKSSNQTAPSLNNIIKAATCEGSESSGFGKLPKNVSSATHSARNNTGGSTGLPRRKEVTEEEAERFIHQVNQATVTIQRWYRHQVQRRGAGAARLEHLLQAKREEQRQRSGEGTLLDLHQQKEAARRKAREEKARQARRAAIQELQQKRALRAQKASTAERGPPENPRETRVPGMRQPAQELSPTPGGTAHQALKANNTGGGLPAAGPGDRCLPTSDSSPEPQQPPEDRTQDVLAQDAAGDNLEMMAPSRGSAKSRGPLEELLHTLQLLEKEPDVLPRPRTHHRGRYAWASEVTTEDDASSLTADNLEKFGKLSAFPEPPEDGTLLSEAKLQSIMSFLDEMEKSGQDQLDSQQEGWVPEAGPGPLELGSEVSTSVMRLKLEVEEKKQAMLLLQRALAQQRDLTARRVKETEKALSRQLQRQREHYEATIQRHLAFIDQLIEDKKVLSEKCEAVVAELKQEDQRCTERVAQAQAQHELEIKKLKELMSATEKARREKWISEKTKKIKEVTVRGLEPEIQKLIARHKQEVRRLKSLHEAELLQSDERASQRCLRQAEELREQLEREKEALGQQERERARQRFQQHLEQEQWALQQQRQRLYSEVAEERERLGQQAARQRAELEELRQQLEESSSALTRALRAEFEKGREEQERRHQMELNTLKQQLELERQAWEAGRTRKEEAWLLNREQELREEIRKGRDKEIELVIHRLEADMALAKEESEKAAESRIKRLRDKYEAELSELEQSERKLQERCSELKGQLGEAEGENLRLQGLVRQKERALEDAQAVNEQLSSERSNLAQVIRQEFEDRLAASEEETRQAKAELATLQARQQLELEEVHRRVKTALARKEEAVSSLRTQHEAAVKRADHLEELLEQHRRPTPSTK

SEQ ID NO: 317335 - DNA, 3252 bp, Artificial Sequence
  derived and/or modified sequence
atgaaaggaacgagggccattgggtctgtgccagagcggagccccgctggtgtcgatctctcattgaccggcttaccccctccagtctcacgccggccggggtccgctgccaccaccaaacccatagtccgatccgtctcagtcgttaccggttccgagcagaagaggaaggtgctggaagcaaccgggcctggtggatcacaggcaatcaataacctcaggaggtcaaactcaacaacccaggtgagtcagcctcggagcggaagtccccgacccaccgagccaacagattttttgatgctcttcgagggttctccatcaggcaaaaaacgaccggcctccctgtctacagcccccagcgaaaagggagccacctggaacgtgctggacgatcagccccggggatttactctcccatcaaacgcgcggtcctcatctgccctggatagccctgcaggtcccagaagaaaggagtgcactgtggccctcgcacccaattttaccgcaaacaaccgcagtaataagggggctgtcggaaactgcgtgactactatggtgcacaatcggtataccccttccgaaagagcacctccccttaaatcttccaatcagaccgctccatctctcaataacattatcaaggccgcaacctgtgagggcagtgagtctagcggttttggcaagcttcctaaaaacgtgagctccgctacccattccgcaagaaacaacactggcgggagcacaggactgccccggaggaaagaagtaaccgaagaagaggcagaaagattcatacaccaggtgaatcaagctacagtcaccatccaacgctggtatcggcaccaggttcagcgaagaggggcgggcgccgcgcgcctggaacaccttctgcaggccaaacgtgaagaacagcgccagaggagcggcgaaggaacactgctggacctgcaccagcaaaaggaggcggccagacgcaaggctcgggaggaaaaggccagacaagcccgaagggcagctatccaggagttgcaacagaaacgcgcactgagagctcagaaggcttctaccgccgagcggggtcctccagagaatcctagagaaacccgcgttcctggcatgagacagccggcacaagaactgagccccacacccggagggacagcgcaccaggccctgaaagctaataataccggcgggggactgcctgccgcaggtccaggagacaggtgcttacctacatctgattcatcaccagaaccccaacagcctccagaggataggacccaggatgtccttgctcaggacgctgccggagacaacttagagatgatggccccctcacggggcagcgcgaagagccgggggcccttggaggagctgctccacactttacagttgctcgaaaaagaacccgatgttctgccccgcccccgcactcaccaccgaggcagatacgcatgggccagtgaggttactaccgaggacgacgctagttcgctcactgcagacaacctcgaaaagtttggcaaattgagtgcattcccagagcctcccgaagacgggacactactttccgaagctaagctgcagagcataatgtccttcttagatgagatggagaagtcgggccaggatcagttggattctcagcaagagggctgggtacccgaggcggggcccgggcctctggagctcggctcagaggtttctacaagtgtgatgaggcttaagttggaagtcgaagagaaaaaacaggccatgctgctcttgcagagagctttggcgcagcagagggacctcaccgccagacgcgttaaggagaccgaaaaggccttgtcgcggcagctccagaggcagcgagaacactacgaggcgactattcagagacatctggcctttattgatcaactaatagaagacaagaaggtcttaagtgaaaaatgtgaggcggtggtggctgagctgaagcaggaagaccagaggtgtactgaaagagtggcccaagcacaggcacagcacgaattagagattaagaagcttaaggaactgatgtccgccaccgaaaaggcccggagagagaagtggatcagtgaaaagactaagaagatcaaggaggttaccgtaagaggacttgagcctgagatccagaaactgatagctcgccataagcaggaggtaagaaggctgaagtcacttcacgaagctgagctgttgcagtccgacgagagggcaagtcagcggtgccttagacaggccgaggagctgcgcgagcagctggaaagagaaaaggaagcgcttggccagcaggagcgagagcgcgcgcgccaacgttttcagcagcaccttgaacaggagcaatgggccctgcagcagcaaaggcagagactgtacagtgaggtggctgaagaacgggagcgactaggtcagcaggcggcccggcagcgggccgagctggaagagctgagacagcaactagaggagagtagcagtgccctgacccgcgctctgagggctgaattcgaaaaaggacgcgaggagcaagaaaggaggcaccagatggagttgaacactcttaagcaacagctcgagctggagagacaggcatgggaagctggtaggacccggaaggaagaagcatggctgctgaaccgggagcaagagctgcgtgaggaaattagaaaggggcgtgacaaggaaatcgagcttgtgatccaccgactggaagccgatatggcacttgctaaagaagagagcgaaaaggccgcagagtctaggatcaaaagactgagggacaagtacgaagcagagctatccgagttggaacagtctgagaggaagttgcaggagaggtgtagcgaactgaaaggacaacttggggaagcagaaggggaaaacctgaggcttcaaggactcgtcaggcaaaaggaaagagcacttgaggacgcccaggcagttaacgagcaactgagcagcgagcgtagcaatttagctcaagtgatccgacaggaatttgaggatcgactcgcggcctcagaggaagagactcgacaggctaaggccgaactggccaccctgcaggcccgtcagcagctggaattggaagaggtgcatcgccgcgtgaaaaccgccttggcccgaaaggaggaagccgtgtctagcttacggacccagcatgaagcggccgtcaagcgtgccgaccatctagaggaactgctggagcagcatcggcgcccgacccccagcactaaatag

SEQ ID NO: 317336 - DNA, 3252 bp, Artificial Sequence
  derived and/or modified sequence
atgaagggcacccgggccatcggctctgtgcctgagaggagccctgctggggtggacctgagcctgaccggcctgcccccacctgtgtccagaagacctggcagcgctgccaccaccaagcccatcgtgcgctctgtgtctgtggtgacaggcagcgagcagaagaggaaggtgctggaggccaccggccctgggggcagccaggccatcaacaacctgcggcgcagcaacagcaccacccaggtgtcccagcccaggagcggcagcccccggcccacagagcccacagacttcctgatgctgtttgagggcagccccagcggcaagaagaggcctgccagcctgagcacagcccccagcgagaagggggccacctggaatgtgctggatgaccagccccggggcttcaccctgcccagcaatgcccggagcagcagcgccctggacagccctgctggccccaggaggaaggagtgcaccgtggccctggcccccaacttcaccgccaacaacagaagcaacaagggagctgtgggcaactgtgtgaccaccatggtgcacaaccgctacaccccatctgagcgggccccacccctgaagagcagcaaccagacagcccccagcctgaacaacatcatcaaggccgccacctgtgagggcagcgagagcagcggctttgggaagctgcccaagaatgtgtcctctgccacccacagcgccaggaacaacacaggaggcagcacaggcctgcccaggaggaaggaggtgacagaggaggaggccgagcgcttcatccaccaggtgaaccaggccaccgtgaccatccagcgctggtaccgccaccaggtgcagaggagaggagctggggccgcccggctggagcacctgctgcaggccaagcgggaggagcagaggcagaggtctggagagggcaccctgctggacctgcaccagcagaaggaggccgcccggaggaaggcccgggaggagaaggcccggcaggcccggcgggccgccatccaggagctgcagcagaagagggccctgcgggcccagaaggccagcacagctgagcggggccccccagagaacccccgggagaccagggtgcccggcatgaggcagcctgcccaggagctgagccccacccctgggggcacagcccaccaggccctgaaggccaacaacacaggaggcggcctgcctgctgctggccctggggaccgctgcctgcccaccagtgacagcagccctgagccccagcagcccccagaggacaggacccaggatgtgctggcccaggatgctgctggggacaacctggagatgatggcccccagccggggcagcgccaagagccggggccccctggaggagctgctgcacaccctgcagctgctggagaaggagccagatgtgctgccccggcccaggacccaccaccggggccgctatgcctgggccagcgaggtgaccacagaagatgatgccagcagcctgacagctgacaacctggagaagtttgggaagctgagcgccttccctgagcccccagaagatggcaccctgctgtctgaggccaagctgcagagcatcatgtccttcctggatgagatggagaagagcggccaggaccagctggacagccagcaggagggctgggtgcctgaggccggccctggccccctggagctgggcagcgaggtgtccacctctgtgatgaggctgaagctggaggtggaggagaagaagcaggccatgctgctgctgcagagggccctggcccagcagagggacctgacagccaggagagtgaaggagacagagaaggccctgagccggcagctgcagaggcagcgggagcactatgaggccaccatccagaggcacctggccttcatcgaccagctgattgaggacaagaaggtgctgtctgagaagtgtgaggccgtggtggccgagctgaagcaggaggaccagcgctgcacagagcgggtggcccaggcccaggcccagcacgagctggagatcaagaagctgaaggagctgatgtctgccacagagaaggcccggcgggagaagtggatcagcgagaagaccaagaagatcaaggaggtgacagtgcggggcctggagcctgagatccagaagctgattgcccggcacaagcaggaggtgcggcggctgaagagcctgcatgaagctgagctgctgcagagtgatgagcgggccagccagcgctgcctgcggcaggccgaggagctgcgggagcagctggagcgggagaaggaggccctgggccagcaggagcgggagcgggcccggcagcgcttccagcagcacctggagcaggagcagtgggccctgcagcagcagaggcagaggctgtacagcgaggtggccgaggagcgggagcggctgggccagcaggccgcccggcagagagctgagctggaggagctgcggcagcagctggaggagagcagcagcgccctgacccgggccctgcgggcagagtttgagaagggccgggaggagcaggagaggaggcaccagatggagctgaacaccctgaagcagcagctggagctggagcggcaggcctgggaggccggccgcaccaggaaggaggaggcctggctgctgaaccgggagcaggagctgcgggaggagatcaggaagggccgggacaaggagattgagctggtgatccaccggctggaggccgacatggccctggccaaggaggagagcgagaaggctgctgagagccgcatcaagaggctgcgggacaagtatgaagctgagctgtctgagctggagcagagcgagaggaagctgcaggagcgctgcagcgagctgaagggccagctgggggaggccgagggggagaacctgcggctgcagggcctggtgcggcagaaggagcgggccctggaggatgcccaggccgtgaatgagcagctgagcagcgagaggagcaacctggcccaggtgatccggcaggagtttgaagatcggctggccgccagcgaggaggagacccggcaggccaaggccgagctggccaccctgcaggcccggcagcagctggagctggaggaggtgcaccggcgggtgaagacagccctggccaggaaggaggaggccgtgagcagcctgcggacccagcacgaggccgctgtgaagagagctgaccacctggaggagctgctggagcagcaccggcggcccacccccagcaccaagtag

SEQ ID NO: 317337 - DNA, 3252 bp, Artificial Sequence
  derived and/or modified sequence
atgaagggcacccgggccatcggcagcgtgcccgagcggagccccgctggggtggacctgtccttgaccggattgcctccccccgtctcaaggaggcctgggtctgcagccacgacaaagccaatcgtccggagtgtgtccgtggtcaccggttcagaacagaaacggaaagtactggaggcgactggccccggggggtcccaggctatcaacaatttgaggcgctccaattccacaacgcaggtgtcacagccaagatccgggagtccacgcccaacagagcctacagattttctcatgctgttcgagggctctcccagcggaaagaaaaggcccgcctcacttagcacagccccatcagaaaagggcgctacatggaatgtgctggacgatcagccaagggggtttacacttccctctaacgctaggagtagtagcgcccttgattcacctgcaggcccacgacggaaagagtgcacagtggccctggcacccaacttcacagccaataaccgctctaacaagggggctgtgggcaactgtgtaaccaccatggtacacaacagatatactccaagtgagagagccccaccgctcaagtcaagcaaccagaccgctccctcactcaataacattataaaagccgccacttgcgaaggcagtgagtcctccggattcggaaagctcccaaagaacgtttcttctgcaacccacagcgcccgaaacaacactggcggatccacaggccttccccggcgaaaggaggtgaccgaggaggaggccgagcggttcatacatcaagtcaaccaagcaaccgtaacaatacaacgttggtaccggcatcaagtgcagaggcgtggggcaggtgcggccaggttggagcatctgttacaagcaaagcgggaggagcagagacagcgcagtggcgagggcacattattagaccttcatcaacagaaagaggccgcccggaggaaggcaagggaagagaaggcgaggcaggcgaggcgggccgcaattcaggagcttcagcaaaaacgagccttaagggcccagaaggctagcactgccgagcgtggaccccctgagaatccgcgggaaacgagggttccggggatgcgccagccagcccaggagctgtctccaacccctggtggtactgcccaccaggctctaaaggccaataacaccgggggtggattgcctgccgctggacctggcgacaggtgcttaccaacatccgactcatcaccagagcctcagcagccccctgaggataggacccaggacgttctagcccaagatgccgctggcgacaacctagagatgatggctccttccagaggatccgctaaatccagaggaccgctcgaagaattactccatacactccagcttctggaaaaggaaccggacgtcttaccgagaccaagaactcatcacagaggacggtacgcctgggccagcgaggtgaccactgaggatgacgcttcctctctgactgcggataatctcgagaagtttggcaagctatctgcatttcccgagccgcccgaagatggcacccttctgtctgaagccaagctccagagcatcatgtctttcctagacgaaatggagaaaagcggtcaggatcagctggattcccagcaagaaggatgggttccagaggccgggcccggtccactggagctcggatccgaggtttcaacttccgtgatgagactcaagcttgaggtggaggaaaaaaaacaagcgatgctattgctccagcgggcgctagcccagcagcgggatctgacagctcggcgggtcaaagagactgagaaggcactgtctcggcaactacaaagacaacgggaacactatgaggcgacaattcagcgtcatctggcatttattgaccagctgatcgaggataagaaagtcctctccgagaagtgcgaagccgtcgtggcagagctgaagcaggaagaccagagatgtacggagagggtggctcaggcacaggctcagcacgaactcgagattaagaagctgaaagagctcatgtccgctacggaaaaagcccggcgcgaaaagtggatttcagagaagaccaaaaaaataaaagaggtaacggtgagaggacttgagcccgagatccagaagttaattgccaggcataaacaggaggttcgcaggctgaagtcactgcatgaggcagagcttttgcagtcagatgaacgtgcgagtcagcgatgcctgcgccaggcagaagaactgagggaacagttggagagggaaaaggaagcactgggccaacaagagcgagagagagcacgccagcgcttccagcagcatctggagcaagagcagtgggcactgcagcagcagcggcagcgattatacagcgaagtggctgaggagcgagagcgtctggggcagcaggccgcccgccagcgtgcagagctcgaagaacttcgacagcaattggaagaatcttcctctgccctgactcgtgcactccgcgccgagtttgaaaagggccgggaggaacaggaaaggagacatcaaatggaactgaataccctgaaacagcagctggagctggaaagacaggcttgggaggccggacgaaccaggaaagaagaggcttggcttcttaatagggagcaagaactacgggaggaaatccgcaaaggcagggataaggagatcgaacttgtgattcaccgcctcgaagcagatatggccctcgcaaaagaagagtccgagaaggcggcggagtctagaattaagagactgagggataaatacgaggccgagctgagtgagctggaacaatccgagcggaagctgcaagaaaggtgcagcgaattgaagggacagctgggtgaggcagagggcgagaacctccggctccagggtctagtccgccaaaaggagcgggccttggaggacgcccaagctgtgaatgagcaacttagctcagaacgttcgaatttggcacaggtcatacgacaagaattcgaggatcgacttgccgccagtgaagaggagacccgtcaggcgaaggcagaactggcgactctccaggcccggcagcagttggagcttgaggaggtccacagacgtgtcaagactgctcttgcccggaaggaggaagccgtgtcaagcctgagaactcagcatgaggccgcggtgaaaagagccgaccacctggaggagctgctggaacagcacaggaggcccaccccctcaacgaagtag

SEQ ID NO: 317338 - DNA, 3252 bp, Artificial Sequence
  derived and/or modified sequence
atgaaaggcactagggcgattggttcggttcctgaacgctcaccagcaggggttgatttgtccctcacaggcctgccacctcctgtgtctagacgtcctggatctgcagccactacaaagccaattgtccggtccgtctccgtggtgacgggtagcgagcagaaacgcaaagttctcgaagcaaccggaccaggcggaagccaggccattaataacctaagacggtctaactccaccacacaggtatcccagccccgttccggatcccccaggcccacagagcccacagattttctgatgttatttgagggaagtccatccggcaagaagcgacccgcttcactaagcacagccccttccgagaaaggcgcaacttggaacgtgctggacgatcagccaagaggatttacattgccatcaaatgctagatccagctctgcattggacagccccgcaggacccaggaggaaggagtgtactgtcgccctggcgccaaattttacagccaataataggtctaataaaggcgctgtgggcaactgcgtcacgaccatggtacacaacaggtatactccgagcgagagagcacccccactgaagagttcaaaccagaccgcaccatctttaaataacattataaaggcggcaacttgtgagggctccgagagctctggtttcggaaaattgccaaaaaatgtaagctcggcaactcatagcgcaaggaataatactggaggatctaccggcttacctcgtaggaaagaggtgaccgaggaggaggcagagagatttattcaccaagtcaaccaggccacagtgaccatccagagatggtatcgccatcaggtccagaggagaggcgcaggagcagctcgactggagcatctgcttcaggccaagcgggaggaacaacgacaacgctccggagaaggcactctgctggatttgcatcagcagaaagaggctgcacgaaggaaagccagggaggagaaggcacgtcaggccaggcgggctgctatccaggaactgcagcaaaaacgggctctgcgtgcacagaaagcatccactgcagaacgcggaccccctgaaaatcccagggaaacccgagtgcccggtatgcggcaacccgctcaggaactgagtcccacgccaggagggaccgcccatcaggccctaaaagccaataacactggaggaggtctgcccgcagccggaccgggtgatcgttgcctgcctacgtctgactcgtcccccgagccccagcagcccccagaggaccggacgcaggatgtactcgctcaggacgccgctggtgacaatctggaaatgatggccccatctcggggatccgccaagtcgcggggtcccctggaggaattgctgcatacactccagttgctggaaaaggagccagacgtgctcccacggcctaggactcaccaccgcggtcgctatgcgtgggctagcgaagtgactacagaggatgatgcatcctcactcaccgctgacaatctggaaaaatttggcaaactctcagctttccctgaaccacccgaagatggaaccttactgagcgaggctaaattgcaaagcatcatgtcctttctcgatgaaatggagaagtcaggccaggaccagctagactcgcaacaggaagggtgggtgcccgaagccggacctggccctctggagctgggatcggaggtcagcactagtgttatgcggctaaagcttgaggtcgaggagaaaaaacaggccatgctgttgctccagcgcgctttagcgcagcagagggatctcaccgctcggagagtcaaagagaccgagaaggccctgtctagacagctacaacgtcagcgggaacattacgaggcaactatccaaaggcatttggcatttattgatcagcttatagaagacaagaaggtgcttagcgagaagtgtgaggcagttgtagcggagctgaaacaggaagatcaacggtgcactgaaagggtggctcaggcccaggcccagcatgagcttgaaatcaaaaagttaaaagaactcatgagtgccaccgagaaggcacgcagggagaaatggatcagcgagaagaccaaaaagatcaaggaggtaacggtgcggggacttgaaccggaaattcagaagctcatcgccaggcacaagcaggaggtccgtcgcctgaaaagcctccatgaggctgaactgcttcaaagcgatgaaagagcttctcaaagatgtctgaggcaggcagaggagttgagggaacagttagagcgggagaaagaggctctcggacagcaggagcgggaaagggcacggcagcgcttccagcaacacctcgaacaggagcagtgggcgctgcagcagcagcgccaaagactctacagcgaggtggcggaagaacgggagcgtcttggacaacaggcagcgagacaacgagctgagttggaggaactcagacagcaactggaggaaagctcctccgctcttacacgggcattaagagccgaattcgaaaaaggtcgagaggagcaggagcggaggcatcagatggaattgaatactctcaagcagcagctggaactggaaagacaggcgtgggaggcgggaagaacacgtaaggaagaagcttggctgctgaatagggagcaggagcttagagaggagatccggaaaggcagagacaaggagattgaactggtgattcaccgtctagaagctgacatggctctcgccaaggaagagtccgagaaagccgcagagtctaggatcaagcgtcttcgtgacaagtacgaggcagagctgtccgaacttgaacagagcgagcgtaaactacaggagagatgctctgagctgaaaggccagctgggtgaagcagaaggtgagaacttacgactacagggcttggtgcggcaaaaggaacgcgctctcgaggacgcccaggcagttaacgagcagttgtcttccgaacggtcaaacttagcccaagtaattaggcaagaattcgaggatcgcttagctgccagtgaagaagagactcgccaagccaaagcggagcttgctactctgcaagccagacaacagctagagctggaggaagtacaccggcgagtgaagacagctctagccaggaaggaggaggccgtgtcctcactgagaacgcaacatgaagccgctgttaagcgcgctgatcacctggaagaactgctggaacagcaccgcaggcccacaccttcaacaaagtag

SEQ ID NO: 317339 - DNA, 3673 bp, Artificial Sequence
  derived and/or modified sequence
gacgggctggggaggtggtgccaggctggttgctagctgccgccgctgctcaccccggccgtccggccgcttcattgtcaccgggcctcggggcagtgttgggggtggcggggcgccaggtcgccgacccgaggtttgggcgcgactggttccgcatcccctccccgccggccgaatctgcaggccccgcgcgccaggcaggcttcgcggctgcgcccccggcccgcgcaggacctgccttgtccaccatgaaaggcacccgggccatcggcagcgtcccggagcgcagcccagcaggtgtggacctgagtctgacaggtctccctccgcctgtgtcccggcgtcctggcagtgccgccaccaccaagcccatcgtccgctctgtctccgtggtcacaggcagcgagcagaagaggaaggtgctggaggccacagggcctgggggctcccaggccatcaacaaccttagaagatccaacagcaccacgcaggtcagccagcctcggagcggctcccccaggccaacggagcccacagacttcctgatgctcttcgagggcagccccagtgggaaaaagaggcctgccagcctgagcacagcccccagcgagaagggagccacctggaacgtcctggatgaccagccccggggcttcaccttgccatccaatgcccggagttccagtgcccttgactcaccagcgggcccgcggaggaaagaatgcaccgtggccctggcccccaacttcactgctaacaacaggagcaacaagggagcagtgggcaactgcgtcaccaccatggtgcacaaccgctacaccccctcggagagggcgcctccgctcaagagctccaaccagactgccccctccctcaacaacatcatcaaggcagccacctgtgagggcagtgagagcagcggctttgggaagctgccgaagaatgtctccagtgccacccactcagcccggaacaatactgggggcagcacgggcttgcccaggcggaaggaggtgacggaggaggaggctgagaggtttatccaccaggtgaaccaggccactgtcaccatccagcgctggtaccggcaccaggtgcagcggcgcggagcaggagctgcccgcctggagcacttgcttcaggccaagcgggaggagcagcggcagcggtcaggcgaggggaccctcttggacctgcaccagcagaaagaggcagccaggaggaaggcccgggaggagaaggcacgccaagccaggcgagcagccattcaggagctgcaacagaaacgagccctgagagcccagaaggcgagcactgccgagcgtgggccacctgagaatcccagggagaccagagtgccaggaatgcggcagcctgctcaggagctgtcccccacaccaggcggcactgcccaccaggccctcaaggccaacaatactggtggtggcctccctgctgcaggccccggagaccgctgcctgcccacctccgactcatccccagaaccacagcagcctccagaggacaggacgcaggacgttcttgcccaggatgcagctggggacaacctggagatgatggccccgagcagggggagcgccaagtccagggggccactggaggagctgctgcacacactgcagctgctggagaaggagccggacgtgctgccccgccccaggacccatcacaggggcagatacgcctgggccagcgaggtgaccacggaggatgacgccagctctctgacagctgacaacttggagaaatttggaaaactcagtgcgttccccgaacctcctgaggatgggacgctgctatcggaggccaagctacaaagcatcatgagcttcttggacgagatggagaagtctgggcaggaccagctggactcccagcaggaggggtgggtgccggaggcggggccggggcccctggagctggggtccgaggtgagcacgtctgtgatgcggctgaagctggaggtggaggagaagaagcaggccatgctgctgctgcagagagcgctggcgcagcagcgagacctcacggcccggcgggtcaaggagacagagaaggcgctgagccggcagctgcagcggcagagggagcactacgaggccaccatccagcggcacttggccttcattgaccagctgattgaggacaagaaggtcctgagtgaaaagtgcgaggctgtggtggccgagctgaagcaggaggaccagagatgcaccgagcgtgtggcccaggcacaggcgcagcacgagctggagattaaaaaactcaaagaattaatgagcgccaccgagaaagcccgccgggagaagtggatcagtgagaaaaccaagaagatcaaggaggtcactgtccgaggtctggagcccgagatccagaagctgattgcaaggcacaagcaggaagtgcggaggctcaagagcctgcacgaggcggagctgctgcagtcggatgagcgggcctcgcagcgctgcctgcgccaggccgaggagctgcgggagcagctggagcgggagaaggaggcgctgggccagcaggagcgcgaacgtgctcggcagcggttccagcagcacctggagcaggagcagtgggcgctgcagcagcaacggcagcggctgtacagtgaggtggctgaggagagggagcggctgggccagcaggcagccaggcagcgggcggagctggaagagctgaggcagcagctggaggagagcagctctgcactgacccgagccctgagggctgagtttgagaagggcagggaggagcaggagcgccggcaccagatggagctgaataccctgaagcagcagctggagctggagaggcaggcgtgggaggccggccgcaccaggaaggaggaggcgtggctgctgaaccgggaacaggagctgagggaagaaatccggaaaggccgggacaaggagattgagctggtcattcaccggctggaggccgacatggcgctggccaaggaggagagtgagaaggctgccgagagccgcatcaagcgcttacgggacaagtacgaggccgagctctccgagctggagcagtcggagcggaagcttcaggagcggtgctcggagctgaagggccagcttggggaggccgagggcgagaatctgcgtctgcagggccttgtgcggcagaaggagcgggcgctggaggatgcgcaggcggtgaacgagcagctttctagcgagcgcagcaacctggcccaggtgatccgccaggagttcgaggaccggctggcagcctctgaggaggagacgcggcaggccaaggccgagctggccacgctgcaggcccgccagcagctggagctggaggaggtgcaccggagggtgaagacagccctcgcgaggaaggaggaggccgtgagcagcctccggacacaacatgaggctgcggtgaagcgggccgaccacctggaggagctgctggagcagcacaggaggcccacgccaagtaccaagtgaccagggatgccgggaacactgtcgaagaacggaaggcagaggacagaggctggacgtgggcccagaggcccacagggacgcccacctgccccccacagaggctggtggttgagatgcccacggctaagcacctgtggctgcattttaacagtaaaggaggccgttgttttcag

SEQ ID NO: 317340 - DNA, 3252 bp, Artificial Sequence
  derived and/or modified sequence
atgaagggcaccagagccatcggcagcgtgcccgagagaagccccgccggcgtggacctgagcctgaccggcctgcccccccccgtgagcagaagacccggcagcgccgccaccaccaagcccatcgtgagaagcgtgagcgtggtgaccggcagcgagcagaagagaaaggtgctggaggccaccggccccggcggcagccaggccatcaacaacctgagaagaagcaacagcaccacccaggtgagccagcccagaagcggcagccccagacccaccgagcccaccgacttcctgatgctgttcgagggcagccccagcggcaagaagagacccgccagcctgagcaccgcccccagcgagaagggcgccacctggaacgtgctggacgaccagcccagaggcttcaccctgcccagcaacgccagaagcagcagcgccctggacagccccgccggccccagaagaaaggagtgcaccgtggccctggcccccaacttcaccgccaacaacagaagcaacaagggcgccgtgggcaactgcgtgaccaccatggtgcacaacagatacacccccagcgagagagccccccccctgaagagcagcaaccagaccgcccccagcctgaacaacatcatcaaggccgccacctgcgagggcagcgagagcagcggcttcggcaagctgcccaagaacgtgagcagcgccacccacagcgccagaaacaacaccggcggcagcaccggcctgcccagaagaaaggaggtgaccgaggaggaggccgagagattcatccaccaggtgaaccaggccaccgtgaccatccagagatggtacagacaccaggtgcagagaagaggcgccggcgccgccagactggagcacctgctgcaggccaagagagaggagcagagacagagaagcggcgagggcaccctgctggacctgcaccagcagaaggaggccgccagaagaaaggccagagaggagaaggccagacaggccagaagagccgccatccaggagctgcagcagaagagagccctgagagcccagaaggccagcaccgccgagagaggcccccccgagaaccccagagagaccagagtgcccggcatgagacagcccgcccaggagctgagccccacccccggcggcaccgcccaccaggccctgaaggccaacaacaccggcggcggcctgcccgccgccggccccggcgacagatgcctgcccaccagcgacagcagccccgagccccagcagccccccgaggacagaacccaggacgtgctggcccaggacgccgccggcgacaacctggagatgatggcccccagcagaggcagcgccaagagcagaggccccctggaggagctgctgcacaccctgcagctgctggagaaggagcccgacgtgctgcccagacccagaacccaccacagaggcagatacgcctgggccagcgaggtgaccaccgaggacgacgccagcagcctgaccgccgacaacctggagaagttcggcaagctgagcgccttccccgagccccccgaggacggcaccctgctgagcgaggccaagctgcagagcatcatgagcttcctggacgagatggagaagagcggccaggaccagctggacagccagcaggagggctgggtgcccgaggccggccccggccccctggagctgggcagcgaggtgagcaccagcgtgatgagactgaagctggaggtggaggagaagaagcaggccatgctgctgctgcagagagccctggcccagcagagagacctgaccgccagaagagtgaaggagaccgagaaggccctgagcagacagctgcagagacagagagagcactacgaggccaccatccagagacacctggccttcatcgaccagctgatcgaggacaagaaggtgctgagcgagaagtgcgaggccgtggtggccgagctgaagcaggaggaccagagatgcaccgagagagtggcccaggcccaggcccagcacgagctggagatcaagaagctgaaggagctgatgagcgccaccgagaaggccagaagagagaagtggatcagcgagaagaccaagaagatcaaggaggtgaccgtgagaggcctggagcccgagatccagaagctgatcgccagacacaagcaggaggtgagaagactgaagagcctgcacgaggccgagctgctgcagagcgacgagagagccagccagagatgcctgagacaggccgaggagctgagagagcagctggagagagagaaggaggccctgggccagcaggagagagagagagccagacagagattccagcagcacctggagcaggagcagtgggccctgcagcagcagagacagagactgtacagcgaggtggccgaggagagagagagactgggccagcaggccgccagacagagagccgagctggaggagctgagacagcagctggaggagagcagcagcgccctgaccagagccctgagagccgagttcgagaagggcagagaggagcaggagagaagacaccagatggagctgaacaccctgaagcagcagctggagctggagagacaggcctgggaggccggcagaaccagaaaggaggaggcctggctgctgaacagagagcaggagctgagagaggagatcagaaagggcagagacaaggagatcgagctggtgatccacagactggaggccgacatggccctggccaaggaggagagcgagaaggccgccgagagcagaatcaagagactgagagacaagtacgaggccgagctgagcgagctggagcagagcgagagaaagctgcaggagagatgcagcgagctgaagggccagctgggcgaggccgagggcgagaacctgagactgcagggcctggtgagacagaaggagagagccctggaggacgcccaggccgtgaacgagcagctgagcagcgagagaagcaacctggcccaggtgatcagacaggagttcgaggacagactggccgccagcgaggaggagaccagacaggccaaggccgagctggccaccctgcaggccagacagcagctggagctggaggaggtgcacagaagagtgaagaccgccctggccagaaaggaggaggccgtgagcagcctgagaacccagcacgaggccgccgtgaagagagccgaccacctggaggagctgctggagcagcacagaagacccacccccagcaccaagtag

SEQ ID NO: 317341 - protein, 43 aa, Artificial Sequence
  derived and/or modified sequence
MADRFSRFNEDRDFQGNHFDQYEEGHLEIEQASLDKPIESSCF

SEQ ID NO: 317342 - DNA, 132 bp, Artificial Sequence
  derived and/or modified sequence
atggccgatcgcttcagtaggtttaatgaggacagggactttcaagggaaccactttgatcagtacgaagagggccatcttgagattgaacaggccagtctggataagccaattgaaagcagttgcttttag

SEQ ID NO: 317343 - DNA, 132 bp, Artificial Sequence
  derived and/or modified sequence
atggctgaccgcttcagccgcttcaatgaagatcgggacttccagggcaaccactttgaccagtatgaggagggccacctggagattgagcaggccagcctggacaagcccatcgagagcagctgcttctag

SEQ ID NO: 317344 - DNA, 132 bp, Artificial Sequence
  derived and/or modified sequence
atggccgaccggttcagccggttcaacgaggaccgggacttccaggggaatcacttcgatcagtacgaggagggtcatcttgagatcgaacaggcttcacttgacaaaccgatcgaaagctcgtgcttttag

SEQ ID NO: 317345 - DNA, 132 bp, Artificial Sequence
  derived and/or modified sequence
atggccgatagatttagcagatttaatgaagatagggacttccaaggaaaccattttgatcagtatgaagaaggacacttagagatcgagcaggctagcttagacaagcccattgagtcctcttgcttctag

SEQ ID NO: 317346 - DNA, 132 bp, Artificial Sequence
  derived and/or modified sequence
atggccgacagattcagcagattcaacgaggacagagacttccagggcaaccacttcgaccagtacgaggagggccacctggagatcgagcaggccagcctggacaagcccatcgagagcagctgcttctag

SEQ ID NO: 317347 - protein, 153 aa, Artificial Sequence
  derived and/or modified sequence
MAEAEGESLESWLNKATNPSNRQEDWEYIIGFCDQINKELEGPQIAVRLLAHKIQSPQEWEALQALTVLEACMKNCGRRFHNEVGKFRFLNELIKVVSPKYLGDRVSEKVKTKVIELLYSWTMALPEEAKIKDAYHMLKRQAFSQAAEKQKPR

SEQ ID NO: 317348 - DNA, 976 bp, Artificial Sequence
  derived and/or modified sequence
gaagccgcggggccgggcggctgcaatatggcggaggcggaaggggaaagcctggagtcctggctcaataaagccaccaatccttccaaccgccaggaggactgggaatacataattggcttctgtgatcagatcaacaaggagctggaagggccacagatcgccgtccgactgctggcccacaagatccagtccccacaggaatgggaggcgctccaggccctgacggtgctggaggcatgcatgaagaactgtgggaggagatttcataacgaagtggggaagttccgctttttgaatgagttaatcaaagtcgtctctccaaagtacctgggggacagggtgtctgagaaagtgaagaccaaggttattgagctgctgtacagctggaccatggccctgccagaagaagcaaagatcaaagacgcctaccacatgctgaagagacaggcttttagccaagctgctgaaaagcaaaaacccagatgacctgcaggaggccaacaagctcatcaagtccatggtgaaggaagacgaggcacggatccagaaggtgaccaagcgtctgcacacgttagaggaagttaacaacaacgtgagactgctcagtgagatgctgcttcattacagccaggaggactcttcggacggggacagagagctgatgaaggagctgtttgatcagtgtgagaacaagaggcggactttatttaaactcgccagtgagactgaggacaatgataacagtttgggggacatcctgcaagccagtgacaacctctcccgggtcatcaactcttacaaaacaattattgaagggcaggtcatcaatggcgaggtggctaccttaaccctgcctgactcggaaggaaacagtcagtgcagtaaccaaggcacgctcatcgaccttgcggagctggacacgaccaacagtttgtcctccgtgttggccccagcacctactccaccctcctca

SEQ ID NO: 317349 - DNA, 852 bp, Artificial Sequence
  derived and/or modified sequence
atgatccccccccaggaggccagcgccagaagaagagagatcgaggacaagctgaagcaggaggaggagaccctgagcttcatcagagacagcctggagaagagcgaccagctgaccaagaacatggtgagcatcctgagcagcttcgagagcagactgatgaagctggagaacagcatcatccccgtgcacaagcagaccgagaacctgcagagactgcaggagaacgtggagaagaccctgagctgcctggaccacgtgatcagctactaccacgtggccagcgacaccgagaagatcatcagagagggccccaccggcagactggaggagtacctgggcagcatggccaagatccagaaggccgtggagtacttccaggacaacagccccgacagccccgagctgaacaaggtgaagctgctgttcgagagaggcaaggaggccctggagagcgagttcagaagcctgatgaccagacacagcaaggtggtgagccccgtgctgatcctggacctgatcagcggcgacgacgacctggaggcccaggaggacgtgaccctggagcacctgcccgagagcgtgctgcaggacgtgatcagaatcagcagatggctggtggagtacggcagaaaccaggacttcatgaacgtgtactaccagatcagaagcagccagctggacagaagcatcaagggcctgaaggagcacttccacaagagcagcagcagcagcggcgtgccctacagccccgccatccccaacaagagaaaggacacccccaccaagaagcccgtgaagagacccggcgagccccccagctggcccatcagcgccaccgccagaggctag

SEQ ID NO: 317350 - DNA, 852 bp, Artificial Sequence
  derived and/or modified sequence
atgattcctccccaagaagcctccgcacggcgaagagagattgaggacaagctgaaacaggaggaggagacgctgtcctttattcgcgattcgctagagaaaagcgatcaattaacgaagaacatggtgtcgattctgtcttccttcgagtcgcggcttatgaaactcgagaattccataatcccagtgcacaagcagacggagaatctacagcgcctgcaagagaatgttgaaaagaccctgtcctgcctggaccacgttatatcttactatcacgtggcgagtgacactgaaaagatcatccgcgaaggtccaacgggtaggttggaggaatatttggggagcatggcgaagatccaaaaggctgtcgagtatttccaggacaattctcccgacagcccagagctcaacaaggtgaagcttctctttgagcgcggtaaagaggccctagaaagcgagttcagaagcctgatgaccaggcattccaaagttgtgagccccgtgctcattctcgacttaatcagcggcgacgacgatctggaagcccaggaggatgtcaccctggagcatctcccagagtccgtgttgcaggacgtgattcggatatctcggtggctggtggaatacggacgcaaccaagatttcatgaatgtctattaccagatccgctcaagccagctggataggagtatcaagggccttaaagagcactttcacaagagctccagttcaagtggggtgccctattctccggctatacccaacaagcggaaagacacccctaccaagaaaccagtgaaacgcccaggggagccccctagctggcccatcagtgccactgcacgcggatag

SEQ ID NO: 317351 - DNA, 852 bp, Artificial Sequence
  derived and/or modified sequence
atgatccccccccaggaggccagcgccaggagaagagaaattgaggacaagctgaagcaggaggaggagaccctgtccttcatccgggacagcctggagaagagtgaccagctgaccaagaacatggtgtccatcctgagcagctttgagagccggctgatgaagctggagaacagcatcatccctgtgcacaagcagacagagaacctgcagaggctgcaggagaatgtggagaagaccctgagctgcctggaccacgtgatctcctactaccacgtggccagtgacacagagaagatcatccgggagggccccaccggccgcctggaggagtacctgggctccatggccaagatccagaaggctgtggagtacttccaggacaacagcccagacagccctgagctgaacaaggtgaagctgctgtttgagcggggcaaggaggccctggagagcgagttccgcagcctgatgaccaggcacagcaaggtggtgtcccctgtgctgatcctggacctgatctctggagatgatgacctggaggcccaggaggatgtgaccctggagcacctgcctgagagcgtgctgcaggacgtcatccgcatcagccgctggctggtggagtatggaagaaaccaggacttcatgaatgtgtactaccagatccgcagcagccagctggacaggagcatcaagggcctgaaggagcacttccacaagagcagcagcagcagtggagtgccctacagccctgccatccccaacaagaggaaggacacccccaccaagaagcctgtgaagaggcctggagagccccccagctggcccatcagcgccacagcccggggctag

SEQ ID NO: 317352 - DNA, 852 bp, Artificial Sequence
  derived and/or modified sequence
atgatccccccccaggaggccagcgcccggcggcgggagatcgaggacaagctcaaacaggaagaggaaacactgagttttatacgcgactccttggagaagtcagaccaactgaccaagaatatggtcagcattctcagtagcttcgaaagtcgactaatgaaactagaaaatagtataatccctgtgcacaaacagacggagaacctgcagcgtctgcaggaaaacgttgaaaaaaccctgagctgcctagatcacgtgatctcttattaccatgtggcgagcgataccgagaaaatcatcagagaaggtcccactggccgactggaggaatacctggggtccatggccaaaatccaaaaggccgttgaatatttccaggataattcccccgactctcccgagctgaacaaagttaagctcttatttgaaagggggaaagaggcactcgaatccgagtttcgttccctgatgacccgccactctaaagtggtctcacccgtcctaattctggacttaatcagcggagacgacgatctagaggcacaggaagatgtgaccctggagcacctgcccgagagcgttttacaggacgtgatcagaatctcaaggtggttggttgaatacgggcggaaccaagatttcatgaacgtgtattatcagatcaggtcatctcagctggacagatcaattaagggactgaaggagcacttccacaagagctcaagctcaagtggcgtcccttattcccccgcgatccccaataaaaggaaagacactccgacaaagaaacccgtgaagcgccctggggagccgcctagctggcccatttctgcaacggcaaggggctag

SEQ ID NO: 317353 - DNA, 2958 bp, Artificial Sequence
  derived and/or modified sequence
gggcccgcggaggaaagatactggggagtgggagccgcggggttcagagcgatgattcccccacaggaggcatccgctcgacggcgggagattgaggacaagctgaagcaggaggaggagactctgtccttcatccgagacagcctggagaagagcgaccagctcactaagaacatggtgtctatcttatcatcctttgagagccgccttatgaagctggagaactccatcatccctgtgcacaagcagacggagaatctgcagcggctgcaggagaatgttgagaagacgctgtcctgcctggaccatgtcatcagctactaccatgtggccagtgacactgagaagatcatcagagagggccccacaggtaggctggaagagtacctgggaagcatggccaagattcagaaggcagtggagtatttccaggacaacagcccagacagcccggaactcaacaaagtgaaactgctctttgagcgcgggaaggaggccctggagtccgaatttcgcagcctgatgacgcggcacagtaaggtcgtctcgcccgtgctcatcttggatctgatcagtggtgacgatgatctggaggcccaggaggacgtgaccctggagcacctgcccgagagcgtgctccaggatgtcattcgcatctcccgctggctggtggaatatggccgcaaccaagatttcatgaacgtctactaccagatacgctccagccagctggaccgctccatcaaaggactgaaggagcatttccataagagcagttcttcctctggggttccctactcccctgctatccccaacaagaggaaagacacacctaccaagaagccagtcaagcggccaggtgagcccccatcctggcccatctctgcaacagccagaggctgactgggactgtactgctttagtccaatctagcgttcgcagcgtcaggcccctccagagcttgtcgtcgtggtaaccccgactgtaggtacacaggacagaaagcaagtgtctacccacccagtgaagccccccaagagcaagactcttccttccagctagcagagcctggggttacacagcttctttggagtaggggagtaacacaggtgctcagcgaatcccgcctgaggcagagcccctgcctaggcctcctccctcacacacacgtcgccctgtcagaaggccaggcacactactgcagccaggatgctgggatagcaaggggataggtgctccaaccttcaccttccagaaaggcagggtgatctgaagtgacgtgtagctgagagctggatggggagaatttcactttcccagttgatccagaaaggaaagaaaccccagagcatcctctcggaagaacttaaactggctttgggctccagtgcgagcgagtgacttgtggaaaggggcaccatgatgagaggccggggccggtgggtgttgctgtcctgggtgaacatctcgtcatctgtctgttctttctccccggcatcatatcccttatagtctgtgctccaggtaaacagtgtctctgccagccacagcttggcaagcccggctatgtctggccactgagagatgctgcccgcagctcgatgatgtgctgggatgttctggggtggggctgctgagattgcactgaaaaagaaagctggagaagccggggctgctcccacccaggctggccccctgtccagctgctgctgtgggcacatgccctagttgtggcctgtggcacctgcttatgacaacaagctttgggtagagcttacttacacccttggtttctccagtccctgcctgctcatgcccctcagagagtgaggtgtctgttccacaagagcacccgctcccctgcaggcctttgtttagggtttggagaaacaggcagagcaggggctgccctcagggagtagagcattagggagctggtgcctggggccttctccctccagtgtggaaatcctgcccaccagccaaaacctgctgcaaatggggactgccagcccagcctgtgggcgcagctgcctgcacagtggatggagcagctctgtgccttctgtgtggtggggagtggctgtctctatgaggctgctaggatgcttgggccccagccagtctgtgcttgcttcctcttctgcctggctccctgacaggtcccccagaagccccagagccctatttgcactgccttaagagtgcccgctggccatgcagctacctggcctttcaggcaggagggatctgatctcaggtggctcacagtggaccacatccatccttgggccagagacactagaggaaaactccagctgtggggtttcagagttgtcaggaactggtgggctcaggaccgatgtcaggctctagggagtcaggctctggggatgtcggttcccacttctgaggagagggacagggaggcctcccaggtggtgaagcaccgacctcagcatccctggaggcaattgggagcctgacgggtttggcggctgctagatccacatcggcgacccacatcctgccggcgtgcacctgcgtctgtgtctgctcctggtgggttgtggggcaggaatcagattcactcattagtaagccgcactcgctgaaggggagagcatgagcaagggagacgtgagccaggccttggttattaggagctaattatgggccaagtatggtggctcacgcctgtaatcctagcacttcgggaggccgaggcgggcggatcacctgaggtcaggagttcgagaccagcctggccaacatggtgaaaccctgtctctactaaaaatagaaaaaaaattagttgggtgtggtgacgcacgcctataatcccagctacctgggaggctgaggcaggagaatcacttgaacccaggaggcagaggttgcagtgagccgaggtcgtgccaccgtactccagcctgggcgacagagtgagactgtctc

SEQ ID NO: 317354 - DNA, 852 bp, Artificial Sequence
  derived and/or modified sequence
atgatacctccccaggaagcgtccgctagacggagagaaattgaagacaaactcaagcaggaggaagagaccctgtcttttatccgcgactccctcgaaaaatcagatcaattaaccaaaaacatggtaagcattctgtcctcatttgaatctcggctgatgaagcttgagaattcaattatccccgtccataaacagacagagaacctgcaaagactgcaagagaacgtagagaagactttgtcatgcctggatcatgtcatctcttactatcacgtagcctccgacacagaaaagatcatccgggaaggtccaacgggcagactcgaagaatatctgggctccatggctaaaatacagaaggcagtggagtatttccaggacaactccccagattctcctgaacttaacaaggttaagctcctcttcgagagaggtaaggaggcattggagtcagagtttaggtcactgatgacacggcactccaaagtggtatctcctgtacttatcctcgacttgattagtggcgacgatgatctcgaagctcaggaagatgtgacactagaacaccttccagagtccgtcctgcaggacgtgatccggatctcacgatggctcgtcgagtatggtcgcaaccaagactttatgaacgtctattatcagatccgatcctctcagttggatcgaagtatcaagggactcaaggaacattttcacaaaagctctagcagttcaggcgttccatacagccctgcaatacccaataagagaaaagatacacctaccaagaagccagtcaagcgcccaggggaaccgccatcctggccaatctccgccacagccaggggatag

SEQ ID NO: 317355 - DNA, 720 bp, Artificial Sequence
  derived and/or modified sequence
atgagctacgaccacgtggagctgaccttcaacgacatgaagaacgtgcccgaggccttcaagggcaccaagaagggcaccgtgtacctgaccccctacagagtgatcttcctgagcaagggcaaggacgccatgcagagcttcatgatgcccttctacctgatgaaggactgcgagatcaagcagcccgtgttcggcgccaactacatcaagggcaccgtgaaggccgaggccggcggcggctgggagggcagcgccagctacaagctgaccttcaccgccggcggcgccatcgagttcggccagagaatgctgcaggtggccagccaggccagcagaggcgaggtgcccagcggcgcctacggctacagctacatgcccagcggcgcctacgtgtaccccccccccgtggccaacggcatgtacccctgcccccccggctacccctaccccccccccccccccgagttctaccccggcccccccatgatggacggcgccatgggctacgtgcagccccccccccccccctaccccggccccatggagccccccgtgagcggccccgacgtgcccagcacccccgccgccgaggccaaggccgccgaggccgccgccagcgcctactacaaccccggcaacccccacaacgtgtacatgcccaccagccagccccccccccccccctactacccccccgaggacaagaagacccagtag

SEQ ID NO: 317356 - DNA, 720 bp, Artificial Sequence
  derived and/or modified sequence
atgagttatgaccatgtagagctgacttttaacgatatgaagaacgttccagaagccttcaaagggaccaaaaagggaacagtatacctcacaccatacagagtaatctttctcagcaagggcaaggacgccatgcagagctttatgatgcccttttacctaatgaaggattgtgaaattaaacagcccgtgtttggcgctaattacataaagggaaccgtcaaggcggaggcaggcggcgggtgggagggctccgcaagttataaattgacattcactgcgggtggagcaattgagttcggccagaggatgctccaggtggcaagccaggccagccgaggtgaagtgcctagcggagcctatggttacagctatatgcccagcggcgcatacgtgtacccaccgccagtggccaatggcatgtacccgtgccccccaggatatccgtatcctcctccacccccagagttctatcctggccctcctatgatggacggggcaatgggatacgttcaaccaccaccaccaccgtaccctgggcccatggaaccacctgtgtccgggcccgatgtcccatcgactcccgcagctgaggccaaggcagcagaggcagctgcttcagcctattacaaccctggcaatccacataatgtgtacatgcctacctcccaacctcccccccccccatattatccccccgaggacaagaagactcagtag

SEQ ID NO: 317357 - DNA, 720 bp, Artificial Sequence
  derived and/or modified sequence
atgtcctatgaccacgtggagctgaccttcaatgacatgaagaatgtgcctgaggccttcaagggcaccaagaagggcaccgtgtacctgaccccctacagagtcatcttcctgagcaagggcaaggatgccatgcagagcttcatgatgcccttctacctgatgaaggactgtgagatcaagcagcctgtgtttggagccaactacatcaagggcaccgtgaaggccgaggccggcggcggctgggagggcagcgccagctacaagctgaccttcaccgctgggggcgccatcgagtttggccagaggatgctgcaggtggccagccaggccagcagaggagaggtgcccagcggggcctacggctacagctacatgcccagcggggcctacgtgtacccacctcctgtggccaacggcatgtacccctgccccccaggctacccctacccacctcctcctcctgagttctacccaggcccccccatgatggatggagccatgggctacgtgcagcccccacctccaccctacccaggccccatggagccccctgtgtctggcccagatgtgcccagcaccccagctgctgaggccaaggctgctgaggccgccgccagcgcctactacaaccctggcaacccccacaacgtgtacatgcccaccagccagcccccacctccaccctactacccacctgaggacaagaagacccagtag

SEQ ID NO: 317358 - DNA, 720 bp, Artificial Sequence
  derived and/or modified sequence
atgagctacgaccacgtggagctgaccttcaacgacatgaagaacgttccggaagcgttcaagggtacgaagaaagggacagtgtacctgaccccctaccgcgtgatctttctgtcaaagggcaaggatgccatgcagtccttcatgatgccattttatctcatgaaggactgtgagattaagcaacccgtgtttggggccaattacatcaaaggcactgttaaagccgaggcaggcggtggctgggaggggagtgcgagctacaagctgaccttcacagctggcggagcaattgagtttgggcaacggatgctgcaggtcgcttcacaggcctctcgaggggaagtacccagtggtgcctacggttactcttatatgccatcgggcgcctacgtgtatccaccaccagttgccaacggcatgtatccctgtccacccggctacccttatcctcccccccctccagaattttatcccggaccccctatgatggacggagccatgggatacgtgcagccgcctccaccgccctatcccggcccgatggagccacctgtctccggccctgacgtgccaagtactcccgccgccgaagctaaggccgcagaagccgccgctagtgcttattataacccaggaaaccctcacaacgtgtacatgccaacgagtcagccccccccgcccccctactatccccccgaggacaagaagacccagtag

SEQ ID NO: 317359 - DNA, 720 bp, Artificial Sequence
  derived and/or modified sequence
atgagttatgatcacgtggagctgactttcaacgacatgaagaatgtgcccgaggcatttaagggaacgaaaaaaggtaccgtttacctgactccctaccgggttatcttcctgagcaaaggaaaggatgccatgcagtcctttatgatgcctttctacttaatgaaggactgtgagattaagcagccagttttcggggctaactacataaaggggactgtgaaggccgaagcaggcggtggttgggagggatctgctagctacaagctgacctttacagctgggggtgctattgagtttggtcagagaatgctgcaagtcgcatcccaggcctcccggggtgaagtgccaagtggagcctatggttactcctatatgcctagcggggcttacgtgtatccaccccctgttgctaacgggatgtacccatgtccacctggttacccgtacccaccgcctccacccgagttctatcccggtcccccaatgatggacggtgccatgggatatgtgcaaccaccgcctcccccttatccgggacctatggagccacccgtgtccgggccagacgttccgagtacccctgctgccgaagccaaggctgcggaggctgccgcatccgcctactacaaccctggaaacccccacaatgtgtacatgcccacaagtcaacctccaccgcctccctattacccacctgaggataaaaagacgcagtag

SEQ ID NO: 317360 - protein, 216 aa, Artificial Sequence
  derived and/or modified sequence
MALNKNHSEGGGVIVNNTESILMSYDHVELTFNDMKNVPEAFKGTKKGTVYLTPYRVIFLSKGKDAMQSFMMPFYLMKDCEIKQPVFGANYIKGTVKAEAGGGWEGSASYKLTFTAGGAIEFGQRMLQVASQEFYPGPPMMDGAMGYVQPPPPPYPGPMEPPVSGPDVPSTPAAEAKAAEAAASAYYNPGNPHNVYMPTSQPPPPPYYPPEDKKTQ

SEQ ID NO: 317361 - DNA, 630 bp, Artificial Sequence
  derived and/or modified sequence
atggccctgaacaagaaccacagcgagggcggcggcgtgatcgtgaacaacaccgagagcatcctgatgagctacgaccacgtggagctgaccttcaacgacatgaagaacgtgcccgaggccttcaagggcaccaagaagggcaccgtgtacctgaccccctacagagtgatcttcctgagcaagggcaaggacgccatgcagagcttcatgatgcccttctacctgatgaaggactgcgagatcaagcagcccgtgttcggcgccaactacatcaagggcaccgtgaaggccgaggccggcggcggctgggagggcagcgccagctacaagctgaccttcaccgcccccatgagcccccccctgctgcagcccaagcccagaccccagaagcagccccccgcccccatcaccacccaggccatcgccagcagaagacacctgcccaccacccacagaaagatcgaggaccccgtgggcccccccgccagcctgccccccaccctgatcagcctgccctaccccagccacagaggctgcgccggcgcctggggcggcgagggcgccccctgcagccccagcagaagcgaccacaagcagctgcccggcaccagcatcgtgggccactag

SEQ ID NO: 317362 - DNA, 651 bp, Artificial Sequence
  derived and/or modified sequence
atggccctgaacaagaaccacagcgagggcggcggcgtgatcgtgaacaacaccgagagcatcctgatgagctacgaccacgtggagctgaccttcaacgacatgaagaacgtgcccgaggccttcaagggcaccaagaagggcaccgtgtacctgaccccctacagagtgatcttcctgagcaagggcaaggacgccatgcagagcttcatgatgcccttctacctgatgaaggactgcgagatcaagcagcccgtgttcggcgccaactacatcaagggcaccgtgaaggccgaggccggcggcggctgggagggcagcgccagctacaagctgaccttcaccgccggcggcgccatcgagttcggccagagaatgctgcaggtggccagccaggagttctaccccggcccccccatgatggacggcgccatgggctacgtgcagccccccccccccccctaccccggccccatggagccccccgtgagcggccccgacgtgcccagcacccccgccgccgaggccaaggccgccgaggccgccgccagcgcctactacaaccccggcaacccccacaacgtgtacatgcccaccagccagccccccccccccccctactacccccccgaggacaagaagacccagtag

SEQ ID NO: 317363 - DNA, 630 bp, Artificial Sequence
  derived and/or modified sequence
atggcattgaacaaaaaccactctgagggcggtggggtaatcgtcaacaacaccgagtccatactgatgagttatgaccacgtagaattaaccttcaatgatatgaaaaatgtgccagaggcattcaaaggaacaaaaaagggaacagtttatcttacaccatacagggtaatcttcctcagcaagggcaaggacgctatgcagtctttcatgatgcctttctacttgatgaaagattgcgagatcaagcagcccgtcttcggcgccaactatataaaaggaactgtcaaggctgaggctggcggtgggtgggagggctccgcctcatacaagctgacctttacagctccaatgtcaccgcctctcctgcagcccaaaccaagaccccagaagcagcctccagctccgattacaactcaggccatcgccagccgacgacatctgcctacgactcaccggaaaatagaggaccccgtgggtccccccgcgagtctgcctccaacgctgatctcactcccatatcctagccaccgcggttgtgctggggcatgggggggcgagggggccccttgcagcccatcgcgatcagaccacaaacagcttccaggcacttccattgtcggccattag

SEQ ID NO: 317364 - DNA, 651 bp, Artificial Sequence
  derived and/or modified sequence
atggctctcaacaaaaaccactcggaaggcgggggcgtgattgtgaacaatacagaatctattctgatgagctatgaccacgtcgagctcacattcaacgatatgaaaaacgtgcctgaagccttcaaaggcacgaagaaaggaactgtgtacctgacaccttatcgagtgatctttttatctaagggtaaggacgccatgcagtcctttatgatgccattctatctgatgaaagactgcgaaatcaagcagcccgttttcggcgcaaattacataaaaggtaccgtgaaggccgaagccggggggggttgggagggatccgctagttataaactgacgttcactgccggaggagcgatcgagttcggccagcgtatgctgcaagtggcttctcaagagttttaccccggtcccccgatgatggatggagccatggggtacgttcaaccacctcctcccccctaccctgggcccatggagcctccagtaagcggtccagatgtcccatccaccccagccgccgaagcaaaggcagccgaagccgccgcatctgcttactacaacccgggcaacccccacaacgtttacatgcctacttctcaaccccctcctcctccatattatcctcctgaagataaaaagacccaatag

SEQ ID NO: 317365 - DNA, 630 bp, Artificial Sequence
  derived and/or modified sequence
atggccctgaacaagaaccacagcgagggcggcggcgtcatcgtgaacaacacagagagcatcctgatgtcctatgaccacgtggagctgaccttcaatgacatgaagaatgtgcctgaggccttcaagggcaccaagaagggcaccgtgtacctgaccccctacagagtcatcttcctgagcaagggcaaggatgccatgcagagcttcatgatgcccttctacctgatgaaggactgtgagatcaagcagcctgtgtttggagccaactacatcaagggcaccgtgaaggccgaggccggcggcggctgggagggcagcgccagctacaagctgaccttcaccgcccccatgagcccccccctgctgcagcccaagccccggccccagaagcagcccccagcccccatcaccacccaggccatcgccagcagaagacacctgcccaccacccacaggaagattgaggaccctgtgggccccccagccagcctgccccccaccctcatcagcctgccctaccccagccaccggggctgtgccggggcctggggcggggagggcgccccctgcagccccagcagaagtgaccacaagcagctgcccggcaccagcatcgtgggccactag

SEQ ID NO: 317366 - DNA, 651 bp, Artificial Sequence
  derived and/or modified sequence
atggccctgaacaagaaccacagcgagggcggcggcgtcatcgtgaacaacacagagagcatcctgatgtcctatgaccacgtggagctgaccttcaatgacatgaagaatgtgcctgaggccttcaagggcaccaagaagggcaccgtgtacctgaccccctacagagtcatcttcctgagcaagggcaaggatgccatgcagagcttcatgatgcccttctacctgatgaaggactgtgagatcaagcagcctgtgtttggagccaactacatcaagggcaccgtgaaggccgaggccggcggcggctgggagggcagcgccagctacaagctgaccttcaccgctgggggcgccatcgagtttggccagaggatgctgcaggtggccagccaggagttctacccaggcccccccatgatggatggagccatgggctacgtgcagcccccacctccaccctacccaggccccatggagccccctgtgtctggcccagatgtgcccagcaccccagctgctgaggccaaggctgctgaggccgccgccagcgcctactacaaccctggcaacccccacaacgtgtacatgcccaccagccagcccccacctccaccctactaccccccagaggacaagaagacccagtag

SEQ ID NO: 317367 - DNA, 630 bp, Artificial Sequence
  derived and/or modified sequence
atggccctgaacaagaaccacagcgagggcggcggcgtgatcgtgaacaatactgaatctattcttatgagctacgatcatgtagagctcacattcaacgatatgaaaaatgtgcccgaagcatttaagggaacgaaaaaggggactgtctacctgaccccatatcgcgtcattttcctgtcgaagggaaaggatgcaatgcaaagctttatgatgccattttacctcatgaaagattgtgaaatcaagcagccagtctttggagctaattatatcaaagggaccgtgaaggctgaagccggaggcggctgggaaggaagcgcaagctacaaactgacatttaccgcgcccatgagcccccctctgctgcagcctaagccgagaccccagaaacagccccctgcacctattactacacaggctattgcctctcgtagacatttacctaccacgcacaggaagattgaagatccagtgggaccgcccgcatcgcttccaccaacactgatttccctgccttacccatctcacaggggctgcgccggtgcatgggggggcgagggtgctccatgctcccctagcagaagcgaccacaagcagttgcccggcacaagcatcgtcggtcactag

SEQ ID NO: 317368 - DNA, 651 bp, Artificial Sequence
  derived and/or modified sequence
atggccctgaacaagaaccacagcgagggcggcggcgtgatcgtgaacaacacagagtctattttaatgagttacgaccatgtagagctcacattcaatgacatgaagaatgtgcctgaggctttcaaaggtacaaaaaagggcaccgtatacctgaccccttaccgagttatattcttgtctaagggaaaggatgccatgcaatcttttatgatgcccttctatttgatgaaagattgtgaaattaagcaacccgtttttggagcaaactatattaaaggcactgtgaaagcagaagcaggcggcggttgggaggggtccgcaagctataaactgacatttactgcaggtggagctattgagtttggacaacggatgttgcaggtggcgagccaggagttctaccccggcccaccaatgatggacggggccatggggtatgtccagccccccccccctccctaccctggccccatggaaccgccagtatccggtccagatgtgccctctacgccagccgcagaggctaaggcagctgaagcagctgcgtctgcatattataacccaggcaatccccacaacgtgtacatgcccacctcacaaccgccccctcctccgtattacccgcctgaggacaagaaaacacagtag

SEQ ID NO: 317369 - DNA, 630 bp, Artificial Sequence
  derived and/or modified sequence
atggctctgaataagaatcattctgaaggaggcggagtcattgtcaacaacacagaatccatactcatgtcttacgaccacgtggaactcacatttaacgacatgaagaatgtgcccgaggccttcaaaggtactaagaaaggtactgtgtacttgaccccatacagagtgatcttcctgtcgaagggcaaggatgctatgcaatcatttatgatgcccttttacttgatgaaagactgtgaaattaaacaacctgtatttggggctaactacataaaaggaaccgtgaaagccgaagccggtgggggatgggaaggcagcgcatcatataaactcactttcacagctccaatgtcgcctcctttgctgcagcccaaaccacggccacagaaacagccacccgcacctataacaacccaggccatcgcctccagacgacacctccccactacccaccgcaagattgaggatccagttggtcccccagcatctctcccgccaacactgattagtttgccgtatccaagtcatcgtggatgcgccggtgcctggggcggagagggcgcaccctgctctccctcgcgctctgatcataagcaactgccaggaacaagcatcgtggggcattag

SEQ ID NO: 317370 - DNA, 651 bp, Artificial Sequence
  derived and/or modified sequence
atggcactgaacaagaaccactctgagggtggaggggtcatcgtaaacaataccgagtccatcctgatgagctacgatcatgttgagctcacatttaacgacatgaagaatgttcctgaagcgttcaaggggaccaaaaagggaacagtttacctgacgccgtatcgtgtcatcttcctttccaagggaaaagatgcaatgcagagttttatgatgccattctatctgatgaaagactgcgagatcaaacagcccgtgtttggagccaactacatcaagggaaccgttaaggccgaggcaggtggagggtgggaggggagcgctagctacaaactgacctttacggccggtggggcaatcgagtttggtcaaagaatgctgcaggtagcaagccaggaattctaccccggaccccctatgatggacggcgctatgggctacgtgcagccacccccaccaccctatcctggacctatggaaccgccagtatccgggccagacgtgcccagtacaccagcagctgaagcaaaggccgctgaagcagccgcatccgcatactataaccccggtaatcctcataacgtatatatgcccacaagccagcccccacctccaccatattatcccccagaggataagaagactcaatag

SEQ ID NO: 317371 - DNA, 658 bp, Artificial Sequence
  derived and/or modified sequence
gagtctcgggacccctgttggagagactatggcgctcaacaagaatcactcggagggcggcggagtgatcgtcaataacaccgagagcatcctaatgtcctatgatcacgtggaactcacattcaatgacatgaagaacgtgccagaagccttcaaagggaccaagaaaggcactgtctaccttaccccttaccgggtcatctttctgtccaagggcaaggatgccatgcagtccttcatgatgccattttatctcatgaaagactgtgagatcaagcagcccgtatttggtgcaaactacatcaagggaacagtgaaggcggaagcgggaggtggctgggaaggctctgcttcctacaagttgactttcacggccccgatgtcccctccactcctgcagccgaagccaaggccgcagaagcagccgccagcgcctattacaacccaggcaatagccagccgccgccacctccctactacccaccggaagatagaagacccagtaggccctcctgcctccctgcctcccaccctcatctctctaccctacccctcccatcggggctgtgctggggcttggggaggggagggggcgccttgttctccctccaggtctgatcataaacaattaccaggaactagcattgtgggacattag

SEQ ID NO: 317372 - DNA, 928 bp, Artificial Sequence
  derived and/or modified sequence
attgcgttttgagtctcgggacccctgttggagagactatggcgctcaacaagaatcactcggagggcggcggagtgatcgtcaataacaccgagagcatcctaatgtcctatgatcacgtggaactcacattcaatgacatgaagaacgtgccagaagccttcaaagggaccaagaaaggcactgtctaccttaccccttaccgggtcatctttctgtccaagggcaaggatgccatgcagtccttcatgatgccattttatctcatgaaagactgtgagatcaagcagcccgtatttggtgcaaactacatcaagggaacagtgaaggcggaagcgggaggtggctgggaaggctctgcttcctacaagttgactttcacggcagggggcgccattgagttcggacagcggatgctccaggtggcatctcaagagttctatccaggaccccccatgatggacggggccatgggatacgtgcagcccccaccaccgccctaccctgggcccatggaacctccggtcagcggccccgatgtcccctccactcctgcagccgaagccaaggccgcagaagcagccgccagcgcctattacaacccaggcaatcctcacaacgtctacatgcccacgagccagccgccgccacctccctactacccaccggaagataagaagacccagtaggccctcctgcctccctgcctcccaccctcatctctctaccctacccctcccatcggggctgtgctggggcttggggaggggagggggcgccttgttctccctccaggtctgatcataaacaattaccaggaactagcattgtgggacattagggcccccggcctcgggagaggtgccgcccagcttcccatgccagcccggagcccacagtgctgcccagcgtacctccctcaccgtct

SEQ ID NO: 317373 - protein, 516 aa, Artificial Sequence
  derived and/or modified sequence
MPTNGLHQVLKIQFGLVNDTDRYLTAESFGFKVNASAPSLKRKQTWVLEPDPGQGTAVLLRSSHLGRYLSAEEDGRVACEAEQPGRDCRFLVLPQPDGRWVLRSEPHGRFFGGTEDQLSCFATAVSPAELWTVHLAIHPQAHLLSVSRRRYVHLCPREDEMAADGDKPWGVDALLTLIFRSRRYCLKSCDSRYLRSDGRLVWEPEPRACYTLEFKAGKLAFKDCDGHYLAPVGPAGTLKAGRNTRPGKDELFDLEESHPQVVLVAANHRYVSVRQGVNVSANQDDELDHETFLMQIDQETKKCTFYSSTGGYWTLVTHGGIHATATQVSANTMFEMEWRGRRVALKASNGRYVCMKKNGQLAAISDFVGPPPRPAWTGKVAGGAAQQTLSPPGKDEEFTLKLINRPILVLRGLDGFVCHHRGSNQLDTNRSVYDVFHLSFSDGAYRIRGRDGGFWYTGSHGSVCSDGERAEDFVFEFRERGRLAIRARSGKYLRGGASGLLRADADAPAGTALWEY

SEQ ID NO: 317374 - DNA, 1551 bp, Artificial Sequence
  derived and/or modified sequence
atgccgacgaacggcctgcaccaggtgctgaagatccagtttggcctcgtcaacgacactgaccgctacctgacagctgagagcttcggcttcaaggtcaatgcctcggcacccagcctcaagaggaagcagacctgggtgctggaacccgacccaggacaaggcacggctgtgctgctccgcagcagccacctgggccgctacctgtcggcagaagaggacgggcgcgtggcctgtgaggcagagcagccgggccgtgactgccgcttcctggtcctgccgcagccagatgggcgctgggtgctgcggtccgagccgcacggccgcttcttcggaggcaccgaggaccagctgtcctgcttcgccacagccgtttccccggccgagctgtggaccgtgcacctggccatccacccgcaggcccacctgctgagcgtgagccggcggcgctacgtgcacctgtgcccgcgggaggacgagatggccgcagacggagacaagccctggggcgtggacgccctcctcaccctcatcttccggagccgacggtactgcctcaagtcctgtgacagccgctacctgcgcagcgacggccgtctggtctgggagcctgagccccgtgcctgctacacgctggagttcaaggcgggcaagctggccttcaaggactgcgacggccactacctggcacccgtggggcccgcaggcaccctcaaggccggccgaaacacgcgacctggcaaggatgagctctttgatctggaggagagtcacccacaggtggtgctggtggctgccaaccaccgctacgtctctgtgcggcaaggggtcaacgtctcagccaatcaggatgatgaactagaccacgagaccttcctgatgcaaattgaccaggagacaaagaagtgcaccttctattccagcactgggggctactggaccctggtcacccatgggggcattcacgccacagccacacaagtttctgccaacaccatgtttgagatggagtggcgtggccggcgggtagcactcaaagccagcaacgggcgctacgtgtgcatgaagaagaatgggcagctggcggctatcagcgattttgtcgggcccccaccccgcccggcctggacagggaaggtggcgggaggggcagcgcagcagacgctctccccgccaggcaaggacgaagagttcaccctcaagctcatcaaccggcccatcctggtgctgcgcggcctggacggcttcgtctgccaccaccgcggctccaaccagctggacaccaaccgctccgtctacgacgtcttccacctgagcttcagcgacggcgcctaccggatccgaggccgcgacggagggttctggtacacgggcagccacggcagcgtgtgcagcgacggcgaacgcgccgaggacttcgtcttcgagttccgtgagcgcggccgcctggccatccgcgcccggagcggcaagtacctgcgcggcggcgcctcgggcctgctgcgggccgatgccgacgccccggccgggaccgcgctttgggagtactga

SEQ ID NO: 317375 - DNA, 1551 bp, Artificial Sequence
  derived and/or modified sequence
atgcctaccaatggccttcaccaggtgctaaagatacaatttggtcttgttaatgacactgaccgctacctcaccgcggagagctttggctttaaggttaacgccagcgccccttccctgaagcgcaaacaaacatgggtattggagccagacccaggccagggaacagcagtgctcctcaggtcatcccatctgggtcgctatctgtcagcagaggaggacgggcgggtggcttgcgaggccgaacagccgggccgggattgccgtttcctcgtgctgccgcagccggacgggcggtgggtcttgcgtagtgaacctcatggcagattctttgggggaaccgaggatcagcttagttgttttgctaccgcagtgtcaccagctgagctgtggacagtccacctcgccatccacccacaggcccacctcctgtcggtgagccggcggcggtacgtgcacttatgtccccgggaagatgaaatggcggcagacggtgacaagccctggggtgttgacgctttactcaccctcatatttcggtctcgccggtactgcttgaagtcctgtgatagcagatacctgaggtccgacgggagactggtatgggagcctgagcccagggcctgctacacattggagtttaaggctggcaagttagcttttaaagattgcgatggtcactacctcgctccagtaggcccagccgggaccttaaaagccggccggaacaccagacctggaaaggacgagctgtttgacttagaagagtcccacccccaggttgtgctcgtcgctgcgaaccacaggtatgtgtctgttaggcaaggggtaaacgtttccgccaatcaggatgacgagctcgaccatgagacgttcttgatgcaaattgatcaggagacgaagaaatgcactttttactccagcaccggtgggtactggaccctagtcactcatggaggcatccacgccaccgccacgcaggtgagtgctaacaccatgttcgagatggaatggcgggggcggcgggttgcgctgaaagcatctaatgggaggtacgtctgtatgaaaaagaacggccagctcgctgctatcagcgactttgtcgggcctccaccaaggcccgcgtggactgggaaggtggccggtggggcagcccagcagactctgtcccctccaggaaaggacgaggagttcactctgaagctgatcaatcggcccatactcgtgctgcgcggcttggatggcttcgtgtgccatcaccgcggcagcaaccagctcgacactaacagaagcgtgtatgacgtcttccatctgagttttagtgacggtgcctaccgcatccgcggtcgtgacggggggttctggtacacaggcagtcatggttccgtgtgtagcgatggagaacgcgcggaagattttgtattcgagtttcgggagcgggggaggcttgctatccgggcccgctctggaaaatacctgagaggcggcgcctcgggactgctgagagccgacgcggatgcaccggctggaactgcgctttgggagtactag

SEQ ID NO: 317376 - DNA, 1551 bp, Artificial Sequence
  derived and/or modified sequence
atgcccaccaacggcctgcaccaggtgctgaagatccagtttggcctggtgaatgacacagaccgctacctgacagctgagagctttggcttcaaggtgaatgccagcgcccccagcctgaagaggaagcagacctgggtgctggagccagaccccggccagggcacagctgtgctgctgcggagcagccacctgggccgctacctgtctgcagaagaagatggccgggtggcctgtgaggccgagcagcccggccgggactgccgcttcctggtgctgccccagccagatggccgctgggtgctgcggtctgagccccacggccgcttctttggaggaacagaggaccagctgagctgctttgccacagctgtgtccccagctgagctgtggacagtgcacctggccatccacccccaggcccacctgctgtctgtgtccagaagaagatatgtgcacctgtgcccccgggaggatgagatggctgctgatggagacaagccctggggcgtggatgccctgctgaccctcatcttccgcagccgccgctactgcctgaagagctgtgacagccgctacctgcggagtgatggccgcctggtgtgggagcctgagccccgggcctgctacaccctggagttcaaggccggcaagctggccttcaaggactgtgatggccactacctggcccctgtgggccctgctggcaccctgaaggccggcaggaacaccaggcctgggaaggatgagctgtttgacctggaggagagccacccccaggtggtgctggtggccgccaaccaccgctacgtgtctgtgcggcagggcgtgaatgtgtctgccaaccaggatgatgagctggaccacgagaccttcctgatgcagattgaccaggagaccaagaagtgcaccttctacagcagcactggaggctactggaccctggtgacccacggcggcatccacgccacagccacccaggtgtctgccaacaccatgtttgagatggagtggagaggaagaagagtggccctgaaggccagcaatggccgctacgtgtgcatgaagaagaatggccagctggccgccatcagtgactttgtgggccccccacccaggcctgcctggacaggcaaggtggccggcggggccgcccagcagaccctgagccccccaggcaaggatgaggagttcaccctgaagctgatcaaccggcccatcctggtgctgcggggcctggatggctttgtgtgccaccaccggggcagcaaccagctggacaccaacagatctgtgtatgatgtgttccacctgtccttcagtgatggagcctaccgcatccggggcagagatggcggcttctggtacacaggcagccacggctctgtgtgcagtgatggagagcgggcagaagattttgtgtttgagttccgggagcggggccgcctggccatccgggcccggagcggcaagtacctgcggggcggggccagcggcctgctgcgggcagatgctgatgccccagctggaacagccctgtgggagtactag

SEQ ID NO: 317377 - DNA, 1551 bp, Artificial Sequence
  derived and/or modified sequence
atgcccaccaacggcctgcaccaggtgctgaagatccagttcggcctggtgaacgacaccgacagatatctcacagccgagagctttggatttaaggtaaatgctagtgccccttcactgaagcggaaacagacctgggtcctggaaccggaccccggccaagggactgcagtgcttctccgaagtagccatctggggcgttacttgtcggccgaagaagacgggagggtggcttgtgaggcagaacaacccggccgggattgtcggttccttgtgctgccccagcctgacggccgctgggtgctccggtctgagcctcatggccggttcttcggtggaacagaggaccagctgtcatgcttcgctacggctgtgtctcctgccgagctttggactgtgcatctcgccatccatcctcaagcccatctgctgagtgtgagccgcaggcggtatgtgcacctgtgcccaagagaggatgagatggctgccgatggagataaaccctggggcgtggacgcacttctgacactcatcttcaggtcacggcgatattgtcttaaaagctgtgactcccggtacttgagatccgacggaagactggtctgggagcccgagccgagagcgtgctacaccctggagtttaaggcaggtaagttagcatttaaggattgtgacggacattatctggcgcccgttgggcccgcaggtacgcttaaagccggccgcaacacgcggcctggaaaggacgaacttttcgacctggaagagtcccatcctcaggttgtgctcgtggctgccaatcatagatatgtgagtgtgcggcagggggtgaacgtatccgcaaaccaagacgatgaacttgatcacgaaactttcctgatgcaaattgatcaggagaccaagaagtgcactttttattcgtcgaccggcggttactggacccttgttactcacggcgggattcatgcaacagcgactcaagtgtccgccaataccatgttcgaaatggaatggcgagggcgtcgcgtcgccctgaaagcgtctaatgggcgttatgtgtgcatgaagaagaatggtcagttggctgctatttccgattttgtgggtcccccaccccggcccgcttggaccggcaaagtcgccggaggtgccgcccagcaaaccttgagtcctccaggcaaagacgaagagttcactctcaaactcataaaccgtcccatactggtattgcgcgggctggatgggtttgtatgccatcaccgagggagcaaccagctagacactaatagatcggtgtacgacgtctttcacttatctttttctgatggggcctaccggatacgtggcagagacggggggttctggtatacggggtcacacggatcagtgtgtagcgacggggagcgagcggaggacttcgtgttcgagttcagggagcgggggaggctcgcaatccgggccaggtccggcaaatatctgagaggcggagcttccggcctactgcgtgccgacgctgacgcgcccgccggcactgctctctgggaatattag

SEQ ID NO: 317378 - DNA, 1551 bp, Artificial Sequence
  derived and/or modified sequence
atgcccactaatggccttcaccaggttctgaaaatacagttcggtctggtgaacgatacggatagatacctgacagcagaatcgttcgggtttaaggtcaacgcttccgccccatccctgaagcgaaaacagacttgggtcttagaaccggatcctggccagggcaccgcagtacttttgcggagtagtcatctgggtaggtacctatcggcggaggaggacggacgagtcgcgtgcgaggcggaacagccaggtagagattgcagatttctggtcttgccccagccggacgggcgttgggtattaagatccgagccacatgggcgattcttcggcggtaccgaggatcagttgtcatgcttcgcaacagccgtcagtccagctgaattatggacagtgcatctcgcaatacacccacaagctcatctcctcagcgtctctcgcagacgctacgtacacctctgtcccagggaggacgagatggccgctgacggagataaaccatggggggtggatgcattgctgaccctgatcttccggagccgccgatattgcttaaaaagttgcgatagcaggtacctccgatctgacgggcgactcgtatgggaacccgaaccaagagcctgttacaccctggagtttaaggctggcaaattagctttcaaagactgcgacggccattacctggctcctgtgggcccagcaggtaccctgaaagccggtaggaacactagacccggtaaggacgaactcttcgatctggaagagagccacccacaggtagtgttggtcgctgcaaaccatagatatgtcagcgtgcggcagggcgtgaatgtgagtgcgaaccaagatgacgagctcgaccatgagacttttcttatgcaaatcgatcaggagactaagaagtgcaccttctatagcagcactggcggttactggactctggtaactcacggcggaattcacgcaaccgccacacaggtgagcgccaacaccatgttcgaaatggaatggagaggtcgaagagtcgctctaaaggctagcaatggcaggtacgtatgcatgaaaaagaatgggcagttggctgccatctctgacttcgtgggccctccccctcgcccagcgtggacaggaaaggttgccggtggcgctgcccagcagactctctccccaccagggaaggacgaggagtttacactgaagctgatcaacagaccgattttggttctccgcggactagacggatttgtctgtcaccaccggggaagcaatcagctggatacgaaccgttcagtgtacgacgtctttcacttatccttctctgacggcgcatacaggatccggggtagggatgggggtttttggtacaccggctcgcacggctccgtttgtagtgacggagaaagagccgaggacttcgtcttcgagtttcgggagaggggcagactagcgatccgcgctcggagcggaaagtatctcaggggaggcgcttccggcctgctcagagccgatgcggacgccccagcaggtacagccctatgggaatattag

SEQ ID NO: 317379 - DNA, 1551 bp, Artificial Sequence
  derived and/or modified sequence
atgcccaccaacggcctgcaccaggtgctgaagatccagttcggcctggtgaacgacaccgacagatacctgaccgccgagagcttcggcttcaaggtgaacgccagcgcccccagcctgaagagaaagcagacctgggtgctggagcccgaccccggccagggcaccgccgtgctgctgagaagcagccacctgggcagatacctgagcgccgaggaggacggcagagtggcctgcgaggccgagcagcccggcagagactgcagattcctggtgctgccccagcccgacggcagatgggtgctgagaagcgagccccacggcagattcttcggcggcaccgaggaccagctgagctgcttcgccaccgccgtgagccccgccgagctgtggaccgtgcacctggccatccacccccaggcccacctgctgagcgtgagcagaagaagatacgtgcacctgtgccccagagaggacgagatggccgccgacggcgacaagccctggggcgtggacgccctgctgaccctgatcttcagaagcagaagatactgcctgaagagctgcgacagcagatacctgagaagcgacggcagactggtgtgggagcccgagcccagagcctgctacaccctggagttcaaggccggcaagctggccttcaaggactgcgacggccactacctggcccccgtgggccccgccggcaccctgaaggccggcagaaacaccagacccggcaaggacgagctgttcgacctggaggagagccacccccaggtggtgctggtggccgccaaccacagatacgtgagcgtgagacagggcgtgaacgtgagcgccaaccaggacgacgagctggaccacgagaccttcctgatgcagatcgaccaggagaccaagaagtgcaccttctacagcagcaccggcggctactggaccctggtgacccacggcggcatccacgccaccgccacccaggtgagcgccaacaccatgttcgagatggagtggagaggcagaagagtggccctgaaggccagcaacggcagatacgtgtgcatgaagaagaacggccagctggccgccatcagcgacttcgtgggccccccccccagacccgcctggaccggcaaggtggccggcggcgccgcccagcagaccctgagcccccccggcaaggacgaggagttcaccctgaagctgatcaacagacccatcctggtgctgagaggcctggacggcttcgtgtgccaccacagaggcagcaaccagctggacaccaacagaagcgtgtacgacgtgttccacctgagcttcagcgacggcgcctacagaatcagaggcagagacggcggcttctggtacaccggcagccacggcagcgtgtgcagcgacggcgagagagccgaggacttcgtgttcgagttcagagagagaggcagactggccatcagagccagaagcggcaagtacctgagaggcggcgccagcggcctgctgagagccgacgccgacgcccccgccggcaccgccctgtgggagtactag

SEQ ID NO: 317380 - protein, 492 aa, Artificial Sequence
  derived and/or modified sequence
MPTNGLHQVLKIQFGLVNDTDRYLTAESFGFKVNASAPSLKRKQTWVLEPDPGQGTAVLLRSSHLGRYLSAEEDGRVACEAEQPGRDCRFLVLPQPDGRWVLRSEPHGRFFGGTEDQLSCFATAVSPAELWTVHLAIHPQAHLLSVSRRRYVHLCPREDEMAADGDKPWGVDALLTLIFRSRRYCLKSCDSRYLRSDGRLVWEPEPRACYTLEFKAGKLAFKDCDGHYLAPVGPAGTLKAGRNTRPGKDELFDLEESHPQVVLVAANHRYVSVRQGVNVSANQDDELDHETFLMQIDQETKKCTFYSSTGGYWTLVTHGGIHATATQVSANTMFEMEWRGRRVALKASNGRYVCMKKNGQLAAISDFVGKDEEFTLKLINRPILVLRGLDGFVCHHRGSNQLDTNRSVYDVFHLSFSDGAYRIRGRDGGFWYTGSHGSVCSDGERAEDFVFEFRERGRLAIRARSGKYLRGGASGLLRADADAPAGTALWEY

SEQ ID NO: 317381 - DNA, 1665 bp, Artificial Sequence
  derived and/or modified sequence
cagggggttcgtgacgccggctgggtctgggggctgtgggccagccgagccgacccgggcttctgggggaccgcgggggccgtgagcactcagagggcgcatcccaggcccctccggggacccggccagcctgaagatgccgacgaacggcctgcaccaggtgctgaagatccagtttggcctcgtcaacgacactgaccgctacctgacagctgagagcttcggcttcaaggtcaatgcctcggcacccagcctcaagaggaagcagacctgggtgctggaacccgacccaggacaaggcacggctgtgctgctccgcagcagccacctgggccgctacctgtcggcagaagaggacgggcgcgtggcctgtgaggcagagcagccgggccgtgactgccgcttcctggtcctgccgcagccagatgggcgctgggtgctgcggtccgagccgcacggccgcttcttcggaggcaccgaggaccagctgtcctgcttcgccacagccgtttccccggccgagctgtggaccgtgcacctggccatccacccgcaggcccacctgctgagcgtgagccggcggcgctacgtgcacctgtgcccgcgggaggacgagatggccgcagacggagacaagccctggggcgtggacgccctcctcaccctcatcttccggagccgacggtactgcctcaagtcctgtgacagccgctacctgcgcagcgacggccgtctggtctgggagcctgagccccgtgcctgctacacgctggagttcaaggcgggcaagctggccttcaaggactgcgacggccactacctggcacccgtggggcccgcaggcaccctcaaggccggccgaaacacgcgacctggcaaggatgagctctttgatctggaggagagtcacccacaggtggtgctggtggctgccaaccaccgctacgtctctgtgcggcaaggggtcaacgtctcagccaatcaggatgatgaactagaccacgagaccttcctgatgcaaattgaccaggagacaaagaagtgcaccttctattccagcactgggggctactggaccctggtcacccatgggggcattcacgccacagccacacaagtttctgccaacaccatgtttgagatggagtggcgtggccggcgggtagcactcaaagccagcaacgggcgctacgtgtgcatgaagaagaatgggcagctggcggctatcagcgattttgtcggcaaggacgaagagttcaccctcaagctcatcaaccggcccatcctggtgctgcgcggcctggacggcttcgtctgccaccaccgcggctccaaccagctggacaccaaccgctccgtctacgacgtcttccacctgagcttcagcgacggcgcctaccggatccgaggccgcgacggagggttctggtacacgggcagccacggcagcgtgtgcagcgacggcgaacgcgccgaggacttcgtcttcgagttccgtgagcgcggccgcctggccatccgcgcccggagcggcaagtacctgcgcggcggcgcctcgggcctgctgcgggccgatgccgacgccccggccgggaccgcgctttgggagtactgaggccgcgcccagaccagcctgtcgcgcattaaaaccgtgtctctcccgca

SEQ ID NO: 317382 - DNA, 1479 bp, Artificial Sequence
  derived and/or modified sequence
atgcctacgaatggactccaccaggtgctgaagatacagtttgggctcgtcaacgataccgaccgctacctgactgcggaatctttcggatttaaagtgaacgctagtgcccctagcctgaaaaggaagcagacatgggtgcttgagcctgaccccggacagggcaccgctgtactcttgcggtccagccacctaggcaggtacctatccgctgaagaagacggtagggtggcctgtgaagcagagcagcccggaagagattgtcgatttttggtgctgccgcaacctgacggacgatgggtgttgcgaagcgagccacacgggcgcttctttggaggcacagaagaccagctgagctgttttgccacagctgtgtctccagccgaattgtggactgttcacttggctatacatcctcaggcgcatctcctatcagtgtcacgtcggagatacgtccatctgtgtccccgtgaagacgaaatggctgccgacggcgataagccatggggagttgacgcactgctcacgttaatcttccgtagtcggcgctactgtttgaagtcttgtgactcacgctacctccggtccgatggtagactcgtgtgggagcccgaaccccgagcatgttacacactcgaatttaaagctggcaagttagccttcaaggattgcgatgggcattatctggctccagtcggtccagctggcactctgaaggcagggcgcaataccaggcccggaaaggacgaactcttcgatctcgaagaatctcacccccaggtggttctcgtggcggcaaaccaccgttacgtatccgttaggcagggtgtcaacgtgagcgccaaccaggacgacgagctcgaccacgagacattcctcatgcagattgaccaggaaactaaaaaatgcacattctattccagtactggtggttactggactctggtgacacatggaggaatccatgcgactgccactcaggtgagcgcaaacacaatgttcgaaatggaatggaggggccggagggtcgcactgaaagcctcgaacggacgatacgtctgcatgaagaagaacggacagctggccgccatctctgacttcgttggcaaggacgaggaattcaccttaaaacttatcaacaggcccattctcgtgctccgagggctggacggcttcgtctgccaccaccgtggctccaaccagctggacacaaaccgtagtgtctacgatgtgttccatctgagctttagcgacggcgcataccgcatccgagggagggatggaggattctggtacactggcagccacggcagcgtgtgttctgacggcgagcgggctgaagacttcgtcttcgagttcagagagcgcggacgccttgccatcagggctaggtctggaaagtatttgagggggggcgccagcgggttactgcgggcagatgctgacgctcccgcagggaccgcactctgggaatattag

SEQ ID NO: 317383 - DNA, 1479 bp, Artificial Sequence
  derived and/or modified sequence
atgcccaccaacggcctgcaccaggtgctgaagatccagtttggcctggtgaatgacacagaccgctacctgacagctgagagctttggcttcaaggtgaatgccagcgcccccagcctgaagaggaagcagacctgggtgctggagccagaccccggccagggcacagctgtgctgctgcggagcagccacctgggccgctacctgtctgcagaagaagatggccgggtggcctgtgaggccgagcagcccggccgggactgccgcttcctggtgctgccccagccagatggccgctgggtgctgcggtctgagccccacggccgcttctttggaggaacagaggaccagctgagctgctttgccacagctgtgtccccagctgagctgtggacagtgcacctggccatccacccccaggcccacctgctgtctgtgtccagaagaagatatgtgcacctgtgcccccgggaggatgagatggctgctgatggagacaagccctggggcgtggatgccctgctgaccctcatcttccgcagccgccgctactgcctgaagagctgtgacagccgctacctgcggagtgatggccgcctggtgtgggagcctgagccccgggcctgctacaccctggagttcaaggccggcaagctggccttcaaggactgtgatggccactacctggcccctgtgggccctgctggcaccctgaaggccggcaggaacaccaggcctgggaaggatgagctgtttgacctggaggagagccacccccaggtggtgctggtggccgccaaccaccgctacgtgtctgtgcggcagggcgtgaatgtgtctgccaaccaggatgatgagctggaccacgagaccttcctgatgcagattgaccaggagaccaagaagtgcaccttctacagcagcactggaggctactggaccctggtgacccacggcggcatccacgccacagccacccaggtgtctgccaacaccatgtttgagatggagtggagaggaagaagagtggccctgaaggccagcaatggccgctacgtgtgcatgaagaagaatggccagctggccgccatcagtgactttgtgggcaaggatgaggagttcaccctgaagctgatcaaccggcccatcctggtgctgcggggcctggatggctttgtgtgccaccaccggggcagcaaccagctggacaccaacagatctgtgtatgatgtgttccacctgtccttcagtgatggagcctaccgcatccggggcagagatggcggcttctggtacacaggcagccacggctctgtgtgcagtgatggagagcgggcagaagattttgtgtttgagttccgggagcggggccgcctggccatccgggcccggagcggcaagtacctgcggggcggggccagcggcctgctgcgggcagatgctgatgccccagctggaacagccctgtgggagtactag

SEQ ID NO: 317384 - DNA, 1479 bp, Artificial Sequence
  derived and/or modified sequence
atgcccaccaacggcctgcaccaggtgctgaagatccagttcggcctggtcaacgacactgatagataccttaccgccgagtctttcggctttaaggtgaacgcatctgcgccatcccttaaaagaaaacagacctgggtgctagagcctgatcctggacaggggacagcagtgttgttgcggtcttctcatctcgggcgctaccttagcgcggaggaggacgggagagtggcttgtgaggccgaacagcccgggagggactgccgcttcttggtactgcctcagccggacgggcgttgggtgctaagatccgaaccccacgggcggttttttggtgggactgaagaccaactttcttgctttgccaccgccgtctccccggcagagctgtggactgtccatctcgcaatacacccacaggctcatcttctaagcgtatcccggagaaggtacgtccacctttgtccccgggaggatgagatggcggccgatggtgataagccatggggtgtcgacgccctgctcacattaatatttagatcccggaggtattgtctgaaaagttgtgattcgcgttacctgagaagcgacgggcgtttggtgtgggagcctgagcctcgggcgtgctacactttagaatttaaggctggcaagctggcgttcaaagactgcgatggacactacttagctccagttggtcccgcaggcactctaaaggccgggcggaacactaggcctgggaaagatgagctcttcgacctcgaggagtcgcatccccaggtggttttggtggcagccaatcacagatatgtgtcagtaagacagggggttaacgtatcggccaaccaagatgacgagctggaccatgaaacctttctgatgcagatcgaccaggagaccaaaaaatgtacgttttactcctccactgggggatattggactctcgttactcacggcggcattcatgctacggccacacaggtaagtgctaacaccatgttcgagatggaatggcgtggccgcagggtcgctctgaaggcttccaatggaagatatgtgtgcatgaagaagaacggacagttggctgcgatatctgacttcgtgggcaaggacgaagaatttacccttaaattgattaaccggcctatcctggtcctgagaggtctcgatgggtttgtgtgccatcatagaggaagtaaccagctggatacaaatcggtctgtctacgatgtttttcatctgtcctttagcgacggtgcgtaccggatacgcggccgcgacggcggcttctggtatacagggagccacgggtctgtttgctcagacggagaaagggcagaagatttcgtatttgagtttagggaaagaggacgattggcaatccgggctagaagtggcaagtacctgcgcggtggagcttctggccttcttcgggctgacgcggacgctcctgctggcaccgctttatgggagtattag

SEQ ID NO: 317385 - DNA, 1479 bp, Artificial Sequence
  derived and/or modified sequence
atgcctaccaatgggctccaccaggtactaaagattcaatttgggctggtcaatgataccgacaggtacctgaccgccgagtcgttcgggtttaaggtgaatgcaagtgccccttcactcaaacggaagcagacatgggttctcgaacccgatcccggacagggaacagccgtgctgctcaggtcaagccaccttggaagatacctgtctgcagaagaggatgggagagtggcatgcgaagccgaacagccgggtcgagattgcagatttttggtattgcctcagcccgatggacggtgggtccttcgtagtgagccgcacggcagatttttcgggggtaccgaagatcaactgtcttgcttcgctactgccgtgtcccccgctgaactgtggaccgtgcatctggctattcatccacaggctcacctgctgtctgtgtcacggagaagatatgtgcacctgtgtcccagagaggacgaaatggcagccgacggggataagccatggggagttgacgctttattaaccttgatcttccggtccaggcggtactgcctaaaaagttgtgattcccgatatttaaggtctgatggccgattagtctgggaacctgagcctagggcctgctacactcttgaatttaaggctggaaagctggcattcaaagactgtgacgggcactacctggcaccagtgggacctgccggaacactcaaagcagggaggaacacgcggccaggtaaagatgagctctttgacctcgaggagtctcacccacaagtggtgctagtggctgccaatcaccggtacgtgtcggtgcgccagggtgtaaacgtgagtgccaaccaggatgacgagctggatcacgagacctttctgatgcaaatcgaccaggagactaaaaaatgtactttttatagctccacagggggatactggacccttgttacccacggcggtatccacgctaccgccactcaggtaagcgccaacaccatgtttgagatggaatggcggggtcgaagagtggccctgaaggctagcaatggacggtatgtgtgcatgaagaagaatggccagctggcggcaatcagcgatttcgttggaaaagacgaggagttcacattaaaactcattaacaggcctatcctggtactccgcggtctggacgggtttgtctgtcatcataggggttccaatcaactggacacaaatagatcagtgtatgacgtgttccacctgtcctttagcgacggcgcataccgcattaggggacgagatggaggattctggtataccggcagccacggaagcgtatgctccgacggcgaaagagcagaggacttcgtttttgagttccgagagagaggacggcttgccattagagctaggtctggcaaatatctgagagggggagcgagcggtttgttgcgggctgatgccgacgcccctgccggtactgcactgtgggaatattag

SEQ ID NO: 317386 - DNA, 1479 bp, Artificial Sequence
  derived and/or modified sequence
atgcccaccaacggcctgcaccaggtgctgaagatccagttcggcctggtgaacgacaccgacagatacctgaccgccgagagcttcggcttcaaggtgaacgccagcgcccccagcctgaagagaaagcagacctgggtgctggagcccgaccccggccagggcaccgccgtgctgctgagaagcagccacctgggcagatacctgagcgccgaggaggacggcagagtggcctgcgaggccgagcagcccggcagagactgcagattcctggtgctgccccagcccgacggcagatgggtgctgagaagcgagccccacggcagattcttcggcggcaccgaggaccagctgagctgcttcgccaccgccgtgagccccgccgagctgtggaccgtgcacctggccatccacccccaggcccacctgctgagcgtgagcagaagaagatacgtgcacctgtgccccagagaggacgagatggccgccgacggcgacaagccctggggcgtggacgccctgctgaccctgatcttcagaagcagaagatactgcctgaagagctgcgacagcagatacctgagaagcgacggcagactggtgtgggagcccgagcccagagcctgctacaccctggagttcaaggccggcaagctggccttcaaggactgcgacggccactacctggcccccgtgggccccgccggcaccctgaaggccggcagaaacaccagacccggcaaggacgagctgttcgacctggaggagagccacccccaggtggtgctggtggccgccaaccacagatacgtgagcgtgagacagggcgtgaacgtgagcgccaaccaggacgacgagctggaccacgagaccttcctgatgcagatcgaccaggagaccaagaagtgcaccttctacagcagcaccggcggctactggaccctggtgacccacggcggcatccacgccaccgccacccaggtgagcgccaacaccatgttcgagatggagtggagaggcagaagagtggccctgaaggccagcaacggcagatacgtgtgcatgaagaagaacggccagctggccgccatcagcgacttcgtgggcaaggacgaggagttcaccctgaagctgatcaacagacccatcctggtgctgagaggcctggacggcttcgtgtgccaccacagaggcagcaaccagctggacaccaacagaagcgtgtacgacgtgttccacctgagcttcagcgacggcgcctacagaatcagaggcagagacggcggcttctggtacaccggcagccacggcagcgtgtgcagcgacggcgagagagccgaggacttcgtgttcgagttcagagagagaggcagactggccatcagagccagaagcggcaagtacctgagaggcggcgccagcggcctgctgagagccgacgccgacgcccccgccggcaccgccctgtgggagtactag

SEQ ID NO: 317387 - protein, 2000 aa, Artificial Sequence
  derived and/or modified sequence
MFRNSLKMLLTGGKSSRKNRSSDGGSEEPPDRRQSSVDSRQSRSGQGGISTESDCAFEPDYAVPPLPVSEGDAEQELGPPPSVDEAANTLMTRLGFLLGEKVTEVQPGDQYSMEVQDENQTSAITQRISPCSTLTSSTASPPASSPCSTLPPISTNATAKDCSYGAVTSPTSTLESRDSGIIATLTSYSENVERTKYAGESSKELGSGGNIKPWQSQKSSMDSCLYRVDENMTASTYSLNKIPERNLETVLSQSVQSIPLYLMPRPNSVAATSSAHLEDLAYLDEQRHTPLRTSLRMPRQSMGGARTQQDLRVRFAPYRPPDISLKPLLFEVPSITTESVFVGRDWVFHEIDAQLQSSNASVNQGVVIVGNIGFGKTAIISRLVALSCHGTRMRQIASDSPHASPKHVDANRELPLTQPPSAHSSITSGSCPGTPEMRRRQEEAMRRLASQVVAYHYCQADNAYTCLVPEFVHNVAALLCRSPQLTAYREQLLREPHLQSMLSLRSCVQDPMASFRRGVLEPLENLHKERKIPDEDFIILIDGLNEAEFHKPDYGDTIVSFLSKMIGKFPSWLKLIVTVRTSLQEITKLLPFHRIFLDRLEENEAIDQDLQAYILHRIHSSSEIQNNISLNGKMDNTTFGKLSSHLKTLSQGSYLYLKLTFDLIEKGYLVLKSSSYKVVPVSLSEVYLLQCNMKFPTQSSFDRVMPLLNVAVASLHPLTDEHIFQAINAGSIEGTLEWEDFQQRMENLSMFLIKRRDMTRMFVHPSFREWLIWREEGEKTKFLCDPRSGHTLLAFWFSRQEGKLNRQQTIELGHHILKAHIFKGLSKKVGVSSSILQGLWISYSTEGLSMALASLRNLYTPNIKVSRLLILGGANINYRTEVLNNAPILCVQSHLGYTEMVALLLEFGANVDASSESGLTPLGYAAAAGYLSIVVLLCKKRAKVDHLDKNGQCALVHAALRGHLEVVKFLIQCDWTMAGQQQGVFKKSHAIQQALIAAASMGYTEIVSYLLDLPEKDEEEVERAQINSFDSLWGETALTAAAGRGKLEVCRLLLEQGAAVAQPNRRGAVPLFSTVRQGHWQIVDLLLTHGADVNMADKQGRTPLMMAASEGHLGTVDFLLAQGASIALMDKEGLTALSWACLKGHLSVVRSLVDNGAATDHADKNGRTPLDLAAFYGDAEVVQFLVDHGAMIEHVDYSGMRPLDRAVGCRNTSVVVTLLKKGAKIGCQTLPSRPRGPATWAMATSKPDIMIILLSKLMEEGDMFYKKGKVKEAAQRYQYALKKFPREGFGEDLKTFRELKVSLLLNLSRCRRKMNDFGMAEEFATKALELKPKSYEAYYARARAKRSSRQFAAALEDLNEAIKLCPNNREIQRLLLRVEEECRQMQQPQQPPPPPQPQQQLPEEAEPEPQHEDIYSVQDIFEEEYLEQDVENVSIGLQTEARPSQGLPVIQSPPSSPPHRDSAYISSSPLGSHQVFDFRSSSSVGSPTRQTYQSTSPALSPTHQNSHYRPSPPHTSPAHQGGSYRFSPPPVGGQGKEYPSPPPSPLRRGPQYRASPPAESMSVYRSQSGSPVRYQQETSVSQLPGRPKSPLSKMAQRPYQMPQLPVAVPQQGLRLQPAKAQIVRSNQPSPAVHSSTVIPTGAYGQVAHSMASKYQSSQGDIGVSQSRLVYQGSIGGIVGDGRPVQHVQASLSAGAICQHGGLTKEDLPQRPSSAYRGGVRYSQTPQIGRSQSASYYPVCHSKLDLERSSSQLGSPDVSHLIRRPISVNPNEIKPHPPTPRPLLHSQSVGLRFSPSSNSISSTSNLTPTFRPSSSIQQMEIPLKPAYERSCDELSPVSPTQGGYPSEPTRSRTTPFMGIIDKTARTQQYPHLHQQNRTWAVSSVDTVLSPTSPGNLPQPESFSPPSSISNIAFYNKTNNAQNGHLLEDDYYSPHGMLANGSRGDLLERVSQASSYPDVKVARTLPVAQAYQDNLYRQLSRDSRQGQTSPIKPKRPFVESNV

SEQ ID NO: 317388 - DNA, 6003 bp, Artificial Sequence
  derived and/or modified sequence
atgttcagaaacagcctgaagatgctgctgaccggcggcaagagcagcagaaagaacagaagcagcgacggcggcagcgaggagccccccgacagaagacagagcagcgtggacagcagacagagcagaagcggccagggcggcatcagcaccgagagcgactgcgccttcgagcccgactacgccgtgccccccctgcccgtgagcgagggcgacgccgagcaggagctgggccccccccccagcgtggacgaggccgccaacaccctgatgaccagactgggcttcctgctgggcgagaaggtgaccgaggtgcagcccggcgaccagtacagcatggaggtgcaggacgagaaccagaccagcgccatcacccagagaatcagcccctgcagcaccctgaccagcagcaccgccagcccccccgccagcagcccctgcagcaccctgccccccatcagcaccaacgccaccgccaaggactgcagctacggcgccgtgaccagccccaccagcaccctggagagcagagacagcggcatcatcgccaccctgaccagctacagcgagaacgtggagagaaccaagtacgccggcgagagcagcaaggagctgggcagcggcggcaacatcaagccctggcagagccagaagagcagcatggacagctgcctgtacagagtggacgagaacatgaccgccagcacctacagcctgaacaagatccccgagagaaacctggagaccgtgctgagccagagcgtgcagagcatccccctgtacctgatgcccagacccaacagcgtggccgccaccagcagcgcccacctggaggacctggcctacctggacgagcagagacacacccccctgagaaccagcctgagaatgcccagacagagcatgggcggcgccagaacccagcaggacctgagagtgagattcgccccctacagaccccccgacatcagcctgaagcccctgctgttcgaggtgcccagcatcaccaccgagagcgtgttcgtgggcagagactgggtgttccacgagatcgacgcccagctgcagagcagcaacgccagcgtgaaccagggcgtggtgatcgtgggcaacatcggcttcggcaagaccgccatcatcagcagactggtggccctgagctgccacggcaccagaatgagacagatcgccagcgacagcccccacgccagccccaagcacgtggacgccaacagagagctgcccctgacccagccccccagcgcccacagcagcatcaccagcggcagctgccccggcacccccgagatgagaagaagacaggaggaggccatgagaagactggccagccaggtggtggcctaccactactgccaggccgacaacgcctacacctgcctggtgcccgagttcgtgcacaacgtggccgccctgctgtgcagaagcccccagctgaccgcctacagagagcagctgctgagagagccccacctgcagagcatgctgagcctgagaagctgcgtgcaggaccccatggccagcttcagaagaggcgtgctggagcccctggagaacctgcacaaggagagaaagatccccgacgaggacttcatcatcctgatcgacggcctgaacgaggccgagttccacaagcccgactacggcgacaccatcgtgagcttcctgagcaagatgatcggcaagttccccagctggctgaagctgatcgtgaccgtgagaaccagcctgcaggagatcaccaagctgctgcccttccacagaatcttcctggacagactggaggagaacgaggccatcgaccaggacctgcaggcctacatcctgcacagaatccacagcagcagcgagatccagaacaacatcagcctgaacggcaagatggacaacaccaccttcggcaagctgagcagccacctgaagaccctgagccagggcagctacctgtacctgaagctgaccttcgacctgatcgagaagggctacctggtgctgaagagcagcagctacaaggtggtgcccgtgagcctgagcgaggtgtacctgctgcagtgcaacatgaagttccccacccagagcagcttcgacagagtgatgcccctgctgaacgtggccgtggccagcctgcaccccctgaccgacgagcacatcttccaggccatcaacgccggcagcatcgagggcaccctggagtgggaggacttccagcagagaatggagaacctgagcatgttcctgatcaagagaagagacatgaccagaatgttcgtgcaccccagcttcagagagtggctgatctggagagaggagggcgagaagaccaagttcctgtgcgaccccagaagcggccacaccctgctggccttctggttcagcagacaggagggcaagctgaacagacagcagaccatcgagctgggccaccacatcctgaaggcccacatcttcaagggcctgagcaagaaggtgggcgtgagcagcagcatcctgcagggcctgtggatcagctacagcaccgagggcctgagcatggccctggccagcctgagaaacctgtacacccccaacatcaaggtgagcagactgctgatcctgggcggcgccaacatcaactacagaaccgaggtgctgaacaacgcccccatcctgtgcgtgcagagccacctgggctacaccgagatggtggccctgctgctggagttcggcgccaacgtggacgccagcagcgagagcggcctgacccccctgggctacgccgccgccgccggctacctgagcatcgtggtgctgctgtgcaagaagagagccaaggtggaccacctggacaagaacggccagtgcgccctggtgcacgccgccctgagaggccacctggaggtggtgaagttcctgatccagtgcgactggaccatggccggccagcagcagggcgtgttcaagaagagccacgccatccagcaggccctgatcgccgccgccagcatgggctacaccgagatcgtgagctacctgctggacctgcccgagaaggacgaggaggaggtggagagagcccagatcaacagcttcgacagcctgtggggcgagaccgccctgaccgccgccgccggcagaggcaagctggaggtgtgcagactgctgctggagcagggcgccgccgtggcccagcccaacagaagaggcgccgtgcccctgttcagcaccgtgagacagggccactggcagatcgtggacctgctgctgacccacggcgccgacgtgaacatggccgacaagcagggcagaacccccctgatgatggccgccagcgagggccacctgggcaccgtggacttcctgctggcccagggcgccagcatcgccctgatggacaaggagggcctgaccgccctgagctgggcctgcctgaagggccacctgagcgtggtgagaagcctggtggacaacggcgccgccaccgaccacgccgacaagaacggcagaacccccctggacctggccgccttctacggcgacgccgaggtggtgcagttcctggtggaccacggcgccatgatcgagcacgtggactacagcggcatgagacccctggacagagccgtgggctgcagaaacaccagcgtggtggtgaccctgctgaagaagggcgccaagatcggctgccagaccctgcccagcagacccagaggccccgccacctgggccatggccaccagcaagcccgacatcatgatcatcctgctgagcaagctgatggaggagggcgacatgttctacaagaagggcaaggtgaaggaggccgcccagagataccagtacgccctgaagaagttccccagagagggcttcggcgaggacctgaagaccttcagagagctgaaggtgagcctgctgctgaacctgagcagatgcagaagaaagatgaacgacttcggcatggccgaggagttcgccaccaaggccctggagctgaagcccaagagctacgaggcctactacgccagagccagagccaagagaagcagcagacagttcgccgccgccctggaggacctgaacgaggccatcaagctgtgccccaacaacagagagatccagagactgctgctgagagtggaggaggagtgcagacagatgcagcagccccagcagccccccccccccccccagccccagcagcagctgcccgaggaggccgagcccgagccccagcacgaggacatctacagcgtgcaggacatcttcgaggaggagtacctggagcaggacgtggagaacgtgagcatcggcctgcagaccgaggccagacccagccagggcctgcccgtgatccagagcccccccagcagccccccccacagagacagcgcctacatcagcagcagccccctgggcagccaccaggtgttcgacttcagaagcagcagcagcgtgggcagccccaccagacagacctaccagagcaccagccccgccctgagccccacccaccagaacagccactacagacccagccccccccacaccagccccgcccaccagggcggcagctacagattcagccccccccccgtgggcggccagggcaaggagtaccccagccccccccccagccccctgagaagaggcccccagtacagagccagcccccccgccgagagcatgagcgtgtacagaagccagagcggcagccccgtgagataccagcaggagaccagcgtgagccagctgcccggcagacccaagagccccctgagcaagatggcccagagaccctaccagatgccccagctgcccgtggccgtgccccagcagggcctgagactgcagcccgccaaggcccagatcgtgagaagcaaccagcccagccccgccgtgcacagcagcaccgtgatccccaccggcgcctacggccaggtggcccacagcatggccagcaagtaccagagcagccagggcgacatcggcgtgagccagagcagactggtgtaccagggcagcatcggcggcatcgtgggcgacggcagacccgtgcagcacgtgcaggccagcctgagcgccggcgccatctgccagcacggcggcctgaccaaggaggacctgccccagagacccagcagcgcctacagaggcggcgtgagatacagccagaccccccagatcggcagaagccagagcgccagctactaccccgtgtgccacagcaagctggacctggagagaagcagcagccagctgggcagccccgacgtgagccacctgatcagaagacccatcagcgtgaaccccaacgagatcaagccccacccccccacccccagacccctgctgcacagccagagcgtgggcctgagattcagccccagcagcaacagcatcagcagcaccagcaacctgacccccaccttcagacccagcagcagcatccagcagatggagatccccctgaagcccgcctacgagagaagctgcgacgagctgagccccgtgagccccacccagggcggctaccccagcgagcccaccagaagcagaaccacccccttcatgggcatcatcgacaagaccgccagaacccagcagtacccccacctgcaccagcagaacagaacctgggccgtgagcagcgtggacaccgtgctgagccccaccagccccggcaacctgccccagcccgagagcttcagcccccccagcagcatcagcaacatcgccttctacaacaagaccaacaacgcccagaacggccacctgctggaggacgactactacagcccccacggcatgctggccaacggcagcagaggcgacctgctggagagagtgagccaggccagcagctaccccgacgtgaaggtggccagaaccctgcccgtggcccaggcctaccaggacaacctgtacagacagctgagcagagacagcagacagggccagaccagccccatcaagcccaagagacccttcgtggagagcaacgtgtag

SEQ ID NO: 317389 - DNA, 6003 bp, Artificial Sequence
  derived and/or modified sequence
atgttccggaattctcttaaaatgctgctcaccggcggtaaatcatcccgtaagaataggtcttccgacggtggctcagaagagccgccagatcgtcgccaatccagtgtagacagccgacagagcaggtccggccaggggggtatctcaacggagtctgactgtgcttttgagcccgactatgccgttccccccctgccagtgagcgagggtgatgccgaacaggaactggggccacccccatcagtggatgaggcagcgaacacgctgatgacaagacttggatttttgctcggggaaaaggtgaccgaggtgcagcctggagaccagtacagcatggaagtccaggacgaaaaccagactagcgccattacacagcgaatttctccctgttctacattaactagttccaccgcctccccgcctgctagctccccctgtagtacactgcccccaatatccaccaacgccacagcaaaggactgtagctacggggcagtcacttcccctacatctacacttgaatcacgggactccggtattatagcgacacttacatcctattcagagaacgtagagcgcaccaaatatgcaggcgagtccagcaaggagctcggcagtggaggcaatatcaaaccttggcagtcacagaagtcatccatggacagctgcctttaccgcgtggatgagaacatgacagcaagtacttattcactcaacaagattccggagaggaacctcgaaaccgtcttgtctcaatccgtgcaatctattccgctgtacctcatgcccaggccgaacagcgtggcagccacttcctccgcccatctggaggatctggcctatctggatgaacagcgccacacacccctcaggacgagcctgaggatgccacggcagagtatggggggcgctcggactcagcaggacctgcgagtgcggtttgcgccttatcgtcctcctgatatctcactgaagccattgctttttgaagtaccatcaatcaccaccgaatcagtatttgtgggtcgggattgggttttccacgaaatcgacgcccagttgcagagttcaaatgcatccgttaaccagggggtggttattgtaggtaacatcggattcggtaaaaccgcaataatctctagattggtcgcactgagctgtcacgggacacggatgagacagatcgcatctgattcaccacacgcctcgcctaagcacgtggacgctaatagagaactgcccctcacacagcctccctccgcccattcttccatcacaagcggaagctgtcccggaacccccgaaatgagaaggagacaagaagaggcaatgagaagactggcatcccaggtcgtggcatatcactactgtcaggcagataacgcttacacctgtctggtgccagagtttgtgcacaatgtcgccgcactcctttgtcggtcacctcagctgacggcttaccgcgagcagctgctgagggagcctcacctccagagtatgctctccctcagaagttgtgtccaggatcccatggcaagcttcaggcgaggagtcctggagccgttggaaaatctgcacaaggagcgcaaaatccctgatgaagactttattatcctcatcgacggcctgaacgaagcagagtttcacaagcccgactacggcgacacgatcgtttcctttcttagcaaaatgataggaaagttcccatcatggctgaagctgatcgtgacagtcagaacctcactgcaggagattacgaagttacttccattccacaggatctttctggatcggctggaagagaacgaagctatcgaccaagatctccaagcttacatcctgcatagaatccactcgtcatccgaaatccagaataatattagcctcaatggcaaaatggacaataccacctttggtaaattgagtagccaccttaaaactctgagtcagggatcctatttgtatctgaagctgacctttgatctgatagaaaaaggatacttagtcttaaaaagtagtagctacaaggtagttcccgttagcttgagcgaagtgtacctgttgcagtgtaacatgaagttccctactcaatcctcttttgaccgcgtcatgccgcttctcaacgtagctgttgcctccctgcatccactgactgatgagcacatcttccaggccattaacgccggctccatcgaaggtaccctggagtgggaggacttccagcaaagaatggagaatctgagtatgttcctaatcaaacgccgggacatgacacggatgtttgtgcaccccagctttcgcgaatggttaatatggcgggaggagggggaaaagacgaaattcttgtgtgaccctaggagcggccatactcttctggccttctggttttcccgacaggaggggaaactgaatagacagcagacaatcgagttaggccaccatatattaaaagcccacattttcaagggcctatccaaaaaagttggggtttcttcctcaatcctgcagggcctctggatttcatactccacagagggactgagcatggctctggcctctctgcgaaatctgtatacccccaacatcaaagttagtagactgctcatcctcggtggtgctaacattaattatagaacggaggtgctgaacaacgcaccgatcctgtgtgtgcagagtcatcttggctataccgaaatggtagcccttctcctcgaattcggcgctaatgtcgatgccagctcagagagcgggctgacaccactcggctacgcagccgccgccggctacttatctatcgtcgtgctgctgtgtaaaaaacgtgccaaggtcgaccacctggataagaatgggcagtgcgcgctcgtgcatgccgcattgaggggccatctcgaagtggtcaaattcctgattcagtgcgattggacgatggccggtcagcagcagggggtgttcaaaaagtctcacgccatacagcaggctctgatcgcagcagcttccatgggctacactgagatcgtttcatatctactggatctgcccgagaaggatgaagaagaggtggagcgggcgcagataaattcattcgacagcttatggggggaaactgctctcaccgccgctgctggccgagggaaattagaagtgtgccggctcttattggaacagggcgctgccgtggctcagcctaatcgccgaggcgccgtccctctcttttctaccgtccggcaaggtcattggcagattgtcgatctgctattgacccatggggctgacgtaaatatggccgataaacagggaaggacccctctcatgatggcagcgagtgaggggcacctgggaacagtggattttttgctggcccagggcgccagcatcgcactaatggacaaagagggcttgacagccttgtcttgggcctgcctcaagggacacctctctgtcgtcagatccctcgttgataatggcgccgcgacggatcatgccgataagaacggtcggacaccgctggaccttgccgcattttacggggacgccgaggtggtgcagttcttggtggaccacggcgccatgatcgaacacgtggattactccgggatgagacctcttgaccgcgccgttggctgcagaaacacctcagtggtcgtgactctgctaaaaaagggcgccaaaattggatgtcaaactttaccatcccgtcctcgtggacctgcgacatgggcgatggctaccagcaaacctgacatcatgatcattcttctgtccaaactgatggaagaaggagacatgttctataagaaaggaaaagttaaagaggccgctcagcgttatcaatacgcactgaagaaattccctagagaggggtttggtgaggatctaaagaccttcagagaactgaaggtgtccttgctcctaaacctctctagatgtcgccgaaaaatgaatgattttggcatggccgaggagtttgctacaaaagcactggagctcaagccaaaatcctatgaggcgtactacgcgcgcgccagggccaaacgctcttccagacagttcgcagctgctctggaggacctgaatgaagccatcaagctgtgccccaataaccgcgagattcagagactgctgcttcgggtcgaggaggaatgccggcagatgcagcaaccgcagcagccgccgccacctcctcagcctcaacagcagctgccagaggaggctgagccagagccccagcatgaggacatttacagcgtgcaggacatcttcgaggaagagtaccttgaacaagatgtagagaacgtgagcatcggactacagactgaggcgaggccctcccaggggctgcccgtcattcagtctcccccatcgagcccaccacatcgagactcagcttatatttcctccagcccactggggtcccatcaggtcttcgacttcagatcaagctctagtgtgggttcacccacccggcagacctatcaatctacctctcccgccttgtcccccacacaccagaacagtcattatcgaccgagtccccctcacacctccccagcacatcaaggcgggagctacagattttctccccctccagtgggaggccagggaaaggaatacccctctccacctccgtcccctctccggcgtgggcctcagtaccgagcgtcccctcccgctgaatccatgtcagtgtaccgcagtcagtccggctctccggtcagatatcagcaggagaccagtgtgagccagctgccagggcggccaaaatctcctctcagcaagatggcccagcgtccctatcagatgccccagttacccgtcgcagtcccccagcaggggctgcggctccagccagctaaagctcagattgtgagatccaatcaacctagccctgccgttcactcttcaacagttattccaactggcgcatacggccaggttgcccattctatggcctccaaataccagtcatcccagggcgatattggcgtgtctcagtccaggctcgtgtaccaggggtctatcggcggcatcgtcggtgacggcagacccgtgcaacacgtacaggcctccttatccgccggtgccatctgtcagcacgggggactgacaaaagaagaccttccacaaaggccaagttccgcataccgggggggcgtacgttattctcaaacccctcagattggcaggagccagagtgcttcttattaccccgtttgtcacagcaaattagacctggaacgctcatcttcgcaactgggctcacccgacgtttcccacctgattagacgccctatcagtgtgaaccctaacgagataaagccgcaccccccaacaccccgccccctgctgcactcccagtccgtcggccttagatttagcccctcatctaacagcattagcagcacttctaatctgacccctacgtttaggccttcttccagcattcagcaaatggagataccattgaagcccgcgtacgagagatcctgtgatgaactgtctccagttagccctacacagggtgggtacccctcagaacctacccgtagcagaacaacccctttcatggggatcatcgataaaactgcccgtacacagcagtacccacacctgcaccaacagaacagaacttgggccgtttcttctgtagacacggtgctttcccctacctcaccgggaaacctgccacagcccgagtccttctccccaccatcaagcatctccaatatcgctttttataataaaaccaacaacgctcagaatggccacctgctggaagatgactactacagtccacacggcatgctggctaacggctccaggggggatttactggagagagtgagccaggctagttcgtacccagatgtgaaagtggcgcgtactctcccagtggctcaggcctaccaagacaatctctacagacagctgtcccgggacagtcgccagggtcagacttcaccaattaagccaaaaaggcccttcgtagagtcaaacgtgtag

SEQ ID NO: 317390 - DNA, 6003 bp, Artificial Sequence
  derived and/or modified sequence
atgttcaggaacagcctgaagatgctgctgactggaggcaagagcagcaggaagaacagaagcagtgatggcggcagcgaggagcccccagaccggcggcagagctctgtggacagccggcagagccgcagcggccagggcggcatcagcacagaaagtgactgtgcctttgagccagactatgctgtgccccccctgcctgtgtctgaaggagatgctgagcaggagctgggccccccacccagcgtggatgaggccgccaacaccctgatgacccggctgggcttcctgctgggggagaaggtgacagaggtgcagcccggggaccagtacagcatggaggtgcaggatgagaaccagaccagcgccatcacccagaggatcagcccctgcagcaccctgaccagcagcacagccagccccccagccagcagcccctgcagcaccctgccccccatcagcaccaatgccacagccaaggactgcagctatggagctgtgaccagccccaccagcaccctggagagccgggacagcggcatcatcgccaccctgaccagctacagtgaaaatgtggagaggaccaagtatgctggggagagcagcaaggagctgggcagcggcggcaacatcaagccctggcagagccagaagagctccatggacagctgcctgtacagagtggatgagaacatgacagccagcacctacagcctgaacaagatccctgagaggaacctggagaccgtgctgagccagagcgtgcagagcatccccctgtacctgatgccccggcccaacagcgtggccgccaccagcagcgcccacctggaggacctggcctacctggatgagcagaggcacacccccctgcggaccagcctgaggatgccccggcagagcatgggcggggcccggacccagcaggacctgcgggtgcgctttgccccctaccggcccccagacatcagcctgaagcccctgctgtttgaggtgcccagcatcaccacagaatctgtgtttgtgggccgggactgggtgttccatgaaattgatgcccagctgcagagcagcaatgcctctgtgaaccagggcgtggtgattgtgggcaacatcggctttgggaagacagccatcatcagccggctggtggccctgagctgccacggcaccaggatgaggcagatcgccagtgacagcccccacgccagccccaagcacgtggatgccaaccgggagctgcccctgacccagcccccatctgcccacagcagcatcaccagcggcagctgccccggcaccccagagatgagaagacggcaggaggaggccatgaggcggctggccagccaggtggtggcctaccactactgccaggccgacaatgcctacacctgcctggtgcctgagtttgtgcacaacgtggccgccctgctgtgccgcagcccccagctgacagcctaccgggagcagctgctgcgggagccccacctgcagagcatgctgagcctgcggagctgtgtgcaggaccccatggccagcttccggcggggcgtgctggagcccctggagaacctgcacaaggagaggaagatcccagatgaggacttcatcatcctgattgatggcctgaatgaagctgagttccacaagccagactatggagacaccatcgtgtccttcctgagcaagatgattggcaagttccccagctggctgaagctgattgtgacagtgaggaccagcctgcaggagatcaccaagctgctgcccttccaccgcatcttcctggaccggctggaggagaatgaggccatcgaccaggacctgcaggcctacatcctgcaccgcatccacagcagcagcgagatccagaacaacatcagcctgaatggcaagatggacaacaccaccttcggcaagctgagcagccacctgaagaccctgagccagggcagctacctgtacctgaagctgacctttgacctgattgagaagggctacctggtgctgaagagcagcagctacaaggtggtgcctgtgtccctgtctgaggtgtacctgctgcagtgcaacatgaagttccccacccagagcagctttgacagagtgatgcccctgctgaatgtggccgtggccagcctgcaccccctgacagatgagcacatcttccaggccatcaatgccggcagcattgagggcaccctggagtgggaggacttccagcagaggatggagaacctgtccatgttcctgatcaagagaagagacatgaccaggatgtttgtgcaccccagcttccgggagtggctgatctggagggaggagggggagaagaccaagttcctgtgtgaccccaggagcggccacaccctgctggccttctggttcagccggcaggagggcaagctgaaccggcagcagaccatcgagctgggccaccacatcctgaaggcccacatcttcaagggcctgagcaagaaggtgggcgtgagcagcagcatcctgcagggcctgtggatctcctacagcacagagggcctgtccatggccctggccagcctgaggaacctgtacacccccaacatcaaggtgtcccggctgctgatcctgggcggggccaacatcaactacagaacagaggtgctgaacaatgcccccatcctgtgtgtgcagagccacctgggctacacagagatggtggccctgctgctggagtttggagccaacgtggatgccagcagcgagagcggcctgacccccctgggctatgctgctgctgctggctacctgagcatcgtggtgctgctgtgcaagaagagggccaaggtggaccacctggacaagaatggccagtgtgccctggtgcacgccgccctgcggggccacctggaggtggtgaagttcctgatccagtgtgactggaccatggccggccagcagcagggcgtcttcaagaagagccacgccatccagcaggccctgattgctgctgcctccatgggctacacagagatcgtgtcctacctgctggacctgcctgagaaggatgaggaggaggtggagcgggcccagatcaacagctttgacagcctgtggggcgagacagccctgacagctgctgctggccggggcaagctggaggtgtgccgcctgctgctggagcagggcgctgctgtggcccagcccaacagaagaggagctgtgcccctcttcagcacagtgcggcagggccactggcagatcgtggacctgctgctgacccatggagcagatgtgaacatggctgacaagcagggccgcacccccctgatgatggccgccagcgagggccacctgggcaccgtggacttcctgctggcccagggcgccagcatcgccctgatggacaaggagggcctgacagccctgtcctgggcctgcctgaagggccacctgtctgtggtgcgcagcctggtggacaatggagctgccacagaccacgccgacaagaatggaagaacacccctggacctggccgccttctatggagatgctgaggtggtgcagttcctggtggaccacggggccatgattgagcacgtggactacagcggcatgaggcccctggacagagctgtgggctgcaggaacacctctgtggtggtgaccctgctgaagaagggggccaagattggctgccagaccctgcccagccggccccggggccctgccacctgggccatggccaccagcaagccagacatcatgatcatcctgctgagcaagctgatggaggagggggacatgttctacaagaagggcaaggtgaaggaggccgcccagcgctaccagtatgccctgaagaagttcccccgggagggctttggagaggacctgaagaccttccgggagctgaaggtgtccctgctgctgaacctgagccgctgcaggaggaagatgaatgactttggcatggccgaggagtttgccaccaaggccctggagctgaagcccaagagctatgaggcctactatgcccgggcccgggccaagaggagcagccggcagtttgctgctgccctggaggacctgaatgaggccatcaagctgtgccccaacaaccgggagatccagaggctgctgctgcgggtggaggaggagtgccggcagatgcagcagccccagcagcccccacctccaccccagccccagcagcagctgcctgaggaggccgagcctgagccccagcacgaggacatctacagcgtgcaggacatctttgaggaggagtacctggagcaggatgtggagaatgtgtccatcggcctgcagacagaggcccggcccagccagggcctgcccgtcatccagagcccccccagcagccccccccaccgggacagcgcctacatcagcagcagccccctgggcagccaccaggtgtttgacttccgcagcagcagctctgtgggcagccccacccggcagacctaccagagcaccagccctgccctgagccccacccaccagaacagccactaccggcccagccccccccacaccagccctgcccaccagggcggcagctaccgcttcagccccccacctgtgggcggccagggcaaggagtaccccagccccccacccagccccctgcggcggggcccccagtaccgggccagccccccagctgagagcatgtctgtgtaccgcagccagagcggcagccctgtgcgctaccagcaggagacctctgtgtcccagctgcccggccggcccaagagccccctgagcaagatggcccagaggccctaccagatgccccagctgcctgtggccgtgccccagcagggcctgcggctgcagcctgccaaggcccagatcgtgcgcagcaaccagcccagccctgctgtgcacagcagcaccgtcatccccaccggggcctacggccaggtggcccacagcatggccagcaagtaccagagcagccagggcgacattggagtgtcccagagccggctggtgtaccagggcagcatcggcggcatcgtgggagatggccggcctgtgcagcacgtgcaggccagcctgtctgctggggccatctgccagcacggcggcctgaccaaggaggacctgccccagaggcccagcagcgcctacagaggaggagtgcgctacagccagaccccccagatcggccgcagccagagcgccagctactaccctgtgtgccacagcaagctggacctggagaggagcagcagccagctgggcagcccagatgtgagccacctgatccggcggcccatctctgtgaaccccaatgagatcaagccccacccccccaccccccggcccctgctgcacagccagagcgtgggcctgcgcttcagccccagcagcaacagcatcagcagcaccagcaacctgacccccaccttccggcccagcagcagcatccagcagatggagatccccctgaagccagcctatgaaagaagctgtgatgagctgagccctgtgagccccacccagggcggctaccccagcgagcccaccaggagcaggaccacccccttcatgggcatcatcgacaagacagcccggacccagcagtacccccacctgcaccagcagaacagaacctgggccgtgtcctctgtggacacagtgctgagccccaccagccctggcaacctgccccagcctgagagcttcagcccccccagcagcatcagcaacatcgccttctacaacaagaccaacaatgcccagaatggccacctgctggaggatgactactacagcccccacggcatgctggccaacggcagcagaggagacctgctggagcgggtgtcccaggccagcagctacccagatgtgaaggtggcccggaccctgcctgtggcccaggcctaccaggacaacctgtaccggcagctgagccgggacagccggcagggccagaccagccccatcaagcccaagaggccctttgtggagagcaatgtgtag

SEQ ID NO: 317391 - DNA, 6003 bp, Artificial Sequence
  derived and/or modified sequence
atgttccggaacagcctgaagatgctgctgaccggcggcaagagctctcggaagaacaggtcgtcagacggcggcagtgaggagcccccggaccgtcgccagtcttccgttgacagtcggcagtcacgctcaggccagggcggaattagtactgaaagcgattgcgcctttgaaccagactacgctgtcccgcctttgccggtttcagaaggcgatgcagagcaggaattgggcccgcctcccagcgtagatgaagcagcaaacaccttaatgacacgccttggctttctgttgggcgaaaaagtaacagaggttcagcccggcgaccagtattctatggaggttcaggacgaaaatcagacgtcagcgattacccagcgcataagtccatgcagcaccttgacgtcatcgaccgcgtcccccccggcctcctctccttgcagtacactgcccccaatctccacgaacgcaacggccaaagactgcagctacggggccgtcacaagcccaacaagcaccctggaatctagagattccgggattattgccaccctcactagctatagtgaaaatgtcgaaaggacaaagtacgctggagaatcttcaaaagagcttggcagtggaggcaacataaaaccatggcagtcccagaagagttccatggactcttgcctgtatcgcgtggatgaaaacatgacagcctccacgtatagcctgaataagatcccagagaggaatctggagaccgtgctctcacagtccgtccagtccatccctttgtatctgatgccccgccctaatagtgtggctgccacaagttccgcccatctcgaggaccttgcctatctggatgagcagcgccatacacccttacgtacatcgctccgcatgcctcggcaatctatgggcggggcacggacccaacaggacttgcgagtccgcttcgctccgtacagaccccccgacattagcctgaaaccccttctctttgaagtgccctccatcaccactgagagtgtgttcgtgggtcgagactgggtgttccatgaaatcgacgcccagctgcagagtagcaatgctagcgtaaaccagggggtggtcatagtggggaatatcggattcggaaagacagcgattatcagcagattagttgctttgtcctgtcacggtaccagaatgagacagattgcttcagacagtccacatgcgtctcccaaacatgttgatgccaaccgagagctccctcttacccagcctcctagcgcccacagttccatcacctctgggtcttgcccagggacacccgaaatgagaagaagacaggaggaggccatgcgaaggctcgccagtcaagtggtcgcctaccactattgtcaggctgataatgcatatacctgtctggtgcccgagtttgtgcataatgtagccgctctcctttgcaggtctccccagttgaccgcctaccgcgagcagctgttacgagaaccacacttgcagagtatgttatccctgagatcatgtgtccaggaccccatggccagctttcggaggggagttctggaacccctggaaaatctccataaagaaaggaagattcctgatgaagatttcatcattttgatagacggtctgaatgaggccgagtttcataagccagactatggggataccattgtgtctttcctttccaaaatgattggaaagtttcccagttggttgaagcttatagtgacagtgcggacatcactgcaggaaataactaaactccttcccttccacagaatttttctggaccggctggaggaaaacgaggcaatagaccaagatctgcaagcctatattttgcatcgaattcactcaagtagcgagattcagaacaatattagtctaaacggaaagatggataatacaacgttcggcaagttgagcagccatcttaagaccctgagccagggctcttatctctaccttaaactgactttcgacctgatcgagaaggggtacctggtgctgaaatcatcctcgtacaaggtggtgccagtcagtttatcagaggtctacctcctacagtgtaatatgaaattccctactcagagctcttttgaccgagttatgcccctgcttaacgtagctgtcgcatcactgcatcccctgacagatgaacacatatttcaggccatcaatgcgggctccatcgagggaacccttgaatgggaagatttccagcagaggatggagaacctgagcatgtttcttatcaaaagacgggacatgacccggatgttcgtacacccatcattccgggagtggcttatatggagagaggagggcgagaagacaaagtttctgtgcgaccccaggtcgggacacacactgttagccttctggttcagtcgccaggagggcaaacttaatcggcagcagacaattgagctggggcatcacatcctgaaggcccatatttttaagggactgagcaagaaggttggggtgtcatcaagcatcttgcaaggattatggatttcatactcaactgaggggttgtccatggccttggcttccttacgcaatctctacacccctaacatcaaagtcagcaggttgctcatactgggcggggccaatattaattaccgcaccgaggtgctcaataacgcccccatcctgtgtgtgcagagccacctgggttataccgaaatggtggcgctgctgctcgaatttggggcaaatgtcgacgcatccagcgaaagtggactaacccccctgggctatgcagcagcagcagggtacctatccatcgtcgttctgttatgcaagaagcgggccaaagtggatcacttggataagaacggacagtgcgccctcgtgcatgccgccctgagagggcatctggaagtggtaaaattccttatccagtgtgactggaccatggccggtcagcagcagggcgttttcaagaagagccacgcaatacagcaggcacttatcgcagccgccagcatgggctataccgaaatagtatcttacttgctggacctgcctgaaaaagatgaggaggaggttgaacgtgcgcagatcaactcatttgactctttatggggcgaaactgcgttgacagcagcagctgggcggggcaaattagaagtttgtagacttctgctggagcagggtgccgccgtggcccagcccaaccgaaggggagccgtccctttgttctcaaccgtgcgccaaggtcactggcagattgtggacttactcctgacccatggtgccgacgtcaatatggccgataaacagggacgcactcccctgatgatggccgcttctgaaggacacctaggtacagtagatttcctgctggcccaaggcgccagcatcgcgctgatggacaaggaggggctgacggctctttcatgggcctgcctgaagggccacttaagtgttgtgagatctctcgtggacaatggcgccgctacggatcacgcagacaagaatggcagaacccctctcgacctggccgccttctacggcgatgcagaggtagtgcagttcctggtcgaccacggtgcgatgattgaacacgtggactattccggtatgcggccactggatcgcgctgtcggatgtagaaatacatccgttgtggtaaccctgctgaaaaagggcgccaaaataggctgccagacgctcccaagccgtcctcggggacccgctacctgggccatggcaacatcaaagccagacatcatgatcatccttctttctaaactgatggaggaaggagatatgttttacaaaaaaggcaaagttaaggaagccgcgcagagataccaatacgccctgaaaaagtttcccagagagggattcggcgaggacctcaaaaccttccgagaactgaaagttagcttactacttaatctgagcagatgccggcgaaaaatgaacgatttcggtatggctgaagagttcgccactaaggcacttgaactgaagccgaagagttatgaagcctactacgctagggccagggctaagagaagctcaagacagttcgccgccgcattggaagaccttaatgaagccatcaaactttgtcccaacaatagggaaattcaaaggctgttactcagagtagaggaagagtgcaggcagatgcaacagccacaacagccacctcctcctccccagccacagcaacagcttccggaggaagccgaacctgagcctcagcacgaagatatctattcagtccaggacatttttgaggaagagtacctcgagcaagacgtcgagaatgtgagcatcggcctacagactgaggcccgtccctcgcaggggctccctgtgatccagtcaccaccatcatcgccccctcacagggattcagcatatatctcttcgtcacctctgggatcacaccaagtgtttgatttccggtctagctcttctgtcgggtctcctactagacagacgtatcagtccacgtcgccagcactctctcccacacaccagaactcccattatcggccgtcgcctccccacacgagtcccgcacatcagggcggttcctacaggttcagccctcctcccgtcgggggccagggcaaagaatacccgtcccctcctccttctcctttaagaagagggccccagtaccgggccagtccacctgccgagtccatgtccgtatacagatcccagtccggctctccggtgcggtatcagcaggagacatcagtgtctcagctgccaggcaggcctaaatcgccactgtctaagatggcccaaaggccgtaccagatgccccagctgcccgttgctgtccctcagcaagggctgcgcctccagcctgcaaaggcccagattgtgagatcgaaccagcccagcccagctgtgcattctagcactgtcattcctacaggcgcttacggacaagtggcacattctatggcgagtaagtaccagtcgagccagggggacatcggtgtttcccaaagcaggctggtgtaccaaggtagtatcggcgggatcgtgggtgatgggagacctgtgcagcatgtgcaggccagcctaagcgccggcgccatctgtcagcacggtgggttgacaaaagaggatttaccgcagcgtccaagtagtgcttaccggggcggggttcggtactctcaaactccacagattggacgctcgcagagcgcttcatactatccggtgtgtcacagcaaactggaccttgaacgctcaagcagtcagctagggagccctgacgtgagtcatctgataagaaggcccatctccgttaatccaaacgagatcaagcctcacccgcctactcctaggcccctgctgcactcccaaagtgtggggcttaggttctccccatctagcaactccatctcaagtaccagcaatctgactcctacattcaggccctcctcttcaatccagcagatggagataccactgaaacccgcatacgaaagaagctgtgacgagttgtcacctgtgagtccaactcagggtggctatcccagcgagcctactagaagcaggaccaccccctttatgggcattatcgataagactgctaggacccagcagtatcctcacctgcaccagcagaacaggacttgggcagttagcagcgtggacaccgttcttagcccaacatcgcccgggaacttaccccagcctgaaagcttttcaccacccagttcaatttctaacatcgcgttctacaataagacaaacaatgcacagaacggtcatctcctggaggatgactattacagtccacacggcatgcttgccaacggatccaggggtgatctcctggagagggtctcacaagcgtctagctacccagacgtgaaggtcgcccgaactttgccagttgcgcaggcgtatcaagataatctctaccggcagcttagtagagattcccgccagggtcagacatccccaatcaagccaaagcgcccctttgtggagtctaatgtctag

SEQ ID NO: 317392 - DNA, 6002 bp, Artificial Sequence
  derived and/or modified sequence
atgttccgaaacagcctgaagatgctgctaacaggcggtaaatcttctcgaaaaaacagatcttctgatgggggaagcgaggagccccctgaccgccgtcagagtagtgtcgacagcagacagtctcggagtggacaaggaggaatatccacagaatccgactgcgcctttgagccagattatgctgttcccccactgccagtctctgagggcgacgcggaacaggagttgggacccccaccttctgttgatgaagcggctaacactctgatgacccgtctcgggtttctgctgggcgaaaaagttaccgaagtacagccaggcgatcagtactctatggaagttcaggatgagaatcaaaccagcgccatcacccagcgcatctccccatgttcaaccttgacaagctcaactgcgtccccacccgcttccagtccctgcagcacgcttccgcctattagcacaaacgcgacagccaaggattgcagttacggcgctgtgacgagcccaacgtcaaccctcgaaagtagagattcaggcattattgccactttaacttcatatagtgagaatgtcgagagaacaaagtatgcaggtgaaagtagcaaagaactcggtagcggagggaatattaagccgtggcagagccagaagagtagtatggattcttgcctctatcgtgtggacgagaatatgacagcgagcacatattccctcaataagatccccgaacggaatcttgagacagtcctgtcccagtctgttcagtcaatacctctatatctcatgccacgacctaatagcgtggcagcaacctcttctgcccacttggaggatctcgcctaccttgatgaacagaggcacactcctctgaggaccagtctcagaatgccgagacagagtatggggggtgcgcgtactcagcaggatctgagagtcagatttgcaccatacaggccccctgatatttccttgaagccactcctatttgaggtccccagcatcactaccgagtcggtcttcgtcggaagagactgggtgttccacgagattgacgctcaactccagagcagtaacgcgagtgtcaaccagggggtggtcatcgtcgggaacattgggttcgggaagacagccataatcagcaggcttgtagctctgtcttgccacggaaccaggatgcggcagatcgcgtcggactcaccacatgcttccccgaagcatgtcgatgctaatcgcgagctgcctctgacacagcccccttccgcccatagtagcattacctctggttcctgccccggtacgcctgaaatgagaaggcggcaggaggaagcaatgcggagactggccagccaggttgtcgcataccattattgtcaggccgataatgcctacacctgccttgttccagaatttgtgcataatgtagccgctctactgtgccgaagcccgcaactcacagcttaccgagaacagctcctgagggagccgcatctacagtcaatgctctccctcagatcctgtgttcaagatccgatggcctcattccggcgaggcgtgctggaaccattagaaaacctgcacaaggaaaggaaaatacccgacgaggacttcatcatcctgatcgacgggttgaatgaggccgagtttcataaaccggattacggtgatactatcgtctcatttctgtcgaaaatgattggcaaattcccaagttggctaaagctgatcgtgaccgtcagaaccagcttgcaggaaattacgaagcttctgcctttccaccgtattttcctagatcgcctggaggaaaacgaagccattgaccaagacctacaggcctacattctgcataggattcactcatccagtgagattcagaacaacatttctctcaacgggaaaatggataatactacgtttggtaagctctcctcacacctgaagacactaagccagggatcttacctctatctcaagctgacattcgacctgatcgaaaaaggctaccttgtcctgaaaagttcctcttataaggtggtccctgtgagccttagcgaggtttatttgctgcaatgtaacatgaagttccctacgcagtcctcctttgacagagtcatgcctctgctgaacgttgctgtggcgagtctgcatcctctgacagatgagcatatctttcaagcaatcaatgccggatctatcgaaggaactctggagtgggaagattttcaacagaggatggagaacctcagtatgtttcttatcaaaaggcgcgatatgactagaatgttcgtgcacccttcgttccgggagtggctcatctggagagaagaaggagaaaagacaaaatttctgtgtgaccctcgatccggccacaccctgctcgcattctggttctcgcgacaggaaggaaagctgaatcgccagcaaactattgagctgggccaccacatactcaaagcccatatttttaaaggactgtcaaaaaaagttggggtgagcagtagtatccttcaaggtctctggataagttactccactgagggactgagtatggctctggcttcactgagaaatctttacacacccaacatcaaagtttctcggctcctgatcctgggcggagcaaacatcaattatcggacagaggttctcaacaatgctccaatcctttgcgtgcagtcccacctcggatacacagaaatggtcgcgctcctgctggagtttggcgcaaacgtagacgccagctctgagtctggcctcaccccgctggggtatgcggcagccgctggatacctttctatcgtggtgcttttatgtaagaagcgggcaaaagtggatcacttggataaaaatggccagtgcgccctcgtccacgcagctctgaggggccatctcgaagtggtcaaattcctgatccaatgtgactggactatggccggtcagcagcagggagtgttcaagaaatctcacgccatccagcaggccctgatcgcagcggcatctatggggtacactgaaatagtgagttatttgcttgacctgcctgagaaggacgaagaggaagtcgagagagcccagatcaacagctttgactctctttggggggaaaccgccttgactgcggcagcgggacgcggaaaactcgaggtttgccgtcttctgctcgaacagggcgctgctgtggcccagcctaaccgcaggggtgctgtgccactcttttctacagtcaggcagggccactggcagatcgtcgatctgctactgacccacggagccgatgtaaacatggctgacaaacaggggaggacacctcttatgatggctgccagcgaaggacatctgggcaccgtggattttcttcttgcccagggggcttctattgcccttatggataaggaaggcctaacggcgctgtcctgggcatgcctgaagggccatctctcagttgttagaagccttgttgacaatggggctgccactgaccacgccgacaaaaacgggagaacccctcttgatctggcggcattctacggagacgccgaagttgtgcagtttctggtagaccacggggcaatgatcgagcatgttgattattctggaatgagaccactcgaccgggcagtcggctgcaggaacacctctgtggtcgtgaccctgctgaaaaagggggctaagataggctgtcagacactgccctcccgcccaaggggtccagccacgtgggccatggccacgagcaagccagacatcatgatcattctattatccaagctgatggaggagggagatatgttttataagaagggcaaggttaaggaggctgcacaacggtatcagtacgctctaaaaaagttcccacgggaagggttcggcgaagacctgaaaaccttccgagagctcaaggtctctttactgctgaatctgagccgctgccgtcgcaagatgaacgattttggaatggccgaagagtttgccacaaaagccctggagctgaagccgaagtcttatgaagcttactatgccagggccagggccaagcgctcctctcgccagtttgctgccgctctcgaggacctgaatgaagcgattaagctatgtcccaacaatcgcgagatacagagactgcttctgcgagtggaagaggaatgcagacagatgcagcaacctcagcaaccgccacctccaccgcagcctcagcagcagcttcccgaggaagccgagcccgagcctcagcatgaagacatctacagcgtgcaggatatcttcgaagaagagtatctggaacaagatgtggagaacgtgagcatcggattgcagacagaggcccgaccctcccaagggttacctgttatccagagtccacccagcagccctccccaccgagacagcgcctatatttcctcatcaccactaggttctcatcaagttttcgacttccgatcctcgagttccgtaggaagccccacaaggcagacataccaaagtacatctcctgccctttcccccacccaccagaatagccattacagaccttcccctccgcacaccagtcctgctcatcaaggcggtagctataggttctccccacctccagtgggaggtcagggaaaggagtacccttcaccaccaccatcgcccctccgcagagggcctcagtaccgcgcaagtcctccagctgaaagcatgagcgtctatcggtcccagagtggctctcccgtgcgttaccagcaagagaccagtgtgagccaactacctggcaggcctaaatctcccctgagcaaaatggcccagcgaccataccagatgcctcagttgccggtcgcagtccctcaacaggggctcagattacagcctgccaaggcccagattgtgagatccaatcagccgtcccccgctgtgcattccagcaccgtcatccctactggcgcttatggacaggttgcgcacagcatggccagtaaatatcagtcatcacaaggagacatcggggtatctcagtctagacttgtgtatcagggttcaattgggggtattgtgggtgacgggaggcctgtgcagcatgtgcaggccagtctgtctgcaggcgcaatctgccagcacgggggactgactaaagaggacctcccccaaaggcccagtagcgcttatcgaggaggagtgcgctattctcagacaccccagataggcagaagtcaatcagcatcatattatccggtctgccactcaaagcttgatctggagaggagcagctctcagctgggttcacctgacgtgtctcacttaattcgtcgacctatctccgtgaatcctaacgaaattaagccccacccacctacccctaggccgcttttgcattcacagtcggtgggcctgaggttctcaccctcttcaaacagcatcagctcaacctccaatcttacccctacgttcaggccgagctcttccatccagcagatggaaattccactgaaacccgcatatgagcgctcttgcgatgagctatctccagtgagtcccacacaaggcggatacccatccgagccgacaaggtccaggactacccccttcatgggcattatcgacaagaccgcacggacccagcagtaccctcatctgcaccaacagaatagaacttgggcagtttctagtgtggatacagtcctctctccgacaagcccgggaaatctgccccaacctgagtcattttccccgccatcgagtatcagcaacatcgcattttataacaaaactaacaacgctcaaaacgggcacctcctggaggatgactactactcccctcatggcatgctggcaaacggatcacgtggcgacctgctcgagagggtgtctcaggcctcgagctacccagatgtgaaagtggcacgcaccctgccagtggctcaggcatatcaggacaatctttacagacagcttagccgcgactctagacaggggcaaacctctcccatcaagccaaagcgcccatttgtagaatccaacgttta

SEQ ID NO: 317393 - DNA, 11777 bp, Artificial Sequence
  derived and/or modified sequence
ttttgcagtagaagagtataaccatgtttcggaatagtctcaagatgctgcttactggtgggaaatcaagtcgtaaaaacaggtcaagtgatggagggagcgaggaaccaccggatcgaagacagtcaagtgtagactctcgccaaagccgctctgggcaaggtggcatctccacagaaagcgactgtgcttttgagccagactacgctgtcccgccacttccagtgagtgaaggtgatgctgaacaggagcttggcccccctccatctgtagatgaggcagcaaacacactcatgactcgtctgggtttcctccttggagagaaagtcacagaagttcagccaggtgaccaatacagcatggaagtacaggatgaaaatcagacctcagcaatcacccagcggataagtccttgttccactctgactagcagcactgcctctccaccagccagtagcccctgctctacactcccacccatcagtacaaatgcaactgccaaggactgcagctatggggctgttactagtccaacctctacccttgaaagcagagatagtggcatcattgctacattaacaagctattctgaaaatgtggaacgcacaaaatatgctggggaaagcagtaaagaattaggatctggaggaaacataaaaccttggcagtctcaaaaatccagcatggactcctgtttgtatcgagtagatgaaaacatgactgcttccacctatagtctgaataagatcccagagagaaatttggaaacagtgttatctcaatcagtacagtctattcctttgtatctcatgccacggccaaattcagtagcagccaccagctctgcccacttggaagaccttgcttacctggatgagcagagacatacacctttgagaacttctctacgaatgccaagacagagcatgggtggtgctcgcacacagcaggatttaagagttcgctttgcaccttataggcctccagatatctccttgaagcctctgctctttgaagtgcccagcatcactacagagtcagtgtttgttggccgagattgggttttccacgaaatagatgctcaacttcaaagttcaaatgccagcgtgaaccaaggagtagtgattgtgggaaacattggattcggcaaaactgccatcatctccagactggtggccctcagctgccatggtacaaggatgagacagatcgcctcagacagcccacatgcctcccccaaacatgtggatgccaacagagagctgccactcacacagccaccttcagcccactcatctatcaccagtggaagctgcccaggaactccggaaatgcgcaggcggcaggaggaggctatgcgaagactagcctcgcaggtggttgcctatcactattgtcaagcagataatgcctacacttgcttggtgccagaatttgtccacaatgttgctgccttgctctgccgctcacctcagctgacagcctatcgggagcagcttcttcgggaacctcacctgcagagcatgctgagccttcgttcctgtgttcaagaccccatggcctccttccggaggggagttctggagccactagaaaatctccataaagagagaaaaatcccagatgaagatttcatcattttaattgatggattaaatgaagcagaatttcacaaaccggattatggggatacaattgtatcgtttctgagtaaaatgatcggaaagtttccttcttggctcaaactaattgtaacagttaggaccagtttacaggaaattaccaagctgctgcctttccataggatttttttggatcgactagaagagaatgaagccatagaccaggacctgcaggcttacatcctgcaccggatacacagcagctcagagatccagaataacatttcacttaatggcaaaatggacaatactacatttggcaaactcagttctcatctcaagaccctcagtcaagggtcctatctatatctgaaacttacatttgacctcatagagaaaggctatctagtgttaaagagctctagctacaaagtagttcctgtttcgctctcagaggtttatttactccagtgcaatatgaagttcccaacccagtcttcctttgaccgggtgatgcctctcctgaatgtggcagtggcctctctccacccactgactgatgagcatatcttccaggccatcaatgctgggagcattgaaggcacactagaatgggaggattttcagcagagaatggagaacctctccatgttcctaatcaagcgcagagacatgactcgtatgtttgtacatccttcttttcgagaatggcttatctggagagaagaaggagagaaaaccaaatttctctgtgatccgaggagtggtcacacgttacttgccttctggttttcccgccaagagggaaaactaaaccgacagcagactattgaactgggacatcacatcctcaaagcacacatttttaagggtttgagtaaaaaagttggtgtatcatcctccatcctccaaggtctctggatctcttatagcacagaaggtctttccatggcactggcgtctttacgaaatctctacactccaaatataaaggtcagccgactgctgattttgggaggtgccaatattaattaccggacagaggttttaaataatgctccaattctatgtgttcagtcccatcttggttacacagaaatggtagccctgctgctggagttcggggccaacgtggatgcctcttctgaaagtggcctgactcccctgggatatgctgcagcagcagggtacctgagcattgtggtgctgctgtgcaagaaacgggccaaggtggatcatttggataagaacgggcagtgtgctttggttcatgctgcactccgaggtcatctggaggttgtcaagtttttgattcagtgtgactggacgatggccggccagcagcaaggagtatttaagaagagccatgccatccaacaggccctcattgctgcagccagcatgggttatactgagattgtctcctacctacttgatcttccagaaaaagatgaagaggaagtagagcgagcacagatcaacagctttgacagtctctggggagagacagccctaacagctgcagccggaaggggcaaactggaggtgtgccgtttgctcttggaacaaggggcggcagtggcccagccaaaccgccgaggagcagtgccactattcagcacagtgcgccagggccactggcagattgttgatcttttactcacccatggagctgatgtcaacatggcagacaagcagggccgcactcccctgatgatggctgcttccgaaggccatctaggaaccgtggactttctgcttgcacaaggtgcctccattgctcttatggacaaagaaggattgacagccctcagctgggcttgtttgaagggccatctctcagtagtacgttctctggtggataacggagctgccacagaccatgctgacaagaatggccgtaccccactggatctggcagctttctatggcgatgctgaggtggtccagttcctggtagatcatggggccatgatcgagcacgttgactacagtggaatgcgccctttggatagggcagtggggtgccggaacacttctgttgttgtcactcttctgaagaaaggagccaagataggttgtcagacgttaccgagtcgcccacgaggtccagccacatgggcgatggccacctccaagccagacatcatgatcatcctgttgagcaagctgatggaagagggggacatgttttataagaaaggtaaagtaaaggaagctgcccagcgctaccagtacgccctgaagaagttccctagagaagggtttggtgaggacttgaaaactttccgggaactaaaggtgtctctcctcctcaacctctctcggtgtcgcaggaaaatgaacgattttggaatggcggaggaatttgctactaaggccctggagctgaaaccgaaatcttatgaagcttactatgcgagagcaagggcaaaacgcagcagcagacagttcgcagcagccttagaggacctgaacgaggccatcaagctgtgtcccaacaaccgtgagatccagagacttctgctgagagtggaagaagagtgtagacagatgcagcagccacagcagccaccgccgccaccgcagcctcagcagcagttgccggaagaagcagaacctgagccacagcatgaagacatatactctgtacaggatatattcgaggaggagtacctggaacaggatgttgaaaatgtttccattggcctccagacagaggcccggcccagccaggggctcccggtcatccagagcccaccctcctctcccccgcatcgggactcagcctacatctccagctcacctcttggctctcatcaggtttttgacttccggtccagtagttctgtaggctctcccactagacagacctatcagtccacctcacctgccctttctccaactcatcagaactcacattacaggcctagcccaccacacacttccccggctcatcagggaggatcttaccgtttcagcccccctcctgtgggaggacagggcaaagaatacccaagccctcccccttcccctctccggagaggccctcagtatcgggccagccctccagctgaaagtatgagtgtctatagatcccagtctggttcacccgtgcgctatcagcaggaaacaagcgtcagtcagcttcctggcagacccaaatctccattatccaaaatggcccagcggccctaccagatgcctcagctccctgtggcagttccccagcaagggctcaggctacagcctgccaaggcccagattgtgagaagtaaccagcccagcccagccgtccattcaagcaccgtcatccccacaggagcctatggccaagtagcccattcaatggccagtaaataccagtcttcacaaggagacataggagtcagccagagccggttggtttatcaagggtcaattgggggaatcgtaggggatggaaggccggtgcagcatgtccaagccagcctgagtgcaggcgccatctgtcagcatggaggattgaccaaagaggatcttccacagcgaccttcctcagcataccgaggtggcgtgagatacagccagacaccacagatcggacgcagccagtcagcatcctattacccagtctgtcactcaaaactagatctggagcgctcctccagccaactaggttcccctgatgtgtcgcatttaatcagaagacctatcagtgtcaaccctaacgaaatcaaaccgcacccgccaactcccaggccgttgctgcattcccaaagtgtaggccttcgcttctctccatctagcaatagtatctcctccacctccaacctaactccgaccttccggccatcttcttccatccagcaaatggagatcccactgaaacctgcatatgagaggtcatgtgacgagctgtcgccagtgtctccaactcaaggaggttaccccagtgagcccacccgatccaggaccacaccattcatggggatcatagataaaacagcacggactcagcagtacccccacctccaccagcagaatcggacctgggcagtgtcatctgtggacaccgtcctcagtcccacgtctccaggcaacctgcctcagcctgagtccttcagtccaccatcatccatcagcaacattgccttttataacaaaaccaacaatgcacagaatggccatttgctggaggacgattattacagcccccatgggatgctggctaacgggtctcgtggagacctcttggagcgagtcagccaggcctcctcctatcccgacgtgaaggtagctcggactctacctgtggctcaggcataccaggacaacctgtacaggcagctgtcccgagactctcggcaagggcagacatcccctatcaaaccaaagagaccgttcgtggagtctaatgtttaaaagacgttttgttggagtgagacccatatgttttcactgcacattttcaggcttggtttccacattcgaggtagttctctggcttaatttctcatgtagtttctgtgtggtgttcagaggtggcagcccacatgctgaaatcctttgcatgcagccgactgggaagcggcctcccgggagccaggacttcagtttctcttgtctgtgcccagccacatgctctctccctctcttcagatgccaacgaggagattttcgtgctgtgtgctttaacccagggagatcagacacactggtcagctttttccaggagacaatcgctttcactgatgttcttgttgtgtaattgtctttttccttttttaaaaaataaggtgttcttgttcgttttcttctagaaactttagaaagagtgcgatgcccctttgcctttgcatccttagccagtgtcacccacacagccagccgcagcgcattctcatgctgtggcccctccccagaccgccagcgccctgcagccaccaggtctgcagtgtgcattaggattattgctggtcttcctagggggtaaaaggatcagagagagaagaattaagtgctaaattggaagaaaaccccaatataattatgtaaaatgtcactacattgattttccaagaggcattgtaggaacatgtcaaaaacagccagccctttaaatattgcagtcagccaaggaaattagatgagaattgtggctattaagagaattcactgagagttattctctagatttttagccgacaattaaccactaaaagctgctgcttttccagggtgggggagggaatgaatacatagaaaaacaaaaaagattgttctggattctcagtgaaaggctataggaagtctgttctggagacatctactttttagatcctgatacatcactgagtgtcatactccactaaaaggaaactctaaccgaaggctggctggtgtgacaatcccgttagttggatcttcacctacagccagattttgttctagtggccctcttcctgtaaacccagatggtgtcatacagaaattgtttctttcagaagcagattggaatctcttgggaccatgagactgagtcccaatatttccacccagggtcatgcccgttgttgtctacttccattttgagatctatagtttgattatctattattacaggaactgtttcttttctttttctaggagtgtttatgagagtgtgatattttaaagtcagacgcagcaaaaactgtttcagggtgaagaaagacccctttcagccctgttttgcagccctgggtgggggcatgagatagacagcaagcttctgatcttgaagcttgtctagaagacacatcttctaggtctcgtggtcatttggtaggctgacctttgagtgagcgaggccactattgagtggatagcaagaacattggaaccaaagcctcggcacaggcctggcactggctgtacatcagctcttacaactaaacaactcaactaagcaactgaaacgaaacaaaggagcattcgttctctgttgttaggaatcattctgctctgttagggaagggctgcaggaagggcagtttcctgaataaaaatctggctgcgaccagtcccatgtgtctggtaagtaagtaagtaagtaagtgccctttgaagggatcattaagacacagggagcatgaacctgagatcagaagcatttctttactaatttagattctgcgaaatagacggacctctccacccccaaacctaaaacaggccaggacttgtctctgtgctgaaagcaaatagcaagactaactcaagccccagcctctttccacactccctgatacctaaggactgctttctcagctagaccagggtgggcatcagcgacgccttctcagctagaccagggtaggcatcagcgtcctctctccatctctatacccctctctctcacatcaggaagatgaaatgtgtagctctagcggcaacctctagccaggagcccagtggcctctcagattgctttttggccaggtctcagcactgctggcatctttacatcttactccttaaaaccgcctctcgctgaggagccactgcattttgaagaatttctcagtgtctgtcaggaaagtgctcctgctcatttggaacgccacacaccacccgcactcacctgtccaggcgaatgagcaggtcctgtagctttacaaatatgccgctgatgccgcttctccccagggtctctcagttttccaggacaaaaagatttagggcctataccctatgggcaaaacacctaaaatgtcaacagtcaaaatgccattctttttggccatcataagagggagtaggtatcactgctgcatgccagttgtttttgactagaatatgccaaccagagcttgttggggcaggagacgtttttccttacaagcagactgcctgtgccctgtgccctgtttgctacttcactgccatggaatgatccgagtactgtatttcagagctgccccttccccagcagcaaacactcgctgagtccatgtctggcttcaggtgggaggaaatgtttcagatgaaacttactcaattcataccaccctgaaatggaggacagaggtgacaaacttcagtttaataggtttctcaccaagttgtatgttccattggcccaggattcttgcactaatgggtttctatcacatcatgtctataaatgggtgcactttactgtttgaatttgtaactgaagtactggatatttaagtgtgagtaatgtcttcattagaaaatagcagaaccgctcttgtcttttagtgtatttttcaagaaaaaaggaaaggaaagacatcaagcagtggatcacaacatttatagcacaagaaataacttgtatataagcatcaaaaagattaagaattttttaatatgaaaaatatttgcagtgattttaaagtgcttttccagcaatgttcttagggactcctgagacacggttactttatctactggatcagtaaggcacacaattaacaattaacaattaatgtttatttacaaagtaaagggaaaacctgtgtaacatgagaatttggcatgacaaaatggagaccattttgtatctgctgttgtatcttgtccgggttgcagacgtgcactattaaagtcccaagttaatagagcacaaacccttctcgctcctcccccatgtgcccctctttttagatgtgtataacttaaactcgatggctcaggaaaattccactaattagaatcatgtacagtaccccaggtcgttgtccagatatacaagtttgctaatgtagttaagcctggattattaaacacttttcctaaattattgtaaacagaacagcttagagaaaggtattctcagtccttaatattgtatagtagtttatgagcccctctctaaatattggtatttttatattccagagatgtacccaatagaaaaaattaaaaattaatcagtatctaatttaatatccataagtatttttccttagattttagtcacgtacagtgggctatgtggatgtcacttgtgcttcaccatagtttaccactaggtgtcactgtggctctgcactgcgcttgttttgtagcaaagaacagcggcatcccctcgggagagaggagctgcttccagggcaacaggcaagcgggctcagaggttcaggagaaggcaacagaggcctggaaggggtcttcgtgcatctgtgccagttgtgcaagacgaactctttgaacactacatgctttggacttcagccaggcagaggctggaagaaggttgaccagagctcccttgctctggtagagggatgggtacatggagaagccccttcttccccatgagcctccctcctgtcagttcctctcagcctccagcttttataactccagaagcgtcacagttgggtggtttgattcagagagagttatttttctactgcagaaatgccttggacaaaaccagtgctcactgaatctttgccacaaaatggaataggctatcccagggggcaagaggtgcccgcccctgtgcccagcctcctcttgatgctcccagtgcccagcagcctcgcacaccctgcctgtctgttcctgggctgcccatttctcaagaaaccgacctgcaaaggcagccggctgctgcctccacaccgagggctgtgcggtcctgctgctcgctcactgggaggtgcagctctttctcctcttcctctaggaattccagaccgaccatctaccatgactaacaacaatgaacaaagggcttaggggcaagagctacctgcaaagacgtgtcatggaacccttcaccatgcaatgccttgaactcagctctggctgctcccaagaaaaggtggctggctgggggcctggacacaagcacaatggggctggtggagccactgtgcagagctacttgaataatcactgggttttcatcaactccttttgtcatacagaccactcaagggctgaagtgttggtaaccttcatttcggtgtccaaagcctcacagcaggtgagccaccctgagatgcttgtggccacatggtggccacagtcagagctttgaaagtcagtaccaaatgaacgcataattggacaccaaaaatcaagtgttactttcatgtttcctcaccccatcatctcattgcctcctgctgactctgataccgacgctgagctgacttgccaggctgccgctggacgcgtagagatcaggccagcgccgcgctcatttttccaggtagacctactctgtggaacggaagtgccctagctgctttgtttttgtagcacttgctggctgaatttttcttttgctaatcgctaaccagaaagtctggttagagggggctcaactcaatccctttggtccccagcgccagacaagagttaattctggaaaattcagtacttgaatgtacctgccttattgcataccaatttactggggggaaaaaaaaagttaagagatgccggctccagatctccacttcattcacaggtgattttggaaatcctgtaagttacacttcctgttctggttttgttttgttttttgtttcctttggctgattcctgctgagtgaggccagttcctcatcaggctcagggcaggtgccttttcaggcgtggcctcctttccatctagcacagcatctttgtctctgttctgtctcctccaaatccaagatgattttaattagtacagacatgtacagtctacaattaaagagtgatttgtactaatatgattttgattcttcctcctctttgctgtcctttcaagacacttgctggaaaaagctttaatgcacttagttttcctttaggttttctatgactcagatgtaaaggactttctctgtacagtatattatccaatgcatgtttgttctctctcctgatatattgaacaccacacagttgtgaagccgtgcagtggggatgccccacaccccacagaggcatctacccctgtgtataaggaaagacattttcctttgctgtacttgcttgagcagttttattgtctgtacatgtgagctgtgtgagatagatgtgaaaagttcaaatgaatgcattttcctgccccatgtatacagattgtcatctgtacaaggaactgtatgtatgaaagcaaatgtacttatttataaatggctaacacttggaaaacca

SEQ ID NO: 317394 - protein, 213 aa, Artificial Sequence
  derived and/or modified sequence
MASFPPRVNEKEIDGSYFAWSQGHRTVKLVPWSQCLQNFLLHGTKNVTNSSSLRLPRQNSDGGQKNKPREHIIDCGDIVWSLAFGSSVPEKQSRCVNIEWHRFRFGQDQLLLATGLNNGRIKIWDVYTGKLLLNLVDHTEVVRDLTFAPDGSLILVSASRDKTLRVWDLKDDGNMMKVLRGHQNWVYSCAFSPDSSMLCSVGASKAVVAAILV

SEQ ID NO: 317395 - DNA, 642 bp, Artificial Sequence
  derived and/or modified sequence
atggccagcttcccccccagagtgaacgagaaggagatcgacggcagctacttcgcctggagccagggccacagaaccgtgaagctggtgccctggagccagtgcctgcagaacttcctgctgcacggcaccaagaacgtgaccaacagcagcagcctgagactgcccagacagaacagcgacggcggccagaagaacaagcccagagagcacatcatcgactgcggcgacatcgtgtggagcctggccttcggcagcagcgtgcccgagaagcagagcagatgcgtgaacatcgagtggcacagattcagattcggccaggaccagctgctgctggccaccggcctgaacaacggcagaatcaagatctgggacgtgtacaccggcaagctgctgctgaacctggtggaccacaccgaggtggtgagagacctgaccttcgcccccgacggcagcctgatcctggtgagcgccagcagagacaagaccctgagagtgtgggacctgaaggacgacggcaacatgatgaaggtgctgagaggccaccagaactgggtgtacagctgcgccttcagccccgacagcagcatgctgtgcagcgtgggcgccagcaaggccgtggtggccgccatcctggtgtag

SEQ ID NO: 317396 - DNA, 642 bp, Artificial Sequence
  derived and/or modified sequence
atggcatcctttcctcctcgggttaacgaaaaggagatcgatggctcatacttcgcttggtcacaaggtcataggactgtgaaacttgtgccttggagtcagtgcttgcagaacttcctgctgcacggcacgaagaatgtcacaaatagcagttctctgcggcttccaagacagaattcggatggtggacagaagaataagccccgagagcatatcatcgactgtggtgacatcgtttggagtcttgccttcggatcttcagtccctgagaagcagagtagatgcgtgaatattgagtggcatcgcttccgcttcggtcaagatcagcttctgcttgccaccggcttaaacaatggccgcatcaagatctgggacgtctacactggcaagctcctgctgaatttggtcgaccacacagaggtagtgcgggatcttactttcgctcccgatgggtccctaattcttgtttcagcctcccgagataaaacactaagagtctgggatctcaaagatgacggcaatatgatgaaggtactccgcggacaccagaattgggtgtactcatgcgccttcagcccagattcgtccatgctttgtagcgtgggcgcatccaaggcagtagtggccgctattctggtatag

SEQ ID NO: 317397 - DNA, 642 bp, Artificial Sequence
  derived and/or modified sequence
atggccagcttccccccccgggtgaatgagaaggagattgatggcagctactttgcctggagccagggccacaggacagtgaagctggtgccctggagccagtgcctgcagaacttcctgctgcacggcaccaagaatgtgaccaacagcagcagcctgcggctgccccggcagaacagtgatggcggccagaagaacaagccccgggagcacatcatcgactgtggggacatcgtgtggagcctggccttcggcagctctgtgcctgagaagcagagccgctgtgtgaacatcgagtggcaccgcttccgcttcggccaggaccagctgctgctggccaccggcctgaacaacggccgcatcaagatctgggatgtgtacaccgggaagctgctgctgaacctggtggaccacacagaggtggtgcgggacctgacctttgccccagatggcagcctcatcctggtgtctgccagccgggacaagaccctgcgggtgtgggacctgaaggatgatggcaacatgatgaaggtgctgcggggccaccagaactgggtgtacagctgtgccttctccccagacagctccatgctgtgcagcgtgggcgccagcaaggctgtggtggccgccatcctggtgtag

SEQ ID NO: 317398 - DNA, 642 bp, Artificial Sequence
  derived and/or modified sequence
atggccagcttccccccccgggtgaacgagaaggagatcgacggctcatattttgcttggagtcaaggacaccggaccgtgaaactggttccatggtctcagtgcctgcagaacttcctgcttcatggaacaaagaacgtcaccaattcctctagcttgagacttccacgtcagaattctgacggcggtcagaaaaataagccccgggagcacatcatagattgcggtgatattgtgtggtcccttgcattcggctcatccgtccctgagaagcagagccggtgtgtgaatattgaatggcaccggttcagattcgggcaagatcagttactcctggctacaggcctgaacaacggcagaataaaaatctgggacgtatatacaggaaaactgctgttaaacttggtcgaccacaccgaggtagttcgtgatctgaccttcgcacctgatgggtccctcattctggtgtctgcctccagggataagactctcagagtttgggacctgaaggacgacgggaacatgatgaaggtactccgcgggcatcagaactgggtgtactcttgcgctttttctcccgactcctcaatgctttgttccgtgggagcatctaaggccgtggtcgccgctatacttgtatag

SEQ ID NO: 317399 - DNA, 642 bp, Artificial Sequence
  derived and/or modified sequence
atggctagcttcccgccaagggtgaatgagaaagagatcgacggatcttactttgcttggtctcaaggacacaggacagtaaaattggtgccatggtcgcagtgtctacagaattttctgctgcacgggacgaaaaacgtgactaattccagcagtctccggctgccaagacaaaattccgacgggggacagaagaataaacccagggaacacatcatcgactgtggagatatcgtctggtctctcgctttcggctcctctgtcccagaaaagcaatcccgatgtgtcaacatcgagtggcacaggttcaggttcggtcaggaccaactcctcctggcaaccggcctaaacaacgggagaataaagatttgggacgtatatacagggaagttgctgctgaacctggtcgaccacacggaagtcgtgagagacctgacatttgcccctgacggatctctgatacttgtcagtgctagtcgtgataaaaccctgagggtatgggatctgaaagacgacggtaatatgatgaaggtgctccgaggccatcagaattgggtatattcttgcgcctttagccccgactcttcaatgctgtgctcagttggagcaagtaaggcggtggtggccgcaattctagtttag

SEQ ID NO: 317400 - DNA, 1149 bp, Artificial Sequence
  derived and/or modified sequence
agtgtctcgtttgcagtcggcgctttaggggaactgtcttcctccgcaggcgcgaggctgggtacagggtctattgtctgtggttgactccgtactttggtctgaggccttcgggagctttcccgaggcagttagcagaagccgcagcggccgcccccgcccgtctcctctgtccctgggcccgggagggaccaacttggcgtcacgcccctcagcggtcgccactctcttctctgttgttgggtccgcatcgtattcccggaatcagacggtgccccatagatggccagctttcccccgagggtcaacgagaaagagatcgatggttcatactttgcttggtcacaaggacatcgcacagtaaagcttgttccgtggtcccagtgccttcagaactttctcttgcatggcaccaagaatgttaccaattcaagcagtttaagattgccaagacaaaatagtgatggtggtcagaaaaataagcctcgtgaacatattatagactgtggagatatagtctggagtcttgcttttgggtcatcagttccagaaaaacagagtcgctgtgtaaatatagaatggcatcgcttcagatttggacaagatcagctacttcttgctacagggttgaacaatgggcgtatcaaaatatgggatgtatatacaggaaaactcctccttaacttggtagatcatactgaagtggtcagagatttaacttttgctccagatggaagcttgatcctggtgtcagcttcaagagacaaaactctcagagtatgggacctgaaagatgatggaaacatgatgaaagtattgagggggcatcagaattgggtgtacagctgtgcattctctcctgactcttctatgctgtgttcagtcggagccagtaaagcagtggtggcagcaatattggtgtgattgaggttatgctggcaccactcgcacacaggcgcacaatggtgttagctgggcagaaagagtggcatctctggctaccgggctgggggcgacctttaccataggatgaagtaaccttgcattcggctgcaaggtgtactgtacgtacacaggtgctggtcgatgtccactttctgcttttctttctttctttttttcttttttaaagtaatttcccccacagta

SEQ ID NO: 317401 - protein, 296 aa, Artificial Sequence
  derived and/or modified sequence
MSACGRKALTLLSSVFAVCGLGLLGIAVSTDYWLYLEEGVIVPQNQSTEIKMSLHSGLWRVCFLAGEERGRCFTIEYVMPMNTQLTSESTVNVLKMIRSATPFPLVSLFFMFIGFILNNIGHIRPHRTILAFVSGIFFILSGLSLVVGLVLYISSINDEMLNRTKDAETYFNYKYGWSFAFAAISFLLTEVKPVTLSMDRLGLGTAPLSRGEWGWGRRDIPQPFWTPDHPLYFPSSSQNVSLSYLSGSPPARMSPGPCSCPHVHFPPHSSCVLCRPQPREMRQAPAASPSSAVFSL

SEQ ID NO: 317402 - protein, 275 aa, Artificial Sequence
  derived and/or modified sequence
MSACGRKALTLLSSVFAVCGLGLLGIAVSTDYWLYLEEGVIVPQNQSTEIKMSLHSGLWRVCFLAGEERGRCFTIEYVMPMNTQLTSESTVNVLKMIRSATPFPLVSLFFMFIGFILNNIGHIRPHRTILAFVSGIFFILSGLSLVVGLVLYISSINDEMLNRTKDAETYFNYKYGWSFAFAAISFLLTESAGVMSVYLFMKRYTAEDMYRPHPGFYRPRLSNCSDYSGQFLHPDAWVRGRSPSDISSEASLQMNSNYPALLKCPDYDQMSSSPC

SEQ ID NO: 317403 - DNA, 891 bp, Artificial Sequence
  derived and/or modified sequence
atgtctgcctgcgggcggaaggcacttaccctgctgtcaagcgtatttgcagtgtgcggcctgggcctacttggtatcgccgtgagcaccgactactggctgtacctggaggagggcgtgatcgtgccgcagaatcagtcaaccgagatcaagatgagtctacacagcggactctggagggtttgctttctcgctggagaggaacgggggaggtgcttcaccattgaatatgttatgccgatgaacactcagcttacatccgagtccaccgtgaacgtgctgaagatgatacgctccgcaacaccattcccactggtctccctgtttttcatgtttattgggtttatcctgaataacatcggtcacatcagacctcaccgcaccatcctcgcatttgtctccggtatcttctttattttgagcggtctgtcccttgtggtgggactggtgttgtacatttcatctataaacgacgaaatgcttaacaggaccaaagatgccgaaacctacttcaattataagtatggctggagctttgctttcgctgcaattagtttccttctgaccgaagtcaagcccgtgacactgagcatggatagactcggcctcggaacagctcccttatctcgaggcgagtggggatggggcagacgcgacatacctcaacctttttggacccctgaccaccctctgtattttccctcctcttctcaaaatgtaagcttgagctatctgtccggcagtcctccagcccgtatgagccccggtccatgttcttgccctcacgtgcactttcccccccactctagctgcgtcctttgtaggcctcagccacgggagatgagacaagctccagctgcaagtcccagcagcgccgttttctcgctgtag

SEQ ID NO: 317404 - DNA, 828 bp, Artificial Sequence
  derived and/or modified sequence
atgagcgcttgcggcaggaaagccttgacattgctttcttctgtgttcgccgtgtgcgggcttggcctgctggggatcgctgtgtccactgattactggctttacctagaggagggggtgattgtgccacagaatcaatcaactgagatcaagatgagtctccattcaggactctggcgcgtatgttttctggcgggtgaggaaagggggcgctgtttcacaatcgagtatgtgatgccaatgaacactcaactgacctccgagtcgaccgtaaacgtcctgaagatgatacggtctgctactccatttccactagtgtcactgtttttcatgttcattggtttcatcctgaacaacattggccacatccgaccacataggactatactcgccttcgtgagcgggatcttctttatactgtcaggactgtctctggtggtgggtttggtgctctatatctctagcatcaatgatgaaatgttaaatcggaccaaggatgcagagacatacttcaactataaatatggatggtccttcgccttcgccgcgattagcttcctcctcactgagtccgctggagtcatgtccgtatacctgtttatgaaacggtataccgccgaggatatgtataggccacatcccggtttctaccggccccggctgagcaactgcagcgattactctggacaatttctgcatcctgacgcatgggttaggggccggtcgccatccgatattagttcagaggcgagcctgcagatgaactcaaattatcccgccctgttgaaatgtccagactatgaccaaatgtcttcgtccccctgttag

SEQ ID NO: 317405 - DNA, 828 bp, Artificial Sequence
  derived and/or modified sequence
atgagtgcttgcgggcggaaggccctgaccctcctttcatctgtcttcgctgtgtgtgggcttggattgctgggaattgccgtgagcaccgactattggctctacctggaggaaggcgtcatcgtcccacagaatcagtcgacagaaatcaagatgtcgcttcactccggcctttggcgggtgtgtttcctggcaggcgaggaaagaggaaggtgcttcacaattgagtacgttatgccgatgaatacccaactaacatccgagtccacggttaatgttttaaagatgatcaggagcgcaacgccgtttcccctcgtgagcctattttttatgtttatcggattcatcctcaataacatcggccacatcagaccgcataggaccatcttggccttcgtgagcgggatttttttcatcttgtccggtctgtctctcgtggtagggctggtgctgtacatatccagtattaatgatgaaatgctgaaccggacaaaagacgctgagacgtattttaactacaagtatgggtggtctttcgcctttgcagcaatctcattccttctcacagaatccgccggtgtgatgtccgtgtatctgtttatgaagcggtacaccgccgaagacatgtatcgaccacatccgggcttttaccgtccccgcctgtctaactgttccgactattcaggtcaattcctacaccctgacgcctgggtgcggggcagatcaccttccgacattagcagcgaggccagcttgcagatgaactctaactatcccgcgctgctcaagtgtcccgactacgaccagatgtcttccagcccttgctag

SEQ ID NO: 317406 - DNA, 891 bp, Artificial Sequence
  derived and/or modified sequence
atgtctgcctgtggcaggaaggccctgaccctgctgagctctgtgtttgctgtgtgtggcctgggcctgctgggcattgctgtgtccacagactactggctgtacctggaggagggcgtgattgtgccccagaaccagagcacagagatcaagatgagcctgcacagcggcctgtggagggtgtgcttcctggccggggaggagcggggccgctgcttcaccattgaatatgtgatgcccatgaacacccagctgaccagcgagagcacagtgaatgtgctgaagatgatccgcagcgccacccccttccccctggtgtccctcttcttcatgtttattggcttcatcctgaacaacatcggccacatccggccccacaggaccatcctggcctttgtgtctggcatcttcttcatcctgagcggcctgagcctggtggtgggcctggtgctgtacatcagcagcatcaatgatgagatgctgaacagaaccaaggatgctgagacctacttcaactacaagtatggctggagctttgcctttgctgccatctccttcctgctgacagaggtgaagcctgtgaccctgtccatggaccggctgggcctgggcacagcccccctgagcagaggagagtggggctggggcagaagagacatcccccagcccttctggaccccagaccaccccctgtacttccccagcagcagccagaatgtgtccctgagctacctgagcggcagccccccagccaggatgagccctggcccctgcagctgcccccacgtgcacttccccccccacagcagctgtgtgctgtgccggccccagccccgggagatgaggcaggccccagctgccagccccagcagcgctgtgttcagcctgtag

SEQ ID NO: 317407 - DNA, 828 bp, Artificial Sequence
  derived and/or modified sequence
atgtctgcctgtggcaggaaggccctgaccctgctgagctctgtgtttgctgtgtgtggcctgggcctgctgggcattgctgtgtccacagactactggctgtacctggaggagggcgtgattgtgccccagaaccagagcacagagatcaagatgagcctgcacagcggcctgtggagggtgtgcttcctggccggggaggagcggggccgctgcttcaccattgaatatgtgatgcccatgaacacccagctgaccagcgagagcacagtgaatgtgctgaagatgatccgcagcgccacccccttccccctggtgtccctcttcttcatgtttattggcttcatcctgaacaacatcggccacatccggccccacaggaccatcctggcctttgtgtctggcatcttcttcatcctgagcggcctgagcctggtggtgggcctggtgctgtacatcagcagcatcaatgatgagatgctgaacagaaccaaggatgctgagacctacttcaactacaagtatggctggagctttgcctttgctgccatctccttcctgctgacagaatctgctggggtgatgtctgtgtacctgttcatgaagcgctacacagctgaggacatgtaccggccccaccctggcttctaccggccccggctgagcaactgcagcgactacagcggccagttcctgcacccagatgcctgggtgcggggccgcagccccagcgacatcagcagcgaggccagcctgcagatgaacagcaactacccagccctgctgaagtgcccagactatgaccagatgagcagcagcccctgctag

SEQ ID NO: 317408 - DNA, 891 bp, Artificial Sequence
  derived and/or modified sequence
atgagcgcctgcggccggaaggccctgaccctgctgagcagcgtgtttgcagtgtgcggactgggattgttggggatcgcggtttctactgattattggctgtacctggaagaaggcgtgattgtacctcaaaaccagagtacagaaatcaaaatgtctctgcactctgggctctggcgggtgtgcttcttggcgggggaggaacggggccggtgcttcaccatcgagtacgtgatgccaatgaatactcagctgacaagtgaatccacggtcaacgtgctaaagatgattagatccgccactccttttcctctggtcagcctatttttcatgtttattggctttatactgaataatattggacatattaggccacatcgcaccattctcgctttcgtttctggtatttttttcatcctgagcggcctgtccctggttgtgggtcttgtgctgtatatctcaagtatcaatgacgagatgctgaaccgcactaaagacgcggagacgtatttcaattacaagtatggctggtcatttgctttcgccgctatcagtttcctgttgacagaggtgaaacccgtcacattgtcgatggatcgcctggggctgggcacagcaccactgagcaggggagagtggggctggggaaggcgcgacatcccacagccgttttggaccccagaccacccattatatttcccctcttcttctcagaatgtatctttaagttatttatcgggatctcccccggctcgcatgagtcctggaccctgttcttgtccacatgtgcatttcccaccgcattctagctgtgtgctgtgtcgtcctcaaccccgtgagatgcgacaggcacccgccgcatccccctcatccgctgtattctctctctag

SEQ ID NO: 317409 - DNA, 828 bp, Artificial Sequence
  derived and/or modified sequence
atgagcgcctgcggccggaaggccctgaccctgctgagcagcgtgttcgctgtctgcggcctgggcctgttaggcattgctgtgtcaaccgattactggctctatctggaggaaggtgtcattgtgccacagaatcagtcaacagaaatcaaaatgtccctccattccggcctctggagagtgtgcttcctcgctggcgaggaacgcggacgttgctttaccatcgaatacgtgatgcccatgaatactcagctgacatccgagtctactgtcaatgtgctgaagatgattcggtctgccaccccctttcccctggttagtctgttttttatgtttattggatttatactcaacaacatcggccacattcgcccgcatcgaacgattcttgcttttgtgtctgggattttcttcatcctgtccgggctctcactggtagttgggttggttctgtatatcagttcaataaacgacgaaatgctcaatagaaccaaggatgctgaaacctactttaactataagtacggctggagctttgctttcgctgcgatttcattcctgctgaccgaatccgctggagtgatgtctgtctacctgtttatgaagcggtacacagccgaggacatgtacagacctcatcctggcttctatagaccccgcctgagtaactgcagtgattactctggccagttccttcatccagatgcctgggtgcgagggcgcagtccgtcagatattagctcagaggcctctctacagatgaatagcaactaccctgcactgctgaaatgcccagattacgaccagatgtcttcctcaccctgttag

SEQ ID NO: 317410 - DNA, 828 bp, Artificial Sequence
  derived and/or modified sequence
atgagcgcctgcggccggaaggccctgaccctgctgagcagcgtgtttgccgtctgtggtctgggcctcttggggatcgccgtgtctactgattattggctgtacttagaggaaggagttatcgttccccagaaccagtccaccgagattaaaatgtctctgcattctggactttggcgagtatgttttctggctggggaggagagagggcggtgcttcaccattgaatatgtcatgcctatgaatactcagctcactagcgagtcaacagtgaatgtgcttaagatgatccgaagcgctactccatttcctctggtcagcctgttcttcatgttcatagggtttattttgaataatatcgggcacattcgccctcacagaaccatcttggcctttgttagtggaattttcttcatcctgtcaggactgagtctggtggtgggactggtgctctacatatcaagtatcaatgacgaaatgttgaaccgaaccaaagacgcagagacttacttcaactacaaatatggttggtcctttgcattcgcggccataagtttcctccttaccgaatcagccggtgtcatgtctgtgtacctgtttatgaagcggtacaccgctgaggacatgtacaggcctcacccaggattctacaggccccggctcagcaattgcagtgattactcagggcaattcctgcaccctgacgcatgggtgcgagggagatcaccctccgatatcagctccgaggcctcattacagatgaactccaactatcctgctctgctcaaatgtcccgattacgaccagatgtcttcatctccatgttag

SEQ ID NO: 317411 - DNA, 891 bp, Artificial Sequence
  derived and/or modified sequence
atgagcgcttgcggcaggaaagctttgaccttgctgtcatcagtattcgccgtatgcggcctcggactacttggaatagccgtgagcactgattattggctgtatttagaagagggcgttatcgtgccgcagaaccagtcaacagaaatcaaaatgagcttacactctgggctttggcgagtatgctttttggcaggagaggaacgaggcagatgcttcaccatcgagtacgtcatgccaatgaatactcaactgacatcagaatccaccgttaacgtgctgaaaatgatccgtagcgcaacaccattccccctggtgtctctgttttttatgtttatcggtttcatcttgaataacatagggcacatccgccctcatagaactatcttggcctttgtgagcggcatatttttcattctatccggtcttagcttggtggtgggcctggtcctgtacatctctagtataaacgatgaaatgcttaaccgtacgaaggacgccgagacatacttcaattataaatacggatggtcatttgccttcgcggcaatttcatttttactgacggaagttaagcccgtgaccctgtcgatggatcgcttgggcctgggtaccgcacccctcagtcgcggagaatggggatggggcaggcgcgatatccctcagccgttttggacccccgaccaccccctgtattttccttcttcaagccagaatgtgagtttatcatatctttccggatcacctcccgcacggatgagcccgggaccctgcagttgtccccacgtgcactttccccctcattccagctgcgtactctgcaggccacagccacgagaaatgaggcaggctccggcagcatccccctcctccgcagttttttccctctag

SEQ ID NO: 317412 - DNA, 828 bp, Artificial Sequence
  derived and/or modified sequence
atgtctgcgtgtgggaggaaggctctaacactgctgtctagtgtgtttgcggtatgcggacttggcctgctaggaatcgccgtgagtaccgactactggctctatctagaggagggtgtgatagtgcctcagaaccaaagcacagaaatcaagatgagtcttcactcagggctctggcgcgtgtgtttcctggcgggtgaggaaaggggaaggtgtttcacaattgaatacgtgatgccgatgaatacccagctcacctctgaatccacagtcaacgtcctgaagatgattaggtccgctactcccttcccactagtgtctctgtttttcatgttcatcggcttcattcttaacaatattggacacattcgtccacatcgcacaattctggccttcgttagtggcatcttcttcattctgagtgggctgagtctagtggtggggctcgtgctctatattagctcaatcaacgatgagatgcttaatcgaacaaaggacgctgagacttacttcaactacaagtacggatggtcattcgctttcgcagctattagtttcttactgaccgaaagcgccggagtgatgtctgtgtatctgtttatgaagaggtacaccgctgaagatatgtatcgcccacatcccggattttaccgtcctagattgagtaattgcagcgactattcaggccagtttctccaccccgacgcctgggtgcggggaaggtctccctctgacatttcgtccgaggcctccttgcagatgaacagcaactatccagctttgctgaagtgtccagactatgatcagatgtcttcctctccgtgttag

SEQ ID NO: 317413 - DNA, 828 bp, Artificial Sequence
  derived and/or modified sequence
atgtccgcctgcggaagaaaggcccttacgcttctgtcgtctgttttcgctgtgtgtgggctgggcctgttgggcattgctgtgtctacagattattggctgtatctggaggagggcgtgatagtgccgcagaaccagagcaccgaaattaaaatgtccttacactccggtctgtggagagtctgttttttggccggagaggagcggggtcgttgttttactattgagtatgtgatgccaatgaatacccagcttactagcgagagtaccgtgaatgtactgaaaatgatccggagcgccactccttttcccctggtgtccctcttcttcatgttcattggttttatactgaataatattggccacattaggccccatcggactatcctggctttcgtgagcggaatttttttcatactgagtggcttatcattagtggttggactagtactctatatatcatccatcaacgatgagatgttaaatcgcacaaaagatgccgaaacctactttaattacaaatacgggtggtccttcgcttttgccgctatatcgtttctccttaccgaatccgccggagtcatgtccgtgtacctgtttatgaagcggtacacggccgaagatatgtatcggcctcacccaggcttttatagacccaggttaagcaattgcagcgattactctggtcaatttctccacccagacgcatgggtcagaggacgctctcctagcgacatatccagcgaagccagtttgcagatgaactccaattacccagctttactgaaatgtccagattacgatcaaatgtcttcatccccttgttag

SEQ ID NO: 317414 - DNA, 891 bp, Artificial Sequence
  derived and/or modified sequence
atgtcagcctgtggtagaaaagctctgacactgcttagttcggttttcgccgtttgcgggcttgggctcctgggcatcgcagtgtcaactgactattggctatacctcgaggagggagttatcgtgccgcaaaaccagtctaccgaaatcaagatgtcactgcattcggggttgtggagggtatgcttcttggcaggagaggagagaggacggtgtttcacaattgagtatgtgatgccaatgaacacccagctgacatctgaatctacagtcaacgtcctaaaaatgattagatccgctacgccgttcccactggtgagtctcttcttcatgttcatcggcttcattctaaataacattggacacataaggccccatcgtacaatcctagccttcgtctctggcatattttttattttaagcggtctcagcctggttgtgggattagttttgtacatttcctctattaatgatgagatgcttaatagaaccaaggatgctgaaacctatttcaattacaagtatgggtggtctttcgcttttgccgccattagttttctcctgacagaagtgaaacctgtaactctgtccatggacaggctcggtctcgggactgctcctttaagccggggtgagtggggatggggaagacgggatatcccacaaccattctggacccctgatcaccccttatacttcccgtcatcaagccagaatgtcagcttatcttatctgtccggttcgccaccagcccgaatgtctcctggtccatgtagttgcccccacgttcactttcccccgcattcgtcatgtgtcttatgccgcccccaaccgcgggaaatgaggcaggctccagccgcctcaccttcctccgccgtgttttccttgtag

SEQ ID NO: 317415 - DNA, 891 bp, Artificial Sequence
  derived and/or modified sequence
atgtctgcgtgtggtcgaaaagctcttactttgctgtcctccgttttcgccgtctgtggcctgggccttctggggatcgccgtttccaccgactattggctttaccttgaggagggggtgatagtcccacaaaatcagagcacagagattaaaatgtcgctgcatagcgggctgtggcgcgtctgtttcctagccggtgaagagcgagggagatgtttcacgatcgaatacgttatgcccatgaacacacaactgacctctgaatcaactgttaatgtgttgaaaatgattaggagtgccacgccctttccgcttgtgagtctttttttcatgtttatcggcttcattctcaacaacattggtcacatccgaccccaccgaactattctggctttcgtgtctggcatcttctttatcctttcgggactcagtcttgtggttggacttgtactatacattagcagcattaatgacgaaatgctcaacagaaccaaggatgcggagacctatttcaactacaagtacggctggagcttcgccttcgcagcaatctcattccttttgacagaagtcaaacccgtgaccctctctatggacaggcttggtcttggcactgccccactgtctagaggtgaatggggctgggggagacgggatattccgcaacccttttggactcccgatcacccactgtacttcccttcatcctcccagaatgtatctcttagttacctgagcggatcgccaccagcacgtatgtcaccaggaccgtgtagctgccctcatgttcattttccaccacactcaagctgtgtgttgtgtagacctcagccacgtgaaatgcggcaagcacctgctgcaagcccatcctctgctgtgttctccttgtag

SEQ ID NO: 317416 - DNA, 891 bp, Artificial Sequence
  derived and/or modified sequence
atgagtgcctgcgggaggaaggccctgaccctgctgagcagtgtctttgctgtctgtggcttgggcctcctgggtatcgcggtcagcaccgactactggctgtacctggaggagggtgtgattgtgccccagaaccagagcaccgagatcaagatgtccctgcactcaggcctctggcgggtctgcttccttgcaggtgaggagcgggggcgttgcttcaccatagaatatgtgatgcccatgaacacccagctgacatccgagtccacggtcaatgttctaaagatgatccgctcagccacaccattccctctggtcagcctcttcttcatgttcattgggtttatcctgaacaacatcggacacatccgtccccaccggacgatactggcctttgtctctggcatcttctttatcctctcaggcctctctctcgtggtgggcctggtgctctacatctccagcatcaacgatgagatgctcaacaggaccaaggatgcagagacctacttcaactacaagtatgggtggtcgtttgccttcgccgccatctccttccttttaacggaggtaaagcccgtcaccctaagtatggataggctgggcctgggcactgccccactgagccggggagagtggggatgggggagaagggacattccacaaccattttggaccccggaccacccactctacttcccttcctcatcccagaatgtgtcactgtcttacctttctgggtctcctccggccaggatgtccccaggaccctgctcctgtccccacgtccacttcccaccccactcgagctgtgtcctgtgcagaccccagccaagggagatgaggcaggccccagcagcgagcccatcctctgctgtcttctccctgtag

SEQ ID NO: 317417 - DNA, 828 bp, Artificial Sequence
  derived and/or modified sequence
atgagtgcctgcgggaggaaggccctgaccctgctgagcagtgtctttgctgtctgtggcttgggcctcctgggtatcgcggtcagcaccgactactggctgtacctggaggagggtgtgattgtgccccagaaccagagcaccgagatcaagatgtccctgcactcaggcctctggcgggtctgcttccttgcaggtgaggagcgggggcgttgcttcaccatagaatatgtgatgcccatgaacacccagctgacatccgagtccacggtcaatgttctaaagatgatccgctcagccacaccattccctctggtcagcctcttcttcatgttcattgggtttatcctgaacaacatcggacacatccgtccccaccggacgatactggcctttgtctctggcatcttctttatcctctcaggcctctctctcgtggtgggcctggtgctctacatctccagcatcaacgatgagatgctcaacaggaccaaggatgcagagacctacttcaactacaagtatgggtggtcgtttgccttcgccgccatctccttccttttaacggagagtgccggggtgatgtctgtgtacctgtttatgaagcggtacaccgcggaggacatgtacaggccccaccctggcttctaccgccctcggctgagcaactgctccgattactcaggccagttcctacacccagacgcctgggtcaggggccgcagcccctccgacatctccagcgaggcctccctgcagatgaacagcaactaccccgccttgctcaagtgccccgactatgatcagatgtcctcttcaccctgctga

SEQ ID NO: 317418 - DNA, 1311 bp, Artificial Sequence
  derived and/or modified sequence
attggcgccgagcggttccggctgactggacggggcgggcgtcccgggcagcctagcgcggtacctcccgccccgcgcgcccagccggcgagggacattggaccagggtcgggggtcgcggccgctccagcgagagccgtgggtactgccacctgctcacccactctccctagccccagagcgcagtccgtgctggtgggagcgtggcgactagttgcacagcaacggtccaggaagatgagtgcctgcgggaggaaggccctgaccctgctgagcagtgtctttgctgtctgtggcttgggcctcctgggtatcgcggtcagcaccgactactggctgtacctggaggagggtgtgattgtgccccagaaccagagcaccgagatcaagatgtccctgcactcaggcctctggcgggtctgcttccttgcaggtgaggagcgggggcgttgcttcaccatagaatatgtgatgcccatgaacacccagctgacatccgagtccacggtcaatgttctaaagatgatccgctcagccacaccattccctctggtcagcctcttcttcatgttcattgggtttatcctgaacaacatcggacacatccgtccccaccggacgatactggcctttgtctctggcatcttctttatcctctcaggcctctctctcgtggtgggcctggtgctctacatctccagcatcaacgatgagatgctcaacaggaccaaggatgcagagacctacttcaactacaagtatgggtggtcgtttgccttcgccgccatctccttccttttaacggagagtgccggggtgatgtctgtgtacctgtttatgaagcggtacaccgcggaggacatgtacaggccccaccctggcttctaccgccctcggctgagcaactgctccgattactcaggccagttcctacacccagacgcctgggtcaggggccgcagcccctccgacatctccagcgaggcctccctgcagatgaacagcaactaccccgccttgctcaagtgccccgactatgatcagatgtcctcttcaccctgctgagcctcggccgcccccatccctggactgtgggtggccagacaacccttcctgttctctccaggtgacccctgagccccaggcctgtggttgacaggcccaggccacccatgcttagctgttgtcacttgaccccagtcctctccctgcttctccagaagggctctaactgccccagcatgggtgtgggagtctggagtctgtgggcaagctgattgtctgggaacatgggagaagccccgcccatgt

SEQ ID NO: 317419 - DNA, 891 bp, Artificial Sequence
  derived and/or modified sequence
atgagcgcctgcggcagaaaggccctgaccctgctgagcagcgtgttcgccgtgtgcggcctgggcctgctgggcatcgccgtgagcaccgactactggctgtacctggaggagggcgtgatcgtgccccagaaccagagcaccgagatcaagatgagcctgcacagcggcctgtggagagtgtgcttcctggccggcgaggagagaggcagatgcttcaccatcgagtacgtgatgcccatgaacacccagctgaccagcgagagcaccgtgaacgtgctgaagatgatcagaagcgccacccccttccccctggtgagcctgttcttcatgttcatcggcttcatcctgaacaacatcggccacatcagaccccacagaaccatcctggccttcgtgagcggcatcttcttcatcctgagcggcctgagcctggtggtgggcctggtgctgtacatcagcagcatcaacgacgagatgctgaacagaaccaaggacgccgagacctacttcaactacaagtacggctggagcttcgccttcgccgccatcagcttcctgctgaccgaggtgaagcccgtgaccctgagcatggacagactgggcctgggcaccgcccccctgagcagaggcgagtggggctggggcagaagagacatcccccagcccttctggacccccgaccaccccctgtacttccccagcagcagccagaacgtgagcctgagctacctgagcggcagcccccccgccagaatgagccccggcccctgcagctgcccccacgtgcacttccccccccacagcagctgcgtgctgtgcagaccccagcccagagagatgagacaggcccccgccgccagccccagcagcgccgtgttcagcctgtag

SEQ ID NO: 317420 - DNA, 828 bp, Artificial Sequence
  derived and/or modified sequence
atgagcgcctgcggcagaaaggccctgaccctgctgagcagcgtgttcgccgtgtgcggcctgggcctgctgggcatcgccgtgagcaccgactactggctgtacctggaggagggcgtgatcgtgccccagaaccagagcaccgagatcaagatgagcctgcacagcggcctgtggagagtgtgcttcctggccggcgaggagagaggcagatgcttcaccatcgagtacgtgatgcccatgaacacccagctgaccagcgagagcaccgtgaacgtgctgaagatgatcagaagcgccacccccttccccctggtgagcctgttcttcatgttcatcggcttcatcctgaacaacatcggccacatcagaccccacagaaccatcctggccttcgtgagcggcatcttcttcatcctgagcggcctgagcctggtggtgggcctggtgctgtacatcagcagcatcaacgacgagatgctgaacagaaccaaggacgccgagacctacttcaactacaagtacggctggagcttcgccttcgccgccatcagcttcctgctgaccgagagcgccggcgtgatgagcgtgtacctgttcatgaagagatacaccgccgaggacatgtacagaccccaccccggcttctacagacccagactgagcaactgcagcgactacagcggccagttcctgcaccccgacgcctgggtgagaggcagaagccccagcgacatcagcagcgaggccagcctgcagatgaacagcaactaccccgccctgctgaagtgccccgactacgaccagatgagcagcagcccctgctag

SEQ ID NO: 317421 - protein, 197 aa, Artificial Sequence
  derived and/or modified sequence
MGFSEQGRQRLHPEEALYLLECGSIHLFHQDLPLSIQEAYQLLLTDHTVTFLQYQVFSHLKRLGYVVRRFQPSSVLSPYERQLNLDASVQHLEDGDGKRKRSSSSPRSINKKAKALDNSLQPKSLAASSPPSGTSRCPRMWGTDLTALQRMELAPGDRDCLFSGTISAASCTQTLTCSFRGQSGPWPWVSDTHRVKL

SEQ ID NO: 317422 - DNA, 534 bp, Artificial Sequence
  derived and/or modified sequence
atggagcccgagcccgagcccgccgccgtggaggtgcccgccggcagagtgctgagcgccagagagctgttcgccgccagaagcagaagccagaagctgccccagagaagccacggccccaaggacttcctgcccgacggcagcgccgcccaggccgagagactgagaagatgcagagaggagctgtggcagctgctggccgagcagagagtggagagactgggcagcctggtggccgccgagtggagacccgaggagggcttcgtggagctgaagagccccgccggcaagttctggcagaccatgggcttcagcgagcagggcagacagagactgcaccccgaggaggccctgtacctgctggagtgcggcagcatccacctgttccaccaggacctgcccctgagcatccaggaggcctaccagctgctgctgaccgaccacaccgtgaccttcctgcagtaccagccccccgaggaggtgggcctgtgcggcagcaccatccccaccaagctgtgccccgtgcccgtgtag

SEQ ID NO: 317423 - DNA, 534 bp, Artificial Sequence
  derived and/or modified sequence
atggagcccgaaccagaacccgcagccgtggaagtcccggctgggcgggtcctaagcgcacgagaattgttcgccgcgcgctcacggtcacagaagctgccccagcgatcacacggcccgaaggactttctgccggacggctcagctgctcaagcggagagactgagacgctgtcgcgaagagttgtggcagttactcgctgaacagcgagtcgagcgactgggttcccttgtggctgccgagtggcgccccgaagagggtttcgtagagcttaagtcacccgctggcaagttctggcaaaccatggggtttagtgagcagggtcgacagcgcttacacccagaagaagccctttacctgttggaatgcggtagtattcatctttttcatcaggacctgccactctccattcaggaggcttaccaactgctcctcaccgaccacactgttacattccttcagtaccagcctcccgaagaggtgggactgtgcggaagcaccatacccacaaaattgtgccctgtgcctgtatag

SEQ ID NO: 317424 - DNA, 534 bp, Artificial Sequence
  derived and/or modified sequence
atggagcctgagcctgagcctgctgctgtggaggtgcctgctggccgggtgctgagcgcccgggagctgtttgctgcccggagccgcagccagaagctgccccagaggagccacggccccaaggacttcctgcctgatggcagcgctgcccaggccgagcggctgcggcgctgccgggaggagctgtggcagctgctggccgagcagagggtggagcggctgggcagcctggtggccgctgagtggaggcctgaggagggctttgtggagctgaagagccctgctgggaagttctggcagaccatgggcttcagcgagcagggccggcagaggctgcaccctgaggaggccctgtacctgctggagtgtggcagcatccacctgttccaccaggacctgcccctgagcatccaggaggcctaccagctgctgctgacagaccacacagtgaccttcctgcagtaccagcccccagaggaggtgggcctgtgtggcagcaccatccccaccaagctgtgccctgtgcctgtgtag

SEQ ID NO: 317425 - DNA, 534 bp, Artificial Sequence
  derived and/or modified sequence
atggagcccgagcccgagcccgccgccgtggaggtgcccgccggccgggtgctaagcgcaagggaacttttcgctgcgaggtctaggagtcaaaagctgccccagagatctcacggacctaaggactttttgcccgacggttctgcagcacaagccgagaggctgcgacggtgtcgcgaggaactttggcagctgctcgccgaacaacgggtggagagactgggcagccttgtagcagccgagtggcgccctgaagagggctttgttgagctgaagtctcctgccggaaaattttggcagacaatgggcttcagcgaacagggtaggcagcgcctgcacccagaggaagcactgtacctgctagagtgcggatctattcacctcttccaccaggacttacccctgagtatccaagaggcctaccagctgttgctgacagatcataccgtaacttttctgcagtaccagccaccagaggaggtgggcttgtgcggatctaccatccctacgaaattgtgcccggttcccgtgtag

SEQ ID NO: 317426 - DNA, 534 bp, Artificial Sequence
  derived and/or modified sequence
atggaacctgaacctgagccggcagctgtggaggtgccagccggtagggtgctgtctgcccgagaactctttgccgcacgaagccggtcccaaaagctgccgcagcgctcccatggacctaaggactttctcccagatggaagcgcggcacaagcagagaggctgcgaaggtgcagagaggagctctggcaactgttggccgagcagagagtcgagaggttgggttctttggtcgccgctgagtggcggccagaggaagggtttgtggagctgaaaagtccagcagggaaattttggcagaccatggggtttagcgaacaggggaggcaaagactgcacccagaggaggccttgtatctcctggagtgcgggagcatccatctctttcaccaagatctgcccctttcaatccaagaggcctatcagctgctgcttaccgaccataccgtcacttttctgcagtaccaaccgccagaggaggtgggcttgtgtggctccactatacccactaagctgtgcccagtaccagtgtag

SEQ ID NO: 317427 - DNA, 1682 bp, Artificial Sequence
  derived and/or modified sequence
gaaacggaggggcggggggcgcgggggcagaggtgacctggggctctggacttagacccaagggctagacaccccgggtctgactggtgggagagaagacgtaatgtgaagggggttggcaaccaagacgcgggaccccacttgcagtaccccccgtctgcggccggcgtcgcccacccgcagccgccggccgggcaatggcaccacctagcggacggcaccagtgcggggaccccagcctcgaggaggcgctcgtgccgggcggaggtggcgcttcagcaccgtcgtgggccggacagcgcctcccgcccccggccctcgaaacctggcttcggagcccagccgtagggaccggacggaagacaccgaaggaatggcgaacctccccggaccgctcctgacagttcccgggtggccttcggcctgcaaagtcggaatttgcacaccctccgctcgtccttccctgagcccttctgccctccttgcccagcccgggcggtggggactaagcagcgcgaggctgcagaggggcggtcacaagtgtgaccattcgcactgcactccagacgccggctcctcaggctttactggagagaagccccgaggagggctaggggcaaaagaggggccttctgcatctccagcaacctgcgggctgagctcccagacccggcgtcgggcgcccgggagctcttcgccgcccgctcgcggtcgcagaagctgccccagcgctcgcatggccccaaggactttctgcccgacggctcggcagctcaggccgagcggctgcgccggtgccgggaagagctctggcagctgctggcagagcagcgcgtggagcgcctgggcagcttggtggctgccgagtggaggccagaagagggcttcgtggagttgaagtctcccgcgggcaaattctggcagaccatgggcttctcagagcagggccggcagcgccttcacccggaagaggccttgtatcttctggagtgtggctccatccacctcttccaccaagacctgccactgtctatccaggaagcttaccagctgctgctgaccgaccacactgtgaccttcctgcagtaccaggtcttcagccacctgaagaggttgggttatgtggttcgacgattccaaccaagctctgtcctgtccccgtatgagaggcagcttaacctggatgccagcgtgcagcacttggaggatggagatggcaagagaaagaggagcagctccagccctcggtccattaataagaaggccaaggccctggacaactccctgcaacccaagagtctggcagcctccagcccaccttcagggacttcacgttgccccaggatgtggggcactgacctcacagctctgcagaggatggagcttgctccgggggaccgggactgtctgttctcagggaccatctcggctgcctcctgtacccagactctaacctgtagcttcagaggccagtctgggccttggccctgggtgtctgatactcacagagtgaaactgtgaccctctcccttccctgctgccttgcagtgacccctctggaactcaggactcgattttaaggacccaggaggtggggcagaagagaggactgtgtgcctttaacgagagggtgcctgcttcgtgctataaagccaaagccattaaaaatagatttcttttct

SEQ ID NO: 317428 - protein, 385 aa, Artificial Sequence
  derived and/or modified sequence
MQTSSKPSDFLNLAKKKRKFSELLTTVVLLCLLTPSWTSTGRMWSHLNRLLFWSIFSSVTCRKAVLDCEAMKTNEFPSPCLDSKTKVVMKGQNVSMFCSHKNKSLQITYSLFRRKTHLGTQDGKGEPAIFNLSITEAHESGPYKCKAQVTSCSKYSRDFSFTIVDPVTSPVLNIMVIQTETDRHITLHCLSVNGSLPINYTFFENHVAISPAISKYDREPAEFNLTKKNPGEEEEYRCEAKNRLPNYATYSHPVTMPSTGGDSCPFCLKLLLPGLLLLLVVIILILAFWVLPKYKTRKAMRNNVPRDRGDTAMEVGIYANILEKQAKEESVPEVGSRPCVSTAQDEAKHSQELQYATPVFQEVAPREQEACDSYKSGYVYSELNF

SEQ ID NO: 317429 - DNA, 1158 bp, Artificial Sequence
  derived and/or modified sequence
atgcagaccagcagcaagcccagcgacttcctgaacctggccaagaagaagagaaagttcagcgagctgctgaccaccgtggtgctgctgtgcctgctgacccccagctggaccagcaccggcagaatgtggagccacctgaacagactgctgttctggagcatcttcagcagcgtgacctgcagaaaggccgtgctggactgcgaggccatgaagaccaacgagttccccagcccctgcctggacagcaagaccaaggtggtgatgaagggccagaacgtgagcatgttctgcagccacaagaacaagagcctgcagatcacctacagcctgttcagaagaaagacccacctgggcacccaggacggcaagggcgagcccgccatcttcaacctgagcatcaccgaggcccacgagagcggcccctacaagtgcaaggcccaggtgaccagctgcagcaagtacagcagagacttcagcttcaccatcgtggaccccgtgaccagccccgtgctgaacatcatggtgatccagaccgagaccgacagacacatcaccctgcactgcctgagcgtgaacggcagcctgcccatcaactacaccttcttcgagaaccacgtggccatcagccccgccatcagcaagtacgacagagagcccgccgagttcaacctgaccaagaagaaccccggcgaggaggaggagtacagatgcgaggccaagaacagactgcccaactacgccacctacagccaccccgtgaccatgcccagcaccggcggcgacagctgccccttctgcctgaagctgctgctgcccggcctgctgctgctgctggtggtgatcatcctgatcctggccttctgggtgctgcccaagtacaagaccagaaaggccatgagaaacaacgtgcccagagacagaggcgacaccgccatggaggtgggcatctacgccaacatcctggagaagcaggccaaggaggagagcgtgcccgaggtgggcagcagaccctgcgtgagcaccgcccaggacgaggccaagcacagccaggagctgcagtacgccacccccgtgttccaggaggtggcccccagagagcaggaggcctgcgacagctacaagagcggctacgtgtacagcgagctgaacttctag

SEQ ID NO: 317430 - DNA, 1158 bp, Artificial Sequence
  derived and/or modified sequence
atgcagacaagttccaaaccctccgattttctgaatctggccaagaaaaagcggaagttctccgagctgctgactaccgtagttttgctttgcctgttaactccctcttggacttcgactgggcgcatgtggtcgcacctcaacaggctcctgttttggtccatattctcctccgtaacctgtcggaaagctgtgctagactgtgaggcgatgaagactaatgagtttccgagtccatgcctcgattcaaaaacgaaggtagtgatgaagggtcagaatgtctcaatgttttgttcacataagaacaaatcactgcagataacgtactccctgtttcgacgcaaaacgcatctgggtacacaggatggcaagggtgaacccgccatttttaatctgtccattacggaggcccacgaaagtggaccctataagtgcaaagcccaggtgacatcatgttctaaatactcacgcgatttttcattcacaatcgtggacccagttactagcccagtcttaaatataatggttattcagaccgagactgatagacatatcaccctgcattgcctgtcagtgaacggctccttgcccataaactatactttctttgagaatcatgtcgccattagcccagcgatttcaaagtacgatcgtgagccagcagagtttaacttaactaaaaaaaaccctggcgaggaggaagaatatcgctgcgaagcgaaaaatcgcctccctaactacgccacatattcacatccagtgaccatgccaagcactggaggcgacagctgcccattttgtctcaagttgctcctgcccggcctgctgctgttgctggtggtgataattctgatcctcgccttttgggtgttgcctaagtacaagactagaaaggctatgcggaacaacgtcccccgagacagaggcgacaccgccatggaggtaggcatatacgcaaacattctcgagaaacaggctaaggaagagtccgtgccagaagtgggctcccggccttgcgtttcaactgcccaagatgaggcaaagcattctcaggaattacagtacgcgactcccgtgttccaggaagttgcacctagggagcaagaggcttgtgactcctataagagcggctatgtctattctgagcttaatttctag

SEQ ID NO: 317431 - DNA, 1158 bp, Artificial Sequence
  derived and/or modified sequence
atgcagaccagcagcaagcccagcgacttcctgaacctggccaagaagaagaggaagttcagcgagctgctgaccaccgtggtgctgctgtgcctgctgacccccagctggaccagcacaggccgcatgtggagccacctgaaccggctgctcttctggagcatcttcagctctgtgacctgcaggaaggctgtgctggactgtgaggccatgaagaccaatgagttccccagcccctgcctggacagcaagaccaaggtggtgatgaagggccagaatgtgtccatgttctgcagccacaagaacaagagcctgcagatcacctacagcctcttccggaggaagacccacctgggcacccaggacggcaagggggagcccgccatcttcaacctgagcatcacagaggcccacgagagcggcccctacaagtgcaaggcccaggtgaccagctgcagcaagtacagccgggacttctccttcaccatcgtggaccctgtgaccagccctgtgctgaacatcatggtgatccagacagaaacagacagacacatcaccctgcactgcctgtctgtgaatggcagcctgcccatcaactacaccttctttgagaaccacgtggccatcagccctgccatcagcaaatatgaccgggagcctgctgagttcaacctgaccaagaagaaccctggagaggaggaggagtaccgctgtgaggccaagaaccggctgcccaactatgccacctacagccaccctgtgaccatgcccagcactggaggagacagctgccccttctgcctgaagctgctgctgcccggcctgctgctgctgctggtggtgatcatcctgatcctggccttctgggtgctgcccaagtacaagaccaggaaggccatgagaaataatgtgccccgggacagaggagacacagccatggaggtgggcatctatgccaacatcctggagaagcaggccaaggaggagagcgtgcctgaggtgggcagccggccctgtgtgtccacagcccaggatgaggccaagcacagccaggagctgcagtatgccacccctgtgttccaggaggtggccccccgggagcaggaggcctgtgacagctacaagagcggctacgtgtacagcgagctgaacttctag

SEQ ID NO: 317432 - DNA, 1526 bp, Artificial Sequence
  derived and/or modified sequence
agtattatgcaaacctcatccaaaccctctgatttccttaacttggctaagaaaaagaggaagttctccgagttactcaccactgtggttctactatgccttctgaccccgtcttggacttcaactgggagaatgtggagccatttgaacaggctcctcttctggagcatattttcttctgtcacttgtagaaaagctgtattggattgtgaggcaatgaaaacaaatgaattcccttctccatgtttggactcaaagactaaggtggttatgaagggtcaaaatgtatctatgttttgttcccataagaacaaatcactgcagatcacctattcattgtttcgacgtaagacacacctgggaacccaggatggaaaaggtgaacctgcgatttttaacctaagcatcacagaagcccatgaatcaggcccctacaaatgcaaagcccaagttaccagctgttcaaaatacagtcgtgacttcagcttcacgattgtcgacccggtgacttccccagtgctgaacattatggtcattcaaacagaaacagaccgacatataacattacattgcctctcagtcaatggctcgctgcccatcaattacactttctttgaaaaccatgttgccatatcaccagctatttccaagtatgacagggagcctgctgaatttaacttaaccaagaagaatcctggagaagaggaagagtataggtgtgaagctaaaaacagattgcctaactatgcaacatacagtcaccctgtcaccatgccctcaacaggcggagacagctgtcctttctgtctgaagctactacttccagggttattactgttgctggtggtgataatcctaattctggctttttgggtactgcccaaatacaaaacaagaaaagctatgagaaataatgtgcccagggaccgtggagacacagccatggaagttggaatctatgcaaatatccttgaaaaacaagcaaaggaggaatctgtgccagaagtgggatccaggccgtgtgtttccacagcccaagatgaggccaaacactcccaggagctacagtatgccacccccgtgttccaggaggtggcaccaagagagcaagaagcctgtgattcttataaatctggatatgtctattctgaactcaacttctgaaatttacagaaacaaactacatctcaggatggagtctcactctgttgcccaggctggagttcagtagcgcgatcttggctcacttcaatctccatcttcccagttcaagcgattctcatgcctcgacctcccgagtagctgggattacaggtgcccgctaccacgcccagctaatttttgtatttttagtagagatggggtttcactatggtggccaggctggtcttgaactcctgacctcagatgatctgcctgcctcggcctcccaaagtgctggaactacaagcctgagccaccgtgcccggccctgaatcgctttagtaaataaagggtctccaagaataaattcatccgaacatgca

SEQ ID NO: 317433 - DNA, 1158 bp, Artificial Sequence
  derived and/or modified sequence
atgcagaccagcagcaagcccagcgacttcctgaacctggccaagaagaaacggaagttcagcgagctacttactacagtcgtgcttctctgtctgctcaccccgtcctggacctcgacgggccgcatgtggagtcacctgaatagactgctattctggtccatcttcagctctgtgacgtgtcgcaaggccgtcctggattgtgaagcaatgaagaccaatgagttcccctcaccatgtcttgacagtaaaactaaggtcgttatgaaggggcagaacgtgtccatgttctgctcccataaaaataagtccctccaaattacctacagcctcttcagacgcaagacccatctgggcacccaggacggcaaaggggagcccgcgatatttaacttgtcaatcacagaggctcatgaatctgggccctataagtgtaaagctcaggtaacctcatgcagtaagtatagcagagatttctcatttaccatagtagacccagtgaccagccccgtccttaacatcatggtgatacagaccgagaccgaccggcacattacactgcactgcttgtctgtcaatgggtcccttcccattaattacacattcttcgagaaccatgttgctatctcgccagccatctctaaatacgatagagagcctgccgagttcaatctaactaagaagaacccgggcgaggaagaggaatataggtgtgaggcgaaaaatcgcttgccaaattacgcaacatactcacacccagttaccatgccaagcactggaggggatagctgtcccttctgtctgaagctgctactgccagggttgctgcttctgctggtggtgataattctcatcctggccttttgggtcctacccaaatataaaacccgcaaagctatgcggaataatgtgcctcgcgataggggagacacggccatggaggtggggatttacgctaatatcctggaaaaacaggccaaggaagagtcagtccccgaagtcgggagccggccatgtgtttctacagctcaggacgaggccaagcacagtcaggagcttcagtacgctacccccgttttccaagaggtggccccacgagagcaggaagcttgtgattcatataagagcggctatgtgtactcagaactcaacttttag

SEQ ID NO: 317434 - DNA, 1158 bp, Artificial Sequence
  derived and/or modified sequence
atgcagacgtcttcaaaaccttcagattttttgaacctggctaaaaagaaacgcaagttcagtgaacttcttacaacagttgtgctactctgtctactgactcctagctggacttccacaggcaggatgtggagccaccttaatcggctcctcttctggagtatcttctcaagcgtcacgtgtaggaaggcagttcttgattgtgaagccatgaagaccaacgaattccccagtccttgcctcgactctaaaacgaaggttgtcatgaagggacagaatgtcagtatgttttgctcccataaaaacaagagcctacagattacttactctctgttccggaggaagacccatctcggcacacaggatggcaagggcgagcccgcaatctttaatctttccatcaccgaggcacacgagagcggtccttataagtgcaaagctcaggtgacatcctgttctaaatactcaagggacttttcgtttacaatcgtggatcctgtgactagtcctgtgctgaacatcatggtaatccagaccgagaccgacagacacatcacactccactgtctctcagtcaacgggtctctccctatcaattacacattctttgagaatcatgtggccattagccccgctatttcgaagtatgacagagagcccgctgaatttaatttgactaagaaaaaccctggagaagaggaagaataccggtgcgaggcaaagaatcgcttaccaaattatgcaacgtattcccacccagttaccatgccctctacaggcggtgattcatgcccattttgcttgaaattgctgctcccaggactcttgcttctgttggtcgtgataatcctcattctggctttttgggttctcccaaagtacaaaacccgcaaggccatgaggaataatgtgcccagggacaggggggacacagccatggaggtcggaatctatgcaaacatccttgaaaaacaagcaaaggaggagtcagttccagaggttgggtcccggccatgtgtctctaccgcccaggacgaggcaaagcacagtcaggagctgcagtatgctacacctgtgttccaggaagtggctccacgcgaacaagaggcctgtgactcatataaatctggatatgtgtattcagagctgaatttttag

SEQ ID NO: 317435 - protein, 399 aa, Artificial Sequence
  derived and/or modified sequence
MPPEIHYEAPLLERLSQLDSCVHPVLAFPDDVPTSLHFQSMLKSQWQNKPFDKIKPPKKLSLKHRAPMPGSLPDSARKDRHKLVSSFLTTAMLKHHTDMSSSSYLAATHHPPHSPLVRQLSTSSDSPAPASSSSQVTASTSQQPVRRRRGESSFDINNIVIPMSVAATTRVEKLQYKEILTPSWREVDLQSLKGSPDEENEEIEDLSDAAFAALHAKCEEMERARWLWTTSVPPQRRGSRSYRSSDGRTTPQLGSANPSTPQPASPDVSSSHSLSEYSHGQSPRSPISPELHSAPLTPVARDTPRHLASEDTRCSTPELGLDEQSVQPWERRTFPLAHSPQAECEDQLDAQERAARCTRRTSGSKTGRETEAAPTSPPIVPLKSRHLVAAATAQRPTHR

SEQ ID NO: 317436 - DNA, 1200 bp, Artificial Sequence
  derived and/or modified sequence
atgccacctgagatccactacgaggcgccactcttggagaggttatcacagctggattcctgtgttcaccctgtgcttgccttcccagacgacgtccccacctccctgcatttccagagcatgttgaagtcacagtggcagaataagcccttcgacaagattaaaccgccaaagaagctaagcttgaagcatagggcgcccatgcctggctcccttcctgacagcgccagaaaagaccgccacaagctggtctcaagttttctgactacagcaatgctgaagcaccatacagacatgagcagcagctcatatctggccgctacccatcacccacctcactcccccctcgtgaggcaactgagcacttcatcggacagtcccgctccggccagctcatcttcgcaggttactgccagcacgagccagcagcccgtgcgccgccgcaggggcgagagcagctttgacatcaacaatatagttatccccatgagtgtggccgctactacacgggtggagaaacttcagtacaaagaaatcctaacaccctcctggcgtgaggtggatctgcagtccctgaagggaagccctgatgaagagaacgaggagatagaggacctgtccgatgccgctttcgcagccctgcatgccaaatgcgaggagatggagagagcccgctggctgtggactacttctgtccctccccagcggagggggagccgatcctatagaagttcagatggacggacaacacctcagctgggatccgccaatccctctactccgcagcccgcaagcccagatgtcagctcgtcccattcactgtcagaatattcccacggccagagtccacgtagcccgatcagcccagaacttcattccgctcctttgacccctgtggctcgtgacaccccccggcatctggccagcgaggatacacggtgtagcacccctgaactggggttggacgagcagagcgtccagccatgggaaaggaggacttttcctcttgcccattcgccccaggctgagtgtgaggatcagctggacgcccaggaaagagcggctcgctgcacgcggaggacatcaggatccaaaacaggacgagaaaccgaggcagcgcccaccagcccacctatcgtgcccttgaagagcagacacctcgtcgcggccgccacagcccagcggccaacacaccggtag

SEQ ID NO: 317437 - DNA, 5108 bp, Artificial Sequence
  derived and/or modified sequence
tcctcctcctcctgctgccctttctccttctcctcgctctccctgtggctcccatttctctctctctttgttagttgtaactagaaaggcagggcagggtagaaaaatcccccggaactttaaatggcctctccgggcttccctgctgcgggtccgggctgggagtcgccccaagggcgggggtgtgcgggggcccttccccaggagctgccgcctcgttcgccagcttttcctttggcgttctatttaaaaaggcggcctgaagaacatgatttattcccgtaaaagaaccccccaaacaaactctggctctcgccttgaacttctcttgactgcaaaaggcctttctctgctcgaaacacacatcttggcgcgttgcacgtctgttctctggggaggcagtaaggggccgtggagctggcctcggcctcggcatcgggagaggctggacttcctgtctctctgtgctgaatggctgcgatggcgcccgctctcactgacgcagcagctgaagcacaccatatccggttcaaactggctcccccatcctctaccttgtcccctggcagtgccgaaaataacggcaacgccaacatccttattgctgccaacggaaccaaaagaaaagccattgctgcagaggatcccagcctagatttccgaaataatcctaccaaggaagacttgggaaagctgcaaccactggtggcatcttatctctgctctgatgtaacatctgttccctcaaaggagtctttgaagttgcaaggggtcttcagcaagcagacagtccttaaatctcatcctctcttatctcagtcctatgaactccgagctgagctgttggggagacagccagttttggagttttccttagaaaatcttagaaccatgaatacgagtggtcagacagctctgccacaagcacctgtaaatgggttggctaagaaattgactaaaagttcaacacattctgatcatgacaattccacttccctcaatgggggaaaacgggctctcacttcatctgctcttcatgggggtgaaatgggaggatctgaatctggggacttgaaggggggtatgaccaattgcactcttccacatagaagccttgatgtagaacacacaactttgtatagcaataatagcactgcaaacaaatcctctgtcaattccatggaacagccggcacttcaaggaagcagtagattatcacctggtacagactccagctctaacttggggggtgtcaaattggagggtaaaaagtctcccctgtcttccattcttttcagtgctttagattctgacacaaggataacagctttactgcggcgacaggctgacattgagagccgtgcccgcagattacaaaagcgcttacaggttgtgcaagccaagcaggttgagaggcatatacaacatcagctgggtggatttttggagaagactttgagcaaactgccaaacttggaatccttgagaccacggagccagttgatgctgactcgaaaggctgaagctgccttgagaaaagctgccagtgagaccaccacttcagagggacttagcaactttctgaaaagcaattcaatttcagaagaattggagagatttacagctagtggcatagccaacttgaggtgcagtgaacaggcatttgattcagatgtcactgacagtagttcaggaggggagtctgatattgaagaggaagaactgaccagagctgatcccgagcagcgtcatgtacccctgagacgcaggtcagaatggaaatgggctgcagaccgggcagctattgtcagccgctggaactggcttcaggctcatgtttctgacttggaatatcgaattcgtcagcaaacagacatttacaaacagatacgtgctaataaggggttgatagttcttggggaggtacctcccccagagcatacaacagacttatttcttccacttagttctgaggtgaagacagatcatgggactgataaattgattgagtctgtttctcagccattggaaaaccatggtgcccgtattattggtcatatttcagagtcactgtctaccaaatcatgtggagcactcagacctgtcaatggagttattaacactcttcagcctgtcttggcagaccacattccaggtgacagctctgatgctgaggaacaattacataagaagcaacgactgaatctcgtctcttcatcatctgatggcacctgtgtggcagcccggacacgtcctgtactgagctgtaagaagcggaggcttgttcgacccaacagcatcgttcctctttccaagaaggttcaccggaacagcacaatccgccctggctgtgatgtgaatccctcctgcgcactgtgtggttcaggcagcatcaacaccatgcctcccgaaattcactatgaagcccctctgttggaacgtctttcccagttggactcttgtgttcatcctgttctagcatttccagatgatgttcccacaagcctgcatttccagagcatgctgaaatctcagtggcagaacaagccttttgacaaaatcaaacctcccaaaaagttatcgcttaagcacagagcacccatgccgggcagtctgccagattcagctcgtaaggacaggcacaaattggtcagctccttcctaacaacagccatgttgaagcatcacacagacatgagcagttcgagctacttggcagccacccaccatcctccacacagtcccttggtgcgacagctctccacctcctcagattcccctgcacccgccagctctagctcacaggttacagccagcacatcgcagcagccagtaaggaggagaaggggagagagctcatttgatattaacaacattgtcatcccaatgtctgttgctgcaacaactcgcgtagagaaactgcaatacaaggaaatccttacgcccagctggcgggaggttgatcttcagtctctgaaggggagtcctgatgaggagaatgaagagattgaggacctatccgacgcagccttcgccgccctgcatgccaaatgtgaggagatggagagggcacggtggctgtggaccacgagtgtgccaccccagcggcggggcagcaggtcctacaggtcatcagacggccggacaaccccccagctgggcagtgccaacccctccaccccccagcctgcctcccctgatgtcagcagtagccactctttgtcagaatactcccatggtcagtcccctaggagccccattagcccggaactgcactcagcacccctcacccctgtggctcgggacactccgcgacacttagccagtgaggatacccgttgttccacaccagagctggggctggatgaacagtctgtccagccctgggagcggcggaccttccccctggcgcacagtccccaggcggagtgtgaggaccagctggatgcacaggagcgagcagcccgctgcactcgacgcacctcaggcagcaagactggccgggagacagaggcagcgcccacctcgcctcccattgtccccctcaagagtcggcatctggtggcagcagccacagctcagcgcccgactcacagatgagcgggagacagccatctaaacagactcactaactattggcattaaagcttcagaaatctctgcgtttgatattcaaacatcatatgccggaaattttcacagtttttagtgaacttaaggaatttagatcctactttggtatttttttttcttgttttaatttttgttttgtttttgtttccatgttttcttgtcacacacctgagcacttcctcccgttggcaaacagaagttcaggatgagaccctgctggcctggtcctggcacatcctctgcactgttgaatcactggacttactgatcttagatgaccaccccctccctcacacctgtgggcagggcagaacagcctggcgggctacagtttagcatggccttcttgagctagggtggaatggggcagggtgctctggactcttaccccctcccctcccatctgtggcttggctctgctgtggccctcctggctgggtccccttggtttttcgtgctggaacatccccaccagagcctctctgccataactgccagctgctctccccgagtgctcagctggcagaacacctttcctttctcacccagaacttaagagactgattttttgtttcatctgcatttggtcttctctgttttgactctttcactgcagtaacctggctgtggctgctcaggttcccctcctcatgccccttggtacccttccctgtctgctctcccatgccatgtacacacccacaacccgtccttccacttggaatatttttaccacctatcctgatctttgaaggtagggttaggactacttaacctctattcccactcccctgcaaactgggggttgtgggaagtgagcagccatctccctgtgtgattttttttttttttccctctgattcactttgccatgtttccttcacatccagatccctgtcggtgttagttccactcttggtctttcacgctccccttgcctgtggaacattgtctggtcctagctgtggttcccattgttcccccttcacccttctctgttaaccttgtgcctgtctcctgtatgatcacatcaccaaaaagggggaggggggagaagactctttttttttggccattttgtaatcgtataaaaatagtagacaactgcttaatggttggggttttttcacaattttcaacattagtgatttttttttctgtttgcaagttaaagggtttgtcattgtttctttaaaaaaaaatacaataatgcaccatatccctatgcataaagtgcttcttctatttataaggttgaaaattctgaataacccttttagcattgaaaaaaaaaacaaaaacaaaaaatggaaaaaaaaaaccttgtattttgtaaatattttcttttcctgctttggagctgtgtaatggcagcgaaacatgtagctgtctttgttctatagaaatgcttttcttcagagaagctgatctttgttaatgtcttgattctgttcgcaaagcacagactagtgctt

SEQ ID NO: 317438 - DNA, 1200 bp, Artificial Sequence
  derived and/or modified sequence
atgcctcctgagatccactatgaggcccccctgctggagcggctgagccagctggacagctgtgtgcaccctgtgctggccttcccagatgatgtgcccaccagcctgcacttccagagcatgctgaagagccagtggcagaacaagccctttgacaagatcaagccacccaagaagctgagcctgaagcaccgggcccccatgcctggcagcctgcctgattctgccaggaaggacagacacaagctggtgagcagcttcctgaccacagccatgctgaagcaccacacagacatgagcagcagcagctacctggccgccacccaccaccccccccacagccccctggtgcggcagctgagcaccagcagtgacagccctgccccagccagcagcagcagccaggtgacagccagcaccagccagcagcctgtgagaagaagaagaggagagagcagctttgacatcaacaacatcgtcatccccatgtctgtggccgccaccaccagggtggagaagctgcagtacaaggagatcctgacccccagctggagggaggtggacctgcagagcctgaagggcagcccagatgaagaaaatgaggagattgaggacctgagtgatgctgcctttgctgccctgcacgccaagtgtgaggagatggagcgggcccgctggctgtggaccacctctgtgcccccccagaggcggggcagccgcagctaccgcagcagtgatggccgcaccaccccccagctgggcagcgccaaccccagcaccccccagcctgccagcccagatgtgagcagcagccacagcctgtctgagtacagccacggccagagccccaggagccccatcagccctgagctgcacagcgcccccctgacccctgtggcccgggacacccccaggcacctggccagcgaggacacccgctgcagcaccccagagctgggcctggatgagcagagcgtgcagccctgggagaggaggaccttccccctggcccacagcccccaggctgaatgtgaggaccagctggatgcccaggagcgggccgcccgctgcaccaggaggaccagcggcagcaagacaggccgggagacagaggccgcccccaccagcccccccatcgtgcccctgaagagccgccacctggtggccgccgccacagcccagaggcccacccacaggtag

SEQ ID NO: 317439 - DNA, 1200 bp, Artificial Sequence
  derived and/or modified sequence
atgccccccgagatccactacgaggcccccctgctggagcggctgagtcagctggacagctgcgtccaccctgtcctggccttccccgacgatgtccccacgtccttgcatttccagtcgatgctgaagtcccagtggcagaacaagccattcgataaaatcaaaccacccaagaagttaagtttaaagcaccgagcaccaatgcccggatccttaccagacagcgccagaaaggacagacacaaacttgtgtcctccttcctcacaacagctatgttgaaacaccatactgacatgagttcgagctcatatctggccgctacccatcatcccccacattccccactggtaagacagctgtcaacgagctccgacagtcccgctcccgcaagctctagctcacaagtgaccgcttcaacttcacagcaaccagttaggcggcgtagaggtgaatcttccttcgatattaacaatatcgtgatccctatgtccgtggcggccacgactagagttgagaagttgcagtataaagagattctgactccatcatggcgcgaggtggacctccagtcccttaagggcagtccagatgaggagaacgaggaaattgaggaccttagtgacgccgccttcgccgctttacacgcaaagtgcgaagaaatggaaagggcgcggtggttgtggactacatccgtacccccacaacgccgcgggagtaggagctacagatctagcgacgggagaaccacgccccaactcgggtctgcaaacccttctacacctcagccagcttcccccgacgtgtcctctagccattccctttcagagtattcccatggacagagcccccgctcccccattagcccagagcttcactctgcccccctgacacccgttgcccgggacacaccccgccatctagcaagcgaggatactaggtgcagcactcctgagctggggctggatgagcaaagtgtgcagccttgggaaagacggacgtttcccttagcacacagccctcaggcagagtgtgaagaccagcttgacgcccaggaaagagcggcgaggtgcactaggagaacttctggctctaagaccggccgcgagaccgaagccgcccccacgagccccccaatcgtcccgctgaagtctcgtcaccttgtggccgcggctaccgcgcagcgtccaacccacaggtag

SEQ ID NO: 317440 - DNA, 1200 bp, Artificial Sequence
  derived and/or modified sequence
atgccgccagagatccactacgaagcgccactgctggaacgcctgtcccaactagattcatgtgtacacccagtgctggcctttccggacgatgtaccaacgtcccttcacttccaatccatgctgaaaagccagtggcagaacaagccattcgataagatcaaaccgccaaaaaaactgtcccttaagcaccgtgcccctatgcccggatctctgcctgacagcgcgcgtaaagaccgccacaaactggtgagctcctttctgactactgccatgctaaagcaccatacagacatgtcaagctcctcgtacctggctgctacccaccacccgcctcatagccctcttgtgcggcagctgtccacttccagtgatagcccggctccagcctcctccagcagccaggtgaccgcaagcacgtcccaacagcccgtgagaagacgcagaggagaaagctcatttgatatcaacaatatcgtgattcccatgtccgtggctgcaactaccagagtggagaagcttcagtataaagagatactgaccccgtcatggcgggaagtcgacctacagtcattgaaaggctccccagatgaggagaatgaggagattgaagatctttctgacgccgctttcgctgccctgcatgccaaatgcgaagaaatggagcgcgctcgttggttatggaccaccagcgtaccgcctcagagacggggtagccggagctacaggagctccgacggcagaactactccacagctgggcagcgccaatccaagcacgccacaacctgcctccccggatgtgagcagctcacactctctgtctgagtactcacatggtcaaagtcccagatctcccatctcaccagaactacacagtgcaccacttactccagtcgccagagacacacccagacatctggcctccgaggacactcgttgtagtacacccgagctgggtctggacgaacagtccgtacagccatgggagcggcgaacatttcccctggcccattctccacaagctgagtgcgaggatcagctggatgcacaggaacgggcagccagatgcacaaggcggacatctgggagtaagactggtagagagactgaggcagctcccacttcaccacctattgtccccctcaaaagccggcatttggtagccgcagccaccgcacagcgaccaacacacagatag

SEQ ID NO: 317441 - DNA, 1200 bp, Artificial Sequence
  derived and/or modified sequence
atgccccccgagatccactacgaggcccccctgctggagagactgagccagctggacagctgcgtgcaccccgtgctggccttccccgacgacgtgcccaccagcctgcacttccagagcatgctgaagagccagtggcagaacaagcccttcgacaagatcaagccccccaagaagctgagcctgaagcacagagcccccatgcccggcagcctgcccgacagcgccagaaaggacagacacaagctggtgagcagcttcctgaccaccgccatgctgaagcaccacaccgacatgagcagcagcagctacctggccgccacccaccaccccccccacagccccctggtgagacagctgagcaccagcagcgacagccccgcccccgccagcagcagcagccaggtgaccgccagcaccagccagcagcccgtgagaagaagaagaggcgagagcagcttcgacatcaacaacatcgtgatccccatgagcgtggccgccaccaccagagtggagaagctgcagtacaaggagatcctgacccccagctggagagaggtggacctgcagagcctgaagggcagccccgacgaggagaacgaggagatcgaggacctgagcgacgccgccttcgccgccctgcacgccaagtgcgaggagatggagagagccagatggctgtggaccaccagcgtgcccccccagagaagaggcagcagaagctacagaagcagcgacggcagaaccaccccccagctgggcagcgccaaccccagcaccccccagcccgccagccccgacgtgagcagcagccacagcctgagcgagtacagccacggccagagccccagaagccccatcagccccgagctgcacagcgcccccctgacccccgtggccagagacacccccagacacctggccagcgaggacaccagatgcagcacccccgagctgggcctggacgagcagagcgtgcagccctgggagagaagaaccttccccctggcccacagcccccaggccgagtgcgaggaccagctggacgcccaggagagagccgccagatgcaccagaagaaccagcggcagcaagaccggcagagagaccgaggccgcccccaccagcccccccatcgtgcccctgaagagcagacacctggtggccgccgccaccgcccagagacccacccacagatag

SEQ ID NO: 317442 - protein, 460 aa, Artificial Sequence
  derived and/or modified sequence
MEKYERIRVVGRGAFGIVHLCLRKADQKLVIIKQIPVEQMTKEERQAAQNECQVLKLLNHPNVIEYYENFLEDKALMIAMEYAPGGTLAEFIQKRCNSLLEEETILHFFVQILLALHHVHTHLILHRDLKTQNILLDKHRMVVKIGDFGISKILSSKSKAYTVVGTPCYISPELCEGKPYNQKSDIWALGCVLYELASLKRAFEAANLPALVLKIMSGTFAPISDRYSPELRQLVLSLLSLEPAQRPPLSHIMAQPLCIRALLNLHTDVGSVRMRRPVQGQRAVLGGRVWAPSGSTGGLRQRETWGKSSLPACRNVRRVFVLRPPSVLQGREVRGPQQHREQDHQCPLQRYPPGTCEASHPTTTVVSVCLGWWAGHPPAAANAQHRGGPGGSWAHAESRRHALWASHPVGGPTPRCRRRQSPSWGSGAATAPVHLAFPGGPVGCDHQARGLWGLLHCLPD

SEQ ID NO: 317443 - DNA, 1383 bp, Artificial Sequence
  derived and/or modified sequence
atggaaaagtacgagcgcataagagtggtcggtcgcggggcctttggcattgtccacctctgtctccgaaaagccgatcagaagttagtcataatcaagcaaatccccgtagaacagatgaccaaggaggagagacaggccgcccagaacgaatgccaggtgttgaaactgttgaaccatcctaatgtaatagagtattacgaaaatttcctcgaggacaaagcgctgatgattgcgatggagtacgcgcctggtggcactctcgcagaattcattcagaagcgctgtaactccctgctggaggaggagaccatcctacatttctttgtgcaaatcttgctggccctccatcatgtccacactcacctgattctacacagagacctgaaaacgcagaacatactgttggataagcacaggatggtggtgaaaatcggtgacttcgggatctccaaaattttatcgagcaaatcaaaagcctacacagttgtgggtactccatgttacatttcccctgagctttgtgaaggtaagccatataaccaaaaatcagatatttgggccttggggtgcgtgctgtacgagctagcttcactgaaacgtgccttcgaagctgcaaatctccccgctttggttttgaagattatgtcgggcacatttgcccccatatcagacagatacagtcccgaactcaggcaacttgtcctgtcccttctgtccttggagcctgcccagaggccccccttatctcatatcatggcacagcccctatgcatcagagccttactgaatttgcatacagacgtggggagtgtcaggatgcggcgtccagtacagggtcagcgagcagtcttgggcgggcgcgtatgggcgccatctggatccaccgggggacttaggcagcgcgaaacttggggaaagtcatcactgcccgcatgtcgtaatgtgaggagggtgttcgtattacggccccccagtgtactgcaaggcagagaggtccggggccctcagcagcaccgggagcaagaccaccaatgcccgctccagagataccctccaggaacctgtgaagcttcgcatccaaccaccactgtggtgagcgtgtgcctgggctggtgggcagggcacccaccagcagccgccaatgcccagcacaggggaggacctgggggttcgtgggcccacgctgaatctcgaagacacgctctctgggcctctcaccccgttggcggacccactccgcggtgtcggcgccgccagtccccatcctgggggtccggcgcagctactgcccccgtgcacctcgctttccccgggggcccggtggggtgcgatcaccaggcgcgtggtctgtggggtctcttgcattgtctgcccgactag

SEQ ID NO: 317444 - DNA, 1383 bp, Artificial Sequence
  derived and/or modified sequence
atggagaagtatgaaagaatccgggtggtgggccgcggggcctttggaattgtgcacctgtgcctgaggaaggctgaccagaagctggtgatcatcaagcagatccctgtggagcagatgaccaaggaggagcggcaggccgcccagaatgaatgccaggtgctgaagctgctgaaccaccccaacgtcatcgagtactatgagaacttcctggaggacaaggccctgatgattgccatggagtatgcccctgggggcaccctggccgagttcatccagaagcgctgcaacagcctgctggaggaggagaccatcctgcacttctttgtgcagatcctgctggccctgcaccacgtgcacacccacctgatcctgcaccgggacctgaagacccagaacatcctgctggacaagcacaggatggtggtgaagattggagactttggcatcagcaagatcctgagcagcaagagcaaggcctacacagtggtgggcaccccctgctacatcagccctgagctgtgtgagggcaagccctacaaccagaagagtgacatctgggccctgggctgtgtgctgtatgagctggccagcctgaagagggcctttgaagctgccaacctgcctgccctggtgctgaagatcatgagcggcacctttgcccccatcagtgaccgctacagccctgagctgcggcagctggtgctgagcctgctgagcctggagcccgcccagaggcctcccctgagccacatcatggcccagcccctgtgcatccgggccctgctgaacctgcacacagatgtgggctctgtgaggatgagaagacctgtgcagggccagagagctgtgctgggcggccgggtgtgggcccccagcggcagcactggaggcctgcggcagcgggagacctggggcaagagcagcctgcctgcctgcagaaatgtgagaagagtgtttgtgctgcggccccccagcgtgctgcagggccgggaggtgcggggcccccagcagcaccgggagcaggaccaccagtgccccctgcagcgctacccacctggcacctgtgaggccagccaccccaccaccaccgtggtgtctgtgtgcctgggctggtgggccggccaccccccagctgctgccaatgcccagcacagaggaggccctgggggctcctgggcccacgccgagagcagaagacatgccctgtgggccagccaccctgtgggcggccccaccccccgctgcagaagacggcagagccccagctggggcagcggggccgccacagcccctgtgcacctggccttccctgggggccctgtgggctgtgaccaccaggcccggggcctgtggggcctgctgcactgcctgcctgactag

SEQ ID NO: 317445 - DNA, 1383 bp, Artificial Sequence
  derived and/or modified sequence
atggagaagtacgagcggatccgggtggtgggccggggcgccttcgggatagtgcatctgtgcctcagaaaggctgatcagaagttagtcataattaagcagatcccggtagagcagatgactaaggaggaacgacaagcagctcaaaatgaatgccaggtcctaaagttactgaatcaccccaacgtcatcgaatactacgaaaacttcctcgaggacaaagccctgatgattgccatggaatacgcccccggcggcacactggctgaatttatccagaagagatgtaattcccttctggaagaggaaacaattctgcattttttcgtccagatccttctcgcgcttcatcacgtgcacacccaccttatcctccatagagacctcaagacccagaacatcctcctcgataagcaccgcatggtcgttaagattggggacttcggcatcagcaagatcctttcttctaagtctaaagcctacacagtggtcggtactccatgttatatctctcccgaactctgcgaaggcaagccttataaccagaagagtgatatttgggctttgggttgcgtcctgtatgagcttgctagcctcaagagggcattcgaggccgcaaacctgccagcgctggtcctcaagatcatgagtggtactttcgctcctatttccgaccgctatagtcctgaattgagacagcttgtcctcagcttgctgtccctagaaccagcacagcgaccccctctgtcccacataatggctcagcctctctgtatccgggccttgctgaatcttcataccgacgtgggcagcgttcggatgcgaagaccagttcaggggcagcgggccgtcctgggcggacgggtttgggcaccgagcggaagcacagggggcctgcgccaacgcgagacatggggaaagtccagtctgcccgcatgccgaaatgtgcggcgagtgttcgttcttaggccgccatctgtactgcagggcagagaggttagaggcccccagcagcaccgcgagcaggaccaccagtgtcctttgcagagatacccaccagggacatgcgaggcgtcacaccctactacaacagtggtcagcgtatgcctgggatggtgggcaggacatccacccgcggcagccaatgcccagcatcggggcggccccggcggcagttgggcgcatgccgagagtaggagacatgcactgtgggcaagccaccccgtggggggtccaaccccacgctgtcggcgaagacagagtccatcctggggcagtggggctgctaccgctcctgtgcatctcgcatttcccgggggcccagtcggatgtgaccatcaggctcgaggactttggggcctgctgcactgccttcctgattag

SEQ ID NO: 317446 - DNA, 2055 bp, Artificial Sequence
  derived and/or modified sequence
aagaaatgagatggagaagtacgagcggatccgagtggtggggagaggtgccttcgggattgtgcacctgtgcctgcgaaaggctgaccagaagctggtgatcatcaagcagattccagtggaacagatgaccaaggaagagcggcaggcagcccagaatgagtgccaggtcctcaagctgctcaaccaccccaatgtcattgagtactacgagaacttcctggaagacaaagcccttatgatcgccatggaatatgcaccaggcggcactctggctgagttcatccaaaagcgctgtaattccctgctggaggaggagaccatcctgcacttcttcgtgcagatcctgcttgcactgcatcatgtgcacacccacctcatcctgcaccgagacctcaagacccagaacatcctgcttgacaaacaccgcatggtcgtcaagatcggtgatttcggcatctccaagatccttagcagcaagagcaaggcctacacggtggtgggtaccccatgctatatctcccctgagctgtgtgagggcaagccctacaaccagaagagtgacatctgggccctgggctgtgtcctctacgagctggccagcctcaagagggctttcgaggctgcgaacttgccagcactggtgctgaagatcatgagtggcacctttgcacctatctctgaccggtacagccctgagcttcgccagctggtcctgagtctactcagcctggagcctgcccagcggccaccactcagccacatcatggcacagcccctctgcatccgtgccctcctcaacctccacaccgacgtgggcagtgtccgcatgcggaggcctgtgcagggacagcgagcggtcctgggcggcagggtgtgggcacccagtgggagcacaggaggtctgaggcagagggaaacctggggcaagtcctcccttcctgcatgtaggaatgtcaggagggtctttgtccttaggcccccatctgtcctgcagggcagagaagtccgtggcccccagcaacacagggagcaggaccaccagtgtccgctgcagaggtatcccccggggacctgtgaggccagccatcccaccaccactgtcgtcagtgtatgcctggggtggtgggctgggcacccccctgcggctgccaatgctcaacacagaggtggtccaggtggcagctgggcgcacgcagaaagccggcgtcacgcgctctgggcgtctcatcctgtgggaggccccacccctaggtgcaggcggaggcagtctccttcctggggcagtggagcagccacagccccagttcatctcgcgtttcctggagggccagtcgggtgtgaccatcaagcacgtggcctgtggggacttcttcactgcctgcctgactgacagaggcatcatcatgacattcggcagcggcagcaatgggtgcctaggccatggcagcctcactgacatcagccagcccaccattgtggaggctttgctgggctatgaaatggtgcagttggatgagacacacccttacacggtgacttccgtgtcctgttgccatggaaacaccctcctggctgttcgatcggtcacagatgagccggtccccccctgaggcacccggattcacctctggaccaccctgatattgcttctcctctgaatgctctgaaaagtgcaggtgcccaaggcatgacttgcagctgtctcctggattgtgtcatcatggggtatcagggctggcaaaacccctgctctgcttttggccttggatatggaaacctcaaccactttgttctcctaccacctctttgcccttcctaccccttcctcccttcagtcagtgtccccagggtccagcctggctagagttagaaggcagacctagcctttggaagcagggtggcctccagagccttgccataaaaaggctgaaggcagccgggcgcagtggctcacgcctgtaatcccagcactttgggaggctgaggcgggcggatcacgaggtcaggagatcgagaccatcctggctaacgtggtgaaaccccatctctact

SEQ ID NO: 317447 - DNA, 1383 bp, Artificial Sequence
  derived and/or modified sequence
atggagaagtacgagagaatacgcgtggttgggagaggagcgtttggcatcgtacacctttgccttaggaaagctgatcagaagctggtgatcattaaacagattccggtggagcagatgacgaaggaggaaagacaggcagcacaaaacgaatgccaggtgctaaaactcctgaaccacccaaacgtcattgaatactacgagaattttcttgaggataaggctcttatgatcgccatggaatacgccccaggtggaaccctcgcagaattcatacaaaagagatgtaactctctgttggaggaggaaacaatcctgcacttcttcgtgcagattctattggccctgcatcacgtgcacacacacctaattctgcaccgagacctgaagactcaaaatattctcctcgacaaacaccggatggtggttaaaattggggattttggaataagcaaaatcctttctagtaaatcaaaggcttacacagtcgtggggacgccctgctacattagccctgagctatgcgaggggaagccttataaccaaaaatccgacatatgggccctcggctgcgtgctttatgaattggcttcacttaagcgcgcattcgaggccgcaaacctgccggctcttgtcctgaagataatgagcgggaccttcgctccaatttctgaccggtactcccctgaactccgccagttagtgctgagcctgctgtctttagagcctgcacagcgacctccgcttagtcacattatggcccaacctctgtgtatcagggcactgctgaatctgcacacggatgttggaagcgtcaggatgagacggcctgtacagggccagcgggctgtgttgggcggtagagtgtgggcgccttccgggagtactgggggactgagacaaagggagacatggggcaagagctcactcccagcgtgcagaaacgtgcgaagggtgttcgtactacgtcccccaagcgtcctccaggggcgagaagtgagaggcccacagcaacatagagagcaggaccaccaatgcccactgcaacggtacccaccaggtacttgcgaagcatctcaccccaccaccactgtagttagcgtatgcctgggatggtgggccggtcaccctcctgccgctgccaacgcccaacaccggggagggcctggtggaagctgggcacatgcggaatcccggagacacgccctgtgggctagccatcccgttggaggaccgactccccgatgcagacgccgtcagagtccctcttggggctcaggcgctgcgaccgcccctgttcacctggcctttcccggtggtcctgttggctgcgaccatcaggcgaggggattatggggtttgctccactgcctccccgattag

SEQ ID NO: 317448 - DNA, 1383 bp, Artificial Sequence
  derived and/or modified sequence
atggagaagtacgagagaatcagagtggtgggcagaggcgccttcggcatcgtgcacctgtgcctgagaaaggccgaccagaagctggtgatcatcaagcagatccccgtggagcagatgaccaaggaggagagacaggccgcccagaacgagtgccaggtgctgaagctgctgaaccaccccaacgtgatcgagtactacgagaacttcctggaggacaaggccctgatgatcgccatggagtacgcccccggcggcaccctggccgagttcatccagaagagatgcaacagcctgctggaggaggagaccatcctgcacttcttcgtgcagatcctgctggccctgcaccacgtgcacacccacctgatcctgcacagagacctgaagacccagaacatcctgctggacaagcacagaatggtggtgaagatcggcgacttcggcatcagcaagatcctgagcagcaagagcaaggcctacaccgtggtgggcaccccctgctacatcagccccgagctgtgcgagggcaagccctacaaccagaagagcgacatctgggccctgggctgcgtgctgtacgagctggccagcctgaagagagccttcgaggccgccaacctgcccgccctggtgctgaagatcatgagcggcaccttcgcccccatcagcgacagatacagccccgagctgagacagctggtgctgagcctgctgagcctggagcccgcccagagaccccccctgagccacatcatggcccagcccctgtgcatcagagccctgctgaacctgcacaccgacgtgggcagcgtgagaatgagaagacccgtgcagggccagagagccgtgctgggcggcagagtgtgggcccccagcggcagcaccggcggcctgagacagagagagacctggggcaagagcagcctgcccgcctgcagaaacgtgagaagagtgttcgtgctgagaccccccagcgtgctgcagggcagagaggtgagaggcccccagcagcacagagagcaggaccaccagtgccccctgcagagatacccccccggcacctgcgaggccagccaccccaccaccaccgtggtgagcgtgtgcctgggctggtgggccggccacccccccgccgccgccaacgcccagcacagaggcggccccggcggcagctgggcccacgccgagagcagaagacacgccctgtgggccagccaccccgtgggcggccccacccccagatgcagaagaagacagagccccagctggggcagcggcgccgccaccgcccccgtgcacctggccttccccggcggccccgtgggctgcgaccaccaggccagaggcctgtggggcctgctgcactgcctgcccgactag

SEQ ID NO: 317449 - DNA, 992 bp, Artificial Sequence
  derived and/or modified sequence
cgggggcggggcctggaggagcctacaccgactctggaggaagactggagcctttgcggcggcgctgcccctcccctggtccccgcgagctcggagggcccggctggtgctgcgggggccccgggaggttgaaaactaagcatggggaagagctgcaaggtggtcgtgtgtggccaggcgtctgtgggcaaaacttcaatcctggagcagcttctgtatgggaaccatgtagtgggttcggagatgatcgagacgcaggaggacatctacgtgggctccattgagacagaccggggggtgcgagagcagatagcagagagtcttttcagcgtgtggagctgctcaagaaggagattgacaaatccaaggacaagaaggaggtcaccatcgtggtccttggcaacaagtgtgacttacaggagcagcggcgtgtagacccagatgtggctcagcactgggccaagtcagagaaggtgaagctgtgggaggtgtcagtggcggaccggcgctccctcctggagccctttgtctacttggccagcaagatgacgcaaccccagagcaagtctgccttccccctcagccggaagaacaagggcagcggctccttggatggctgaagagctgccgttcctctttcacgatcccagccccatttcagtgtctggggctctggtagatgtgttgagggcaaagtagaggacaagctgtctttcccagtcagccagggagctccccgccaggccacgccccagccactttgctccctctcacctctgggaagtgcaaatactcttggttgacatccccttcctcagccctcccagcctactccccatcccagcttttagaggatctgctccactgtctcctggggcagttgtgggtcactgtcccttccagctgccccagacaggaagcagagtcaccacgcagcagtgtcccttcttgggtctgagttcctattataggtaggggccccaccctctggg

SEQ ID NO: 317450 - protein, 447 aa, Artificial Sequence
  derived and/or modified sequence
MELDLSPPHLSSSPEDLCPAPGTPPGTPRPPDTPLPEEVKRSQPLLIPTTGRKLREEERRATSLPSIPNPFPELCSPPSQSPILGGPSSARGLLPRDASRPHVVKVYSEDGACRSVEVAAGATARHVCEMLVQRAHALSDETWGLVECHPHLALERGLEDHESVVEVQAAWPVGGDSRFVFRKNFAKYELFKSSPHSLFPEKMVSSCLDAHTGISHEDLIQNFLNAGSFPEIQGFLQLRGSGRKLWKRFFCFLRRSGLYYSTKGTSKDPRHLQYVADVNESNVYVVTQGRKLYGMPTDFGFCVKPNKLRNGHKGLRIFCSEDEQSRTCWLAAFRLFKYGVQLYKNYQQAQSRHLHPSCLGSPPLRSASDNTLVAMDFSGHAGRVIENPREALSVALEEAQAWRKKTNHRLSLPMPASGTSLSAACSWSGRVSGTPRALSSLCATCRK

SEQ ID NO: 317451 - DNA, 1344 bp, Artificial Sequence
  derived and/or modified sequence
atggagctcgacctgtcgccaccccacctctccagctccccagaggacctctgcccagcccccggaacaccccccggcacgcctcgaccgcccgacactccactgccagaagaggtcaaaaggagtcagcctctcctgattcctactaccggccgaaagttgcgagaggaagaacgccgcgcgacgtcccttccgtcgatcccaaaccctttcccagagctgtgttccccaccttctcagtctcctatactgggaggaccatcctcagcacggggcctgctgccccgagacgcctctagaccccatgtggtgaaggtgtatagcgaagatggcgcctgcagatccgtggaggtcgccgctggcgctaccgcccgacacgtttgtgaaatgctcgtgcagcgggcacatgccctctcagacgaaacttggggattagtcgaatgccatccccaccttgctctggaaagagggttggaggatcacgagtccgtggtggaagtgcaggccgcctggccagtaggaggtgacagtcggttcgtgtttagaaagaatttcgctaaatatgagctattcaagagcagcccgcacagtttatttccagagaaaatggtgagctcatgcttagacgcacatactggcatttcccacgaggacttaatccagaactttctgaacgccggctcatttcccgagatacagggcttcctgcaattgagagggagcgggcggaagctgtggaagagattcttctgcttcttgcgccgctccggactgtactacagtactaaggggaccagcaaggaccccagacatctgcaatacgtggcggatgttaatgagtccaatgtgtacgtggtgactcaaggtcgaaaattatacggaatgcctacagactttggcttctgcgtcaagcctaataagctcaggaacgggcataaaggtctgcggatcttctgttccgaagatgagcaaagccgcacttgttggcttgctgcttttcggttgtttaagtatggcgtccagttgtacaaaaactatcagcaggcccagtcccgtcacctgcacccttcatgcctagggtcccccccactgaggagcgcctctgataacaccctcgtcgcgatggacttcagtggtcacgcgggcagggtgatcgaaaatccccgtgaagccctctcagtcgccctcgaagaagcacaggcttggcggaaaaagactaatcaccgactctctctaccaatgccagcctctggtactagtttgtcagctgcatgcagctggtcaggacgggtttccggcacccctcgggcattatccagtctttgcgcaacgtgccgcaagtag

SEQ ID NO: 317452 - DNA, 1344 bp, Artificial Sequence
  derived and/or modified sequence
atggaacttgacctgagtccacctcacctttccagctctccagaggatctttgccctgcacctggtaccccacccggcactccaaggcccccggacacccccttgcccgaggaggtgaagaggagccaaccattgctcatcccaactactgggcgtaagcttagggaggaggagaggcgggcgaccagcctaccttcaataccgaaccctttccccgaactgtgcagcccaccctcccagtcccctatcctggggggccctagttccgccaggggtctgctccctagagatgcttccaggccccatgtagttaaagtctatagcgaggacggcgcatgtcgctccgtggaggtggctgccggcgctacagcgcggcacgtgtgtgagatgctggtgcaacgcgcacatgctctgtcggacgagacctggggcctggtggaatgtcacccacatctcgcacttgagagagggctcgaggaccacgagtccgtcgtggaagtccaagccgcatggcccgtggggggggacagccgtttcgtcttcagaaagaatttcgccaagtacgaactgtttaagagctcgcctcactctttgttccccgaaaaaatggtcagttcttgcctggacgcccacaccggcatatctcacgaagacctcatccagaacttcctgaatgctggctcctttcctgaaattcagggattcttgcagctgcggggtagtggcagaaaactctggaagaggttcttttgctttttaaggcgctctggtctgtattattcaacaaaaggcacctccaaggatccccggcacctccagtacgtagcagacgtgaacgaatcaaatgtttacgtggtgacacagggaagaaaactttatgggatgcctaccgatttcgggttctgtgtgaaacccaacaaactgcggaacggccataagggcctgaggatcttctgttcggaagatgagcagagccgcacgtgctggctagctgcttttagactctttaagtatggcgtgcaactctacaagaattaccagcaggcccagagtagacatctgcatcctagctgtctcggctctccccctctgcgctctgccagtgataacactctggtggctatggatttttccggtcatgccggtagggtgatcgaaaacccccgtgaggcactgtcagtcgccctcgaggaggcgcaggcttggaggaaaaaaacaaaccaccgcctgagcttgccaatgcccgcaagtggtacttcattgtccgccgcatgttcttggagcgggagggtgagtggaactccacgcgcgctcagtagcctttgtgcgacttgtcgtaagtag

SEQ ID NO: 317453 - DNA, 2146 bp, Artificial Sequence
  derived and/or modified sequence
ttttagtttccttgggcctggaatctggacacacagggctcccccccgcctctgacttctctgtccgaagtcgggacaccctcctaccacctgtagagaagcgggagtggatctgaaataaaatccaggaatctgggggttcctagacggagccagacttcggaacgggtgtcctgctactcctgctggggctcctccaggacaagggcacacaactggttccgttaagcccctctcttgctcagacgccatggagctggatctgtctccacctcatcttagcagctctccggaagacctttgcccagcccctgggacccctcctgggactccccggccccctgatacccctctgcctgaggaggtaaagaggtcccagcctctcctcatcccaaccaccggcaggaaacttcgagaggaggagaggcgtgccacctccctcccctctatccccaaccccttccctgagctctgcagtcctccctcacagagcccaattctcgggggcccctccagtgcaagggggctgctcccccgcgatgccagccgcccccatgtagtaaaggtgtacagtgaggatggggcctgcaggtctgtggaggtggcagcaggtgccacagctcgccacgtgtgtgaaatgctggtgcagcgagctcacgccttgagcgacgagacctgggggctggtggagtgccacccccacctagcactggagcggggtttggaggaccacgagtccgtggtggaagtgcaggctgcctggcccgtgggcggagatagccgcttcgtcttccggaaaaacttcgccaagtacgaactgttcaagagctccccacactccctgttcccagaaaaaatggtctccagctgtctcgatgcacacactggtatatcccatgaagacctcatccagaacttcctgaatgctggcagctttcctgagatccagggctttctgcagctgcggggttcaggacggaagctttggaaacgctttttctgcttcttgcgccgatctggcctctattactccaccaagggcacctctaaggatccgaggcacctgcagtacgtggcagatgtgaacgagtccaacgtgtacgtggtgacgcagggccgcaagctctacgggatgcccactgacttcggtttctgtgtcaagcccaacaagcttcgaaatggccacaaggggcttcggatcttctgcagtgaagatgagcagagccgcacctgctggctggctgccttccgcctcttcaagtacggggtgcagctgtacaagaattaccagcaggcacagtctcgccatctgcatccatcttgtttgggctccccacccttgagaagtgcctcagataataccctggtggccatggacttctctggccatgctgggcgtgtcattgagaacccccgggaggctctgagtgtggccctggaggaggcccaggcctggaggaagaagacaaaccaccgcctcagcctgcccatgccagcctccggcacgagcctcagtgcagcctgttcctggtccgggagagtcagcggaacccccagggctttgtcctctctttgtgccacctgcagaaagtgaagcattatctcatcctgccgagcgaggaggagggccgcctgtacttcagcatggatgatggccagacccgcttcactgacctgctgcagctcgtggagttccaccagctgaaccgcggcatcctgccgtgcttgctgcgccattgctgcacgcgggtggccctctgaccaggccgtggactggctcatgcctcagcccgccttcaggctgcccgccgcccctccacccatccagtggactctggggcgcggccacaggggacgggatgaggagcgggagggttccgccactccagttttctcctctgcttctttgcctccctcagatagaaaacagcccccactccagtccactcctgacccctctcctcaagggaaggccttgggtggccccctctccttctcctagctctggaggtgctgctctagggcagggaattatgggagaagtgggggcagcccaggcggtttcacgccccacactttgtacagaccgagaggccagttgatctgctctgttttatactagtgacaataaagattattttttgat

SEQ ID NO: 317454 - DNA, 1667 bp, Artificial Sequence
  derived and/or modified sequence
gacaagggcacacaactggttccgttaagcccctctcttgctcagacgccatggagctggatctgtctccacctcatcttagcagctctccggaagacctttgcccagcccctgggacccctcctgggactccccggccccctgatacccctctgcctgaggaggtaaagaggtcccagcctctcctcatcccaaccaccggcaggaaacttcgagaggaggagaggcgtgccacctccctcccctctatccccaaccccttccctgagctctgcagtcctccctcacagagcccaattctcgggggcccctccagtgcaagggggctgctcccccgcgatgccagccgcccccatgtagtaaaggtgtacagtgaggatggggcctgcaggtctgtggaggtggcagcaggtgccacagctcgccacgtgtgtgaaatgctggtgcagcgagctcacgccttgagcgacgagacctgggggctggtggagtgccacccccacctagcactggagcggggtttggaggaccacgagtccgtggtggaagtgcaggctgcctggcccgtgggcggagatagccgcttcgtcttccggaaaaacttcgccaagtacgaactgttcaagagctccccacactccctgttcccagaaaaaatggtctccagctgtctcgatgcacacactggtatatcccatgaagacctcatccagaacttcctgaatgctggcagctttcctgagatccagggctttctgcagctgcggggttcaggacggaagctttggaaacgctttttctgcttcttgcgccgatctggcctctattactccaccaagggcacctctaaggatccgaggcacctgcagtacgtggcagatgtgaacgagtccaacgtgtacgtggtgacgcagggccgcaagctctacgggatgcccactgacttcggtttctgtgtcaagcccaacaagcttcgaaatggccacaaggggcttcggatcttctgcagtgaagatgagcagagccgcacctgctggctggctgccttccgcctcttcaagtacggggtgcagctgtacaagaattaccagcaggcacagtctcgccatctgcatccatcttgtttgggctccccacccttgagaagtgcctcagataataccctggtggccatggacttctctggccatgctgggcgtgtcattgagaacccccgggaggctctgagtgtggccctggaggaggcccaggcctggaggaagaagacaaaccaccgcctcagcctgcccatgccagcctccggcacgagcctcagtgcagcctgttcctggtccgggagagtcagcggaacccccagggctttgtcctctctttgtgccacctgcagaaagtgaagcattatctcatcctgccgagcgaggaggagggccgcctgtacttcagcatggatgatggccagacccgcttcactgacctgctgcagctcgtggagttccaccagctgaaccgcggcatcctgccgtgcttgctgcgccattgctgcacgcgggtggccctctgaccaggccgtggactggctcatgcctcagcccgccttcaggctgcccgccgcccctccacccatccagtggactctggggcgcggccacaggggacgggatgaggag

SEQ ID NO: 317455 - DNA, 1344 bp, Artificial Sequence
  derived and/or modified sequence
atggagctggacctgagccccccccacctgagcagcagccctgaggacctgtgcccagcccctggcaccccacctggcaccccccggcccccagacacccccctgcctgaggaggtgaagaggagccagcccctgctgatccccaccaccggcaggaagctgcgggaggaggagcggcgggccaccagcctgcccagcatccccaaccccttccctgagctgtgcagcccccccagccagagccccatcctgggcggccccagcagcgcccggggcctgctgcccagagatgccagccggccccacgtggtgaaggtgtacagtgaagatggagcctgccgctctgtggaggtggccgccggggccacagcccggcacgtgtgtgagatgctggtgcagagggcccacgccctgagtgatgagacctggggcctggtggagtgccacccccacctggccctggagcggggcctggaggaccatgaatctgtggtggaggtgcaggccgcctggcctgtgggcggggacagcagatttgtgttcaggaagaactttgccaagtatgagctgttcaagagcagcccccacagcctcttccctgagaagatggtgagcagctgcctggatgcccacacaggcatcagccatgaagatctcatccagaacttcctgaatgccggcagcttccctgagatccagggcttcctgcagctgcggggcagcggcaggaagctgtggaagcgcttcttctgcttcctgcggcgcagcggcctgtactacagcaccaagggcaccagcaaggaccccaggcacctgcagtatgtggctgatgtgaatgaaagcaatgtgtatgtggtgacccagggcaggaagctgtatggcatgcccacagactttggcttctgtgtgaagcccaacaagctgagaaatggccacaagggcctgcgcatcttctgcagtgaagatgagcagagcaggacctgctggctggccgccttccgcctcttcaagtatggagtgcagctgtacaagaactaccagcaggcccagagccgccacctgcaccccagctgcctgggcagcccccccctgcggagcgccagtgacaacaccctggtggccatggacttcagcggccatgctggccgggtgattgagaacccccgggaggccctgtctgtggccctggaggaggcccaggcctggaggaagaagaccaaccaccggctgagcctgcccatgcctgccagcggcaccagcctgtctgctgcctgctcctggagcggccgggtgtctggcaccccccgggccctgagcagcctgtgtgccacctgcaggaagtag

SEQ ID NO: 317456 - DNA, 1344 bp, Artificial Sequence
  derived and/or modified sequence
atggagctggacctgagccccccccacctgagcagcagccccgaggacctctgtccagctcctggcacacctccaggtacaccacgcccccccgacacccccctaccagaggaagtcaagagatcccaacctttgctgatcccaactaccggtcggaagctgagggaggaggagcggagagccacgagcctcccgtccatcccaaaccccttccctgaattgtgttctcctccaagccagtctccgatactgggtggaccttcgagcgcgcgaggactccttcctagagatgcatcccgcccccacgtggtcaaggtttactccgaggacggggcctgcaggtcagtggaggttgcagccggtgcaacagcgaggcatgtgtgcgagatgctggtacagcgagcccatgccctgagcgacgagacttggggcctggtcgagtgtcacccccacctggccctggagcgcggcctggaggaccatgagtccgtcgtagaagtgcaagctgcctggcctgtgggaggggactccagatttgtgtttcgtaaaaattttgctaaatatgagttgttcaaatcgagccctcatagtcttttccctgaaaaaatggtaagttcgtgccttgacgcccatacggggattagtcacgaggatctcattcagaattttctgaacgccggcagttttccagagatccagggctttctgcagctgaggggcagcggccgaaagctgtggaaacggttcttctgcttcctgagacggagtggcctctactacagcactaaaggaaccagtaaagatccacgtcacttgcaatacgtggcagacgtcaatgagtccaacgtttacgtggtgactcagggtaggaagctgtacggcatgcctacagattttggattttgtgttaagccaaataaacttaggaatggacacaagggccttcggatattttgcagtgaagacgagcaatcccgaacctgctggttagccgcgtttagattattcaagtatggagtgcaactatataaaaattatcagcaggcccagtctcggcatttgcaccctagttgccttggatctcccccgctgaggtctgcttcagataatactctagtcgccatggacttctccggtcacgctggaagggtcattgagaaccctcgtgaggcactgtctgtagcactggaagaagcccaggcctggcgaaagaagacaaatcatcggctatccctccccatgccagcatctgggacttccctgtctgctgcgtgctcctggtctgggagagtgagtggaacccctagagccttgagttctctgtgtgccacatgtcgcaagtag

SEQ ID NO: 317457 - DNA, 1344 bp, Artificial Sequence
  derived and/or modified sequence
atggagctggacctgagccccccccacctgagcagcagccccgaggatttatgccctgctcccggcacacctcctgggacaccaagaccccctgatacacctttgcccgaggaggtgaaaagaagccagcctctgctgatcccaaccaccggtcggaagctgcgcgaggaggagcgccgcgcgacaagtctcccctctattcctaatcccttccctgaactttgctcccccccttctcagtctcctattctgggcggtccgtcttctgcccgcggactgctgcctagagacgccagccgccctcacgtcgtcaaagtttatagcgaagacggcgcctgcaggtcagtcgaggtggccgctggtgctaccgcaaggcacgtctgcgaaatgctggtccagagagctcatgcactgagtgatgagacctggggtctggtcgaatgtcaccctcacctggccctggaacgtgggctggaggatcacgagagtgtggttgaggtgcaggccgcatggcctgtcggtggcgactcgagattcgttttcaggaagaattttgcaaagtacgaactcttcaagagctccccccattcccttttccctgaaaaaatggtgtctagttgcctcgacgcacacacaggaattagtcacgaggatttgatacaaaacttcctcaatgctggctctttccctgagattcagggattcctacagctgcgggggtctgggcgcaaactgtggaagcggtttttctgctttctgagacggtccggattgtactattctaccaaggggacgagcaaagatcccaggcatttgcaatacgtggccgacgtgaatgagagcaacgtgtacgtggtaacacagggcagaaagctgtatggtatgccaacagactttgggttctgtgtaaagccaaacaaactcaggaatggacataaaggtctccgaatcttttgtagcgaagacgaacagagccgaacatgctggctggccgctttccgccttttcaagtacggcgtacaactctacaaaaactatcagcaagcgcaatccaggcatttacatccaagttgcttaggctccccaccattaagatcggctagcgataatacgctcgtggcaatggatttttcaggtcacgccggccgggtgatcgagaacccaagagaggccttaagtgtcgcactcgaagaagctcaggcctggaggaaaaagacaaatcatcgcctgagcctgcccatgcccgcatccgggacttccctcagcgcagcatgctcctggagcggccgcgtgtctggcaccccccgcgctctcagttcactgtgtgccacctgtaggaaatag

SEQ ID NO: 317458 - DNA, 1344 bp, Artificial Sequence
  derived and/or modified sequence
atggaactggatctcagtccacctcatctctcatcatcaccggaggatctctgcccagcccctgggacgccaccaggcactccacgaccccctgacacgcccctcccagaggaggtgaaacggagccaaccattgctgataccaacgacgggcagaaaattgagagaagaggaacgaagggccaccagcctacctagtatccccaatccatttccagagttgtgttctcccccaagccaaagccccattcttggcggtccatcatcagcacgtgggttgctgccccgagacgcgtcacggccacatgtggtcaaagtgtactctgaggacggcgcatgccgcagtgtggaggtggcagccggtgcaacagccagacatgtgtgtgagatgctggtccagcgagcccatgcgctcagcgatgagacctggggtctcgtcgagtgccacccacatctggccctggagcgcggacttgaggaccacgaatccgttgttgaggtgcaggctgcctggcctgtaggaggcgactccagattcgttttcaggaagaattttgctaagtatgagttgtttaagtcaagcccacattccctgtttcctgagaagatggtgagtagttgcctggatgcacacactggaataagtcacgaagacctcattcagaactttctaaatgcaggcagtttcccggagatacagggtttcttacagctccgcggttctgggcgaaagctttggaagcgattcttttgcttccttcgtagaagtgggctctattacagtaccaagggtacaagcaaggatccgagacatctgcaatacgtcgccgacgttaacgagtctaatgtgtatgtggtgacccaagggcgaaagctgtatggtatgccaaccgattttgggttttgcgtgaaacccaataaactcagaaatggccacaaggggcttcgaatattttgttctgaagatgaacagtctcgcacttgttggttggcagccttccggctgtttaaatatggagttcagctttataagaactatcaacaggctcagagcagacatctacatccaagttgcttaggaagtccacccctgcgatccgccagtgacaatacgctcgttgcaatggatttttcagggcacgcgggaagagtaattgagaatcctcgagaggcgctcagcgtcgccctggaggaggcacaggcttggaggaagaagaccaaccatcgcctatccttgccaatgcccgcaagcggcacctcactatccgctgcatgttcctggagcggaagagtctctggaaccccccgtgctttgagttcgctttgtgctacctgccgaaagtag

SEQ ID NO: 317459 - DNA, 1344 bp, Artificial Sequence
  derived and/or modified sequence
atggaactggatctgtcacccccacatctgtccagcagtcctgaggacctgtgtcctgcccctggaaccccgccaggtactcctcggcctccggacaccccactgcccgaagaagtcaagaggagccaaccgctcttgatcccaactactggtcggaagctgagagaggaagagcggagagcaacatctctgccgtccataccaaaccccttccccgagctgtgttccccacccagtcagagccccatactggggggtcccagtagcgcacgagggctcttaccccgagacgccagccgccctcatgtagtgaaggtgtattctgaggatggggcttgccgcagtgtggaggtcgctgcaggtgcaactgccagacatgtgtgcgagatgcttgtacagcgggcacatgctctatcagacgaaacctggggccttgttgagtgccatcctcatttggcattagagcgcggattagaagatcatgagagtgtggtcgaagtgcaggccgcatggcccgttgggggagacagtaggttcgtgttcagaaaaaacttcgctaagtatgagctgtttaaatctagcccccattcactgttccccgagaagatggttagctcctgtctcgacgcacacaccggcatctcacacgaggacctaattcagaactttcttaacgcaggctccttccccgagatccaaggattcctgcagttgagaggtagcggcaggaaactatggaagcgcttcttctgtttcctgagaaggagcggcctgtattatagtactaaagggacctctaaggacccccgtcacctgcaatacgtggccgacgtcaacgagtctaacgtctacgtggtcacacagggccgtaaattatatggtatgccaaccgacttcgggttttgtgtaaagccgaacaagttacggaatggccacaaggggttacgcatcttctgcagtgaggatgaacaaagcagaacctgctggctggccgcttttaggctctttaaatatggcgtgcagttatataagaactaccagcaggcacagtctcgccatctgcacccgtcctgcctgggctctccaccactacgatctgcctcagacaatactctggtggctatggacttttccggacacgccggacgagtcatagaaaaccctcgtgaagccctaagcgttgccctcgaagaagcccaggcatggcgtaaaaagactaatcatcggcttagcctgccaatgcccgcaagtggcacttctctctcagctgcatgtagctggagcgggagggtctccggcactccaagagccctgtcatccctgtgcgccacatgccgcaagtag

SEQ ID NO: 317460 - DNA, 1344 bp, Artificial Sequence
  derived and/or modified sequence
atggagctggacctgagccccccccacctgagcagcagccccgaggacctgtgccccgcccccggcaccccccccggcacccccagaccccccgacacccccctgcccgaggaggtgaagagaagccagcccctgctgatccccaccaccggcagaaagctgagagaggaggagagaagagccaccagcctgcccagcatccccaaccccttccccgagctgtgcagcccccccagccagagccccatcctgggcggccccagcagcgccagaggcctgctgcccagagacgccagcagaccccacgtggtgaaggtgtacagcgaggacggcgcctgcagaagcgtggaggtggccgccggcgccaccgccagacacgtgtgcgagatgctggtgcagagagcccacgccctgagcgacgagacctggggcctggtggagtgccacccccacctggccctggagagaggcctggaggaccacgagagcgtggtggaggtgcaggccgcctggcccgtgggcggcgacagcagattcgtgttcagaaagaacttcgccaagtacgagctgttcaagagcagcccccacagcctgttccccgagaagatggtgagcagctgcctggacgcccacaccggcatcagccacgaggacctgatccagaacttcctgaacgccggcagcttccccgagatccagggcttcctgcagctgagaggcagcggcagaaagctgtggaagagattcttctgcttcctgagaagaagcggcctgtactacagcaccaagggcaccagcaaggaccccagacacctgcagtacgtggccgacgtgaacgagagcaacgtgtacgtggtgacccagggcagaaagctgtacggcatgcccaccgacttcggcttctgcgtgaagcccaacaagctgagaaacggccacaagggcctgagaatcttctgcagcgaggacgagcagagcagaacctgctggctggccgccttcagactgttcaagtacggcgtgcagctgtacaagaactaccagcaggcccagagcagacacctgcaccccagctgcctgggcagcccccccctgagaagcgccagcgacaacaccctggtggccatggacttcagcggccacgccggcagagtgatcgagaaccccagagaggccctgagcgtggccctggaggaggcccaggcctggagaaagaagaccaaccacagactgagcctgcccatgcccgccagcggcaccagcctgagcgccgcctgcagctggagcggcagagtgagcggcacccccagagccctgagcagcctgtgcgccacctgcagaaagtag

SEQ ID NO: 317461 - DNA, 86 bp, Artificial Sequence
  derived and/or modified sequence
taagtgaattgaatagaatcaatctgaatgtaatgaaatggaatggaacggaatggaatggaatggaatggaatggaatggaatgg

SEQ ID NO: 317462 - protein, 42 aa, Artificial Sequence
  derived and/or modified sequence
MSGLHLVKQGRDRKKIDSQRDFTVASPAEFVTRFGGNKVIEK

SEQ ID NO: 317463 - protein, 2346 aa, Artificial Sequence
  derived and/or modified sequence
MDEPSPLAQPLELNQHSRFIIGSVSEDNSEDEISNLVKLDLLEEKEGSLSPASVGSDTLSDLGISSLQDGLALHIRSSMSGLHLVKQGRDRKKIDSQRDFTVASPAEFVTRFGGNKVIEKVLIANNGIAAVKCMRSIRRWSYEMFRNERAIRFVVMVTPEDLKANAEYIKMADHYVPVPGGPNNNNYANVELILDIAKRIPVQAVWAGWGHASENPKLPELLLKNGIAFMGPPSQAMWALGDKIASSIVAQTAGIPTLPWSGSGLRVDWQENDFSKRILNVPQELYEKGYVKDVDDGLQAAEEVGYPVMIKASEGGGGKGIRKVNNADDFPNLFRQVQAEVPGSPIFVMRLAKQSRHLEVQILADQYGNAISLFGRDCSVQRRHQKIIEEAPATIATPAVFEHMEQCAVKLAKMVGYVSAGTVEYLYSQDGSFYFLELNPRLQVEHPCTEMVADVNLPAAQLQIAMGIPLYRIKDIRMMYGVSPWGDSPIDFEDSAHVPCPRGHVIAARITSENPDEGFKPSSGTVQELNFRSNKNVWGYFSVAAAGGLHEFADSQFGHCFSWGENREEAISNMVVALKELSIRGDFRTTVEYLIKLLETESFQMNRIDTGWLDRLIAEKVQAERPDTMLGVVCGALHVADVSLRNSVSNFLHSLERGQVLPAHTLLNTVDVELIYEGVKYVLKVTRQSPNSYVVIMNGSCVEVDVHRLSDGGLLLSYDGSSYTTYMKEEVDRYRITIGNKTCVFEKENDPSVMRSPSAGKLIQYIVEDGGHVFAGQCYAEIEVMKMVMTLTAVESGCIHYVKRPGAALDPGCVLAKMQLDNPSKVQQAELHTGSLPRIQSTALRGEKLHRVFHYVLDNLVNVMNGYCLPDPFFSSKVKDWVERLMKTLRDPSLPLLELQDIMTSVSGRIPPNVEKSIKKEMAQYASNITSVLCQFPSQQIANILDSHAATLNRKSEREVFFMNTQSIVQLVQRYRSGIRGHMKAVVMDLLRQYLRVETQFQNGHYDKCVFALREENKSDMNTVLNYIFSHAQVTKKNLLVTMLIDQLCGRDPTLTDELLNILTELTQLSKTTNAKVALRARQVLIASHLPSYELRHNQVESIFLSAIDMYGHQFCIENLQKLILSETSIFDVLPNFFYHSNQVVRMAALEVYVRRAYIAYELNSVQHRQLKDNTCVVEFQFMLPTSHPNRGNIPTLNRMSFSSNLNHYGMTHVASVSDVLLDNSFTPPCQRMGGMVSFRTFEDFVRIFDEVMGCFSDSPPQSPTFPEAGHTSLYDEDKVPRDEPIHILNVAIKTDCDIEDDRLAAMFREFTQQNKATLVDHGIRRLTFLVAQKDFRKQVNYEVDRRFHREFPKFFTFRARDKFEEDRIYRHLEPALAFQLELNRMRNFDLTAIPCANHKMHLYLGAAKVEVGTEVTDYRFFVRAIIRHSDLVTKEASFEYLQNEGERLLLEAMDELEVAFNNTNVRTDCNHIFLNFVPTVIMDPSKIEESVRSMVMRYGSRLWKLRVLQAELKINIRLTPTGKAIPIRLFLTNESGYYLDISLYKEVTDSRTAQIMFQAYGDKQGPLHGMLINTPYVTKDLLQSKRFQAQSLGTTYIYDIPEMFRQSLIKLWESMSTQAFLPSPPLPSDMLTYTELVLDDQGQLVHMNRLPGGNEIGMVAWKMTFKSPEYPEGRDIIVIGNDITYRIGSFGPQEDLLFLRASELARAEGIPRIYVSANSGARIGLAEEIRHMFHVAWVDPEDPYKGYRYLYLTPQDYKRVSALNSVHCEHVEDEGESRYKITDIIGKEEGIGPENLRGSGMIAGESSLAYNEIITISLVTCRAIGIGAYLVRLGQRTIQVENSHLILTGAGALNKVLGREVYTSNNQLGGIQIMHNNGVTHCTVCDDFEGVFTVLHWLSYMPKSVHSSVPLLNSKDPIDRIIEFVPTKTPYDPRWMLAGRPHPTQKGQWLSGFFDYGSFSEIMQPWAQTVVVGRARLGGIPVGVVAVETRTVELSIPADPANLDSEAKIIQQAGQVWFPDSAFKTYQAIKDFNREGLPLMVFANWRGFSGGMKDMYDQVLKFGAYIVDGLRECCQPVLVYIPPQAELRGGSWVVIDSSINPRHMEMYADRESRGSVLEPEGTVEIKFRRKDLVKTMRRVDPVYIHLAERLGTPELSTAERKELENKLKEREEFLIPIYHQVAVQFADLHDTPGRMQEKGVISDILDWKTSRTFFYWRLRRLLLEDLVKKKIHNANPELTDGQIQAMLRRWFVEVEGTVKAYVWDNNKDLAEWLEKQLTEEDGVHSVIEENIKCISRDYVLKQIRSLVQANPEVAMDSIIHMTQHISPTQRAEVIRILSTMDSPST

SEQ ID NO: 317464 - protein, 1045 aa, Artificial Sequence
  derived and/or modified sequence
MGCFSDSPPQSPTFPEAGHTSLYDEDKVPRDEPIHILNVAIKTDCDIEDDRLAAMFREFTQQNKATLVDHGIRRLTFLVAQKDFRKQVNYEVDRRFHREFPKFFTFRARDKFEEDRIYRHLEPALAFQLELNRMRNFDLTAIPCANHKMHLYLGAAKVEVGTEVTDYRFFVRAIIRHSDLVTKEASFEYLQNEGERLLLEAMDELEVAFNNTNVRTDCNHIFLNFVPTVIMDPSKIEESVRSMVMRYGSRLWKLRVLQAELKINIRLTPTGKAIPIRLFLTNESGYYLDISLYKEVTDSRTAQIMFQAYGDKQGPLHGMLINTPYVTKDLLQSKRFQAQSLGTTYIYDIPEMFRQIGMVAWKMTFKSPEYPEGRDIIVIGNDITYRIGSFGPQEDLLFLRASELARAEGIPRIYVSANSGARIGLAEEIRHMFHVAWVDPEDPYKGYRYLYLTPQDYKRVSALNSVHCEHVEDEGESRYKITDIIGKEEGIGPENLRGSGMIAGESSLAYNEIITISLVTCRAIGIGAYLVRLGQRTIQVENSHLILTGAGALNKVLGREVYTSNNQLGGIQIMHNNGVTHCTVCDDFEGVFTVLHWLSYMPKSVHSSVPLLNSKDPIDRIIEFVPTKTPYDPRWMLAGRPHPTQKGQWLSGFFDYGSFSEIMQPWAQTVVVGRARLGGIPVGVVAVETRTVELSIPADPANLDSEAKIIQQAGQVWFPDSAFKTYQAIKDFNREGLPLMVFANWRGFSGGMKDMYDQVLKFGAYIVDGLRECCQPVLVYIPPQAELRGGSWVVIDSSINPRHMEMYADRESRGSVLEPEGTVEIKFRRKDLVKTMRRVDPVYIHLAERLGTPELSTAERKELENKLKEREEFLIPIYHQVAVQFADLHDTPGRMQEKGVISDILDWKTSRTFFYWRLRRLLLEDLVKKKIHNANPELTDGQIQAMLRRWFVEVEGTVKAYVWDNNKDLAEWLEKQLTEEDGVHSVIEENIKCISRDYVLKQIRSLVQANPEVAMDSIIHMTQHISPTQRAEVIRILSTMDSPST

SEQ ID NO: 317465 - protein, 120 aa, Artificial Sequence
  derived and/or modified sequence
MDEPSPLAQPLELNQHSRFIIGSVSEDNSEDEISNLVKLDLLEEKEGSLSPASVGSDTLSDLGISSLQDGLALHIRSSMSGLHLVKQGRDRKKIDSQRDFTVASPAEFVTRFGGNKVIEK

SEQ ID NO: 317466 - DNA, 7041 bp, Artificial Sequence
  derived and/or modified sequence
atggacgaaccctcaccattagcccagcctctcgagttgaaccaacactctcgcttcataattggatcggttagcgaggacaacagtgaagatgagatttccaaccttgtcaaattggatctgctggaggaaaaagagggatccctttccccagcatcggtgggctcagatacactgagcgacctggggataagtagcctgcaggacgggctcgcactgcacattagatccagcatgtccgggctgcatttggtgaaacaaggcagagaccggaaaaaaatcgactcccagcgggactttaccgtcgctagtccggcagagtttgtgacacgcttcggcgggaataaggtgatagaaaaggtgctcatagccaacaacggaattgcagccgtcaaatgcatgcggagtattcggcgttggagttacgagatgtttcgaaatgagcgggcaattcggttcgtggtcatggtcactcctgaagatctgaaagcaaatgctgaatacatcaagatggcagaccattatgtgcctgtgccgggtgggcctaacaacaacaactatgccaatgttgagctaattctggacatagccaagagaataccagttcaggccgtttgggctggttggggacacgcatccgagaaccccaagctccctgagcttttgctaaagaacggtattgcatttatgggccccccgtcacaagctatgtgggcattaggagataaaatcgcctccagcatagtggctcagacagccggcatccccaccctgccgtggtctggctctggccttcgggtggactggcaagagaacgacttttcgaagcgcattttgaatgtccctcaggaactgtacgagaagggatatgttaaggatgtagatgatggacttcaagcggctgaagaagtgggttatcccgtgatgataaaagccagcgaggggggtgggggcaaggggattcggaaggtgaacaacgccgacgatttcccaaatctgttccgtcaggtccaggctgaggtcccaggatcccccatctttgtaatgagactggctaagcagtctagacatttagaagttcagatcctcgccgaccaatacggcaatgcaatttcactgtttggtcgtgactgttcagtccagagacgccatcagaagattatcgaggaagcgcccgctaccatcgctacccctgccgtgtttgagcatatggagcagtgcgctgttaagttggccaaaatggtcggctatgttagcgccggaacggtggaatacctgtacagccaggatggatcattctattttctcgaactgaacccccgactgcaggtggagcatccctgtacagagatggttgctgatgtgaacctcccagcggctcagctgcaaatagcgatgggcattcccctgtatcgtattaaagatatcagaatgatgtatggggtctctccatggggtgatagcccaatcgattttgaggatagcgcccatgtgccatgtcctcgtggccacgtcattgctgcaaggattacctcagaaaatccagatgagggtttcaagccgtcctcaggcaccgttcaagagctgaattttcggtctaacaagaacgtatgggggtatttttcagtcgcagccgcgggcggactgcatgaattcgccgacagccagtttggacattgcttctcctggggtgaaaatagagaagaggcgattagcaatatggtagtggcattaaaagaactgtcgattagaggggacttccgcactacagtggaatatctcattaagctgctggaaactgagtcatttcagatgaataggattgataccgggtggcttgaccgcctgattgcagagaaggttcaggccgagagacccgatactatgctgggcgtggtgtgcggagcactgcacgttgcggatgtgagtttgcgtaatagtgtcagcaattttcttcattccttggagcgggggcaagtccttccagcccatacccttctgaacaccgttgatgttgagctgatctatgaaggtgtgaagtatgttctcaaagttacccgccagagcccaaattcctacgtcgtcataatgaatgggagttgcgtggaagtggacgtgcatcggctgtcggacggcgggttgcttctgtcatacgatggttctagctacacaacctacatgaaggaggaggtggataggtataggattactatcggaaataaaacatgcgtgttcgagaaggagaatgaccccagcgtgatgcgctctccatctgccgggaaacttatacaatatatcgtggaggacggcgggcacgtgttcgctggccagtgctacgccgaaatagaggtgatgaaaatggttatgactttgacagctgttgagagcggctgtatccactatgtgaaacggcccggcgcagccctcgatccgggctgtgtcctggctaaaatgcaactcgacaaccccagtaaagtgcagcaggcagaactgcacacgggctccctcccccgaatccagtctactgccctgcgaggagaaaagctgcatagagtctttcattatgtgctggataatctggttaatgttatgaacggttactgcttgcccgatccatttttcagttcaaaagtcaaggattgggtggagcgcctgatgaagacattgagggatccatccctccctttgttggaactacaagacataatgacttccgtgtcaggtaggatcccaccgaatgtcgaaaagagcatcaaaaaagagatggcacagtacgcttctaatatcacttctgtgctatgtcaatttcccagccagcagattgccaatatactggactcgcacgctgcgactctcaaccgcaagtccgagcgggaagtattcttcatgaacactcagagtatcgtgcagctggtccagcggtaccggagtggcatcagaggtcacatgaaggccgtcgtgatggatttactaagacagtatcttcgagttgagactcagttccaaaatggtcattacgacaagtgcgtgtttgccctgagggaggaaaataagagcgacatgaacactgtgctgaattacatcttcagccacgctcaggttacaaaaaaaaatttactggttacaatgctaattgaccagctgtgtgggagagatcccactttaacagatgagctgctgaatattctcactgaactgacccagctgagtaagacgacaaatgctaaagtagcgctgcgtgcacgacaagtccttattgctagtcacttgccttcttacgaattgaggcacaatcaagtcgagagcatttttctttcagcaatagatatgtacggtcatcagttctgcatagaaaaccttcagaaattaattctgagcgagacctcgatttttgacgtgttgccgaactttttttaccactcgaatcaggtcgtgcgaatggccgccctcgaggtgtatgtgcggcgagcctacattgcatacgaattaaattccgttcagcacagacagcttaaggataatacttgcgtcgtggagtttcagtttatgttacccacaagccatcccaatcgggggaatattccaaccttaaatcgcatgtcctttagctccaatctcaatcattacggcatgacacatgtggcatcagtgtctgatgtgctgcttgacaattcgttcacacccccatgtcagaggatgggcgggatggtctccttcaggacattcgaagactttgttcgcatatttgacgaggttatgggctgttttagtgactctcccccgcaatcccccaccttccccgaggcaggtcatacgtcactttacgacgaggacaaagtcccacgcgacgagcccatccatatactgaatgtggccatcaagacagattgtgatattgaagacgacaggctcgcagccatgtttcgggaattcacccagcagaataaggctaccctcgtggaccatggaattcgcaggctcacatttctcgtcgcccaaaaagatttcagaaaacaggtaaactatgaagtggatcgacgatttcacagagagttccctaaattcttcacgttcagggctcgagataagtttgaagaagacagaatatatcgccacctggagcccgcgcttgcctttcagctggagctgaatcgcatgcggaacttcgatttaaccgccataccatgcgccaaccataagatgcacctatacctgggcgccgcgaaggtggaagttggcaccgaggttacagactacagattttttgttcgagccattattagacattctgaccttgtgactaaggaagcgagctttgagtacctgcagaatgaaggggagagactgttactagaagccatggatgaacttgaagttgcttttaacaacactaacgtgagaacagactgtaatcacatttttctgaacttcgtccctaccgtcatcatggacccttccaagattgaagaaagtgtccgaagtatggtgatgcgctacgggagccgtctgtggaaacttagggttctgcaggccgaattaaaaataaacatcaggttgactcctaccggaaaggccatccctataagactctttctaactaacgagtcggggtactacctcgatatttcactttataaggaggtaaccgatagccgaacagctcagattatgtttcaagcctacggtgacaagcaggggcccctgcacggaatgttgataaacactccttacgtcactaaggatctgttgcaatctaagcggttccaggcccaatcccttggaaccacttacatttacgatatcccagagatgtttaggcagtccttgatcaaactctgggagagtatgagcactcaggcatttcttccttctcccccacttcccagcgatatgcttacctacactgagctcgtgcttgacgaccagggacagctcgtacatatgaatagactgcccggggggaatgaaatcggaatggtagcttggaagatgaccttcaagtctcccgaatacccagaggggagagacataattgttatcgggaacgacatcacatataggattggatctttcggcccacaagaagatctcctatttttacgggccagcgagttggctcgagctgaaggaattccacgcatatacgtgtctgctaattctggagctcgcattggtcttgcagaggagatccgtcacatgtttcacgtagcatgggtggatccggaggatccttacaaagggtaccgttacctctatctcacaccgcaggactacaaaagggtgtccgctttgaactcagtgcactgcgagcacgtcgaagatgaaggagaatccaggtacaagatcactgatataatcggtaaggaagagggtatcggccccgaaaaccttcgaggatccgggatgattgcgggagagtcaagcttggcttataatgagatcatcactatttctctcgtcacctgccgcgcgatcggaatcggcgcctatttggtgcgattggggcagagaacaatccaggtcgaaaattctcacttgatcctgactggtgcaggcgctctgaataaggttctaggccgcgaggtgtacactagcaacaatcagttgggaggtatccagattatgcataataatggtgtgacccactgcaccgtctgtgatgactttgagggcgtatttacggtactgcactggctgagttatatgccaaagagtgtccattccagcgtgcctctgctgaattctaaggacccgatcgatcgaataatcgaattcgtccccactaagaccccgtatgaccccaggtggatgctggcaggcaggccacatccaacacaaaaaggccaatggctatcaggatttttcgactacggctcatttagtgaaataatgcagccctgggcacagactgtggtggtggggagggctcggctgggcgggatccctgtgggtgtggtggccgtggagacccggaccgtggagctcagtatccccgccgaccccgctaacctggattcagaggctaaaatcatacagcaagcgggacaagtttggttccctgacagcgccttcaaaacctaccaggccataaaagactttaatcgtgagggactgccactcatggtgtttgctaattggcgcgggttttcagggggtatgaaggatatgtatgatcaagttcttaagtttggtgcttacatagtggatggcctacgagagtgctgccagccggtgctggtgtatatccccccacaggccgagctgcgaggggggtcctgggttgtcatcgatagctctattaacccaaggcacatggagatgtacgccgacagggagtcccgagggtctgttctcgagcctgaggggactgtcgagatcaaatttcgccggaaagatctggtgaagactatgaggagggtggatccggtgtatatacacctcgccgagcggctgggtacacctgaactgagtacagcggaacgcaaagagctagaaaataagctgaaggagagggaagaattcctcatccccatctaccaccaggtcgctgtccagttcgcagaccttcatgataccccaggtagaatgcaggaaaagggggtgatatcggatatcctagactggaaaacatctagaaccttcttctattggcgattacgacgtctactattggaagatttggtcaagaagaagatccataatgccaaccccgagttaacggacggacagattcaggcaatgctgcgacgttggttcgtggaagttgagggtacggtaaaagcgtacgtgtgggataataataaggatcttgccgagtggctggagaaacagctaaccgaggaagacggcgtccatagcgttatcgaggagaatattaagtgtatttccagagattacgtactgaagcagatccgctccctggtgcaggctaatccagaggtagctatggattctattatccacatgacgcagcatatcagccccacacaaagggcagaggtaatcaggattttaagtaccatggattctccatctacctag

SEQ ID NO: 317467 - DNA, 7041 bp, Artificial Sequence
  derived and/or modified sequence
atggatgagcccagccccctggcccagcccctggagctgaaccagcacagccgcttcatcatcggctctgtgtctgaggacaacagtgaagatgagatcagcaacctggtgaagctggacctgctggaggagaaggagggcagcctgagccctgcctctgtgggcagtgacaccctgagtgacctgggcatcagcagcctgcaggacggcctggccctgcacatccgcagctccatgagcggcctgcacctggtgaagcagggccgggacaggaagaagattgacagccagagggacttcaccgtggccagccctgctgagtttgtgaccaggtttggaggcaacaaggtgattgagaaggtgctgattgccaacaacggcattgctgctgtgaagtgcatgaggagcatccgccgctggagctatgagatgttcagaaatgaaagagccatccgctttgtggtgatggtgaccccagaggacctgaaggccaatgctgagtacatcaagatggctgaccactacgtgcctgtgcctgggggccccaacaacaacaactatgccaacgtggagctgatcctggacatcgccaagagaattcctgtgcaggccgtgtgggccggctggggccacgccagcgagaaccccaagctgcctgagctgctgctgaagaatggaattgccttcatgggcccccccagccaggccatgtgggccctgggggacaagatcgccagcagcatcgtggcccagacagctggcatccccaccctgccctggagcggcagcggcctgcgggtggactggcaggagaatgacttcagcaagaggatcctgaatgtgccccaggagctgtatgagaagggctacgtgaaggatgtggatgatggcctgcaggccgctgaggaggtgggctaccctgtgatgatcaaggccagcgagggcggcggcggcaagggcatcaggaaggtgaacaatgctgatgacttccccaacctcttccggcaggtgcaggccgaggtgcccggcagccccatctttgtgatgaggctggccaagcagagccgccacctggaggtgcagatcctggccgaccagtatggaaatgccatcagcctgtttggccgggactgcagcgtgcagaggaggcaccagaagatcatcgaggaggccccagccaccatcgccaccccagctgtgtttgagcacatggagcagtgtgctgtgaagctggccaagatggtgggctacgtgtctgctggcaccgtggagtacctgtacagccaggacggcagcttctacttcctggagctgaacccccggctgcaggtggagcacccctgcacagagatggtggctgatgtgaacctgcctgctgcccagctgcagatcgccatgggcatccccctgtaccgcatcaaggacatccgcatgatgtatggagtgagcccctggggagacagccccatcgactttgaagattctgcccacgtgccctgcccccggggccacgtgattgctgcccgcatcaccagtgaaaatccagatgagggcttcaagcccagcagcggcaccgtgcaggagctgaacttccgcagcaacaagaatgtgtggggctacttctctgtggccgccgccggcggcctgcacgagtttgctgacagccagtttggccactgcttctcctggggagaaaatcgggaggaggccatcagcaacatggtggtggccctgaaggagctgagcatccggggggacttccgcaccaccgtggagtacctgatcaagctgctggagacagagagcttccagatgaacagaattgacaccggctggctggaccggctgattgctgagaaggtgcaggccgagaggccagacaccatgctgggcgtggtgtgtggggccctgcacgtggctgatgtgtccctgagaaattctgtgagcaacttcctgcacagcctggagcggggccaggtgctgcctgcccacaccctgctgaacacagtggatgtggagctgatctatgagggcgtgaagtatgtgctgaaggtgacccggcagagccccaacagctatgtggtgatcatgaatggcagctgtgtggaggtggatgtgcaccggctgagtgatggcggcctgctgctgtcctatgatggcagcagctacaccacctacatgaaggaggaggtggaccgctaccgcatcaccatcggcaacaagacctgtgtgtttgagaaggaaaatgaccccagcgtgatgaggagccccagcgctgggaagctgatccagtacatcgtggaggatggcggccacgtgtttgctggccagtgctacgccgagattgaggtgatgaagatggtgatgaccctgacagctgtggagagcggctgcatccactacgtgaagaggcctggagctgccctggaccccggctgtgtgctggccaagatgcagctggacaaccccagcaaggtgcagcaggccgagctgcacacaggcagcctgccccgcatccagagcacagccctgcggggggagaagctgcacagggtcttccactacgtgctggacaacctggtgaatgtgatgaatggctactgcctgcctgaccccttcttcagcagcaaggtgaaggactgggtggagcggctgatgaagaccctgcgggaccccagcctgcccctgctggagctgcaggacatcatgacctctgtgtctggccgcatccccccaaatgtggagaagagcatcaagaaggagatggcccagtatgccagcaacatcacctctgtgctgtgccagttccccagccagcagatcgccaacatcctggacagccatgctgccaccctgaacaggaagtctgagcgggaggtgttcttcatgaacacccagagcatcgtgcagctggtgcagcgctacagaagtggcatccggggccacatgaaggctgtggtgatggacctgctgcggcagtacctgcgggtggagacccagttccagaatggccactatgacaagtgtgtgtttgccctgcgggaggagaacaagagtgacatgaacacagtgctgaactacatcttcagccacgcccaggtgaccaagaagaacctgctggtgaccatgctgattgaccagctgtgtggccgggaccccaccctgacagatgagctgctgaacatcctgacagagctgacccagctgagcaagaccaccaatgccaaggtggccctgcgggcccggcaggtgctgattgccagccacctgcccagctatgagctgcggcacaaccaggtggagagcatcttcctgagcgccatcgacatgtatggccaccagttctgcatcgagaacctgcagaagctgatcctgtctgagaccagcatctttgatgtgctgcccaacttcttctaccacagcaaccaggtggtgaggatggccgccctggaggtgtatgtgagaagagcctacatcgcctatgagctgaacagcgtgcagcaccggcagctgaaggacaacacctgtgtggtggagttccagttcatgctgcccaccagccaccccaacagaggcaacatccccaccctgaacaggatgtccttcagcagcaacctgaaccactacggcatgacccacgtggcctctgtgtctgatgtgctgctggacaacagcttcaccccaccctgccagaggatgggcggcatggtgtccttccgcacctttgaagattttgtgcgcatctttgatgaggtgatgggctgcttcagtgacagccccccccagagccccaccttccctgaggccggccacaccagcctgtatgatgaggacaaggtgcccagagatgagcccatccacatcctgaatgtggccatcaagacagactgtgacattgaagatgaccggctggccgccatgttccgggagttcacccagcagaacaaggccaccctggtggaccacggcatccggcggctgaccttcctggtggcccagaaggacttcaggaagcaggtgaactatgaggtggaccggcgcttccaccgggagttccccaagttcttcaccttccgggcccgggacaagtttgaggaggaccgcatctaccgccacctggagcccgccctggccttccagctggagctgaacaggatgaggaactttgacctgacagccatcccctgtgccaaccacaagatgcacctgtacctgggcgccgccaaggtggaggtgggcacagaggtgacagactaccgcttctttgtgcgggccatcatccgccacagcgacctggtgaccaaggaggccagctttgagtacctgcagaatgaaggagagcggctgctgctggaggccatggatgagctggaggtggccttcaacaacaccaacgtgaggacagactgcaaccacatcttcctgaactttgtgcccaccgtcatcatggaccccagcaagattgaggagagcgtgcgctccatggtgatgagatatggcagccggctgtggaagctgcgggtgctgcaggccgagctgaagatcaacatccggctgacccccaccgggaaggccatccccatccgcctcttcctgaccaatgaaagtggctactacctggacatcagcctgtacaaggaggtgacagacagcaggacagcccagatcatgttccaggcctatggagacaagcagggccccctgcacggcatgctgatcaacaccccctacgtgaccaaggacctgctgcagagcaagcgcttccaggcccagagcctgggcaccacctacatctatgacatccctgagatgttccggcagagcctcatcaagctgtgggagagcatgagcacccaggccttcctgcccagcccccccctgcccagcgacatgctgacctacacagagctggtgctggatgaccagggccagctggtgcacatgaaccggctgcccggcggcaatgaaattggcatggtggcctggaagatgaccttcaagagccctgagtacccagagggccgggacatcatcgtgattggaaatgacatcacctaccgcatcggcagctttggcccccaggaggacctgctcttcctgcgggccagcgagctggcccgggcagagggcatcccccgcatctacgtgtctgccaacagcggggcccgcatcggcctggccgaggagatccgccacatgtttcatgtggcctgggtggaccctgaggacccctacaagggctaccgctacctgtacctgaccccccaggactacaagagggtgtctgccctgaacagcgtgcactgtgaacatgtggaggatgaaggagagagccgctacaagatcacagacatcatcggcaaggaggagggcatcggccctgagaacctgcggggcagcggcatgattgctggggagagcagcctggcctacaatgagatcatcaccatcagcctggtgacctgccgggccatcggcattggagcctacctggtgcggctgggccagaggaccatccaggtggagaacagccacctgatcctgactggagctggggccctgaacaaggtgctgggccgggaggtgtacaccagcaacaaccagctgggcggcatccagatcatgcacaacaacggggtgacccactgcaccgtgtgtgatgactttgaaggagtcttcaccgtgctgcactggctgagctacatgcccaagtctgtgcacagctctgtgcccctgctgaacagcaaggaccccatcgaccgcatcattgaatttgtgcccaccaagaccccctatgacccccgctggatgctggccggccggccccaccccacccagaagggccagtggctgagcggcttctttgattatggcagcttcagcgagatcatgcagccctgggcccagacagtggtggtgggccgggcccggctgggcggcatccctgtgggcgtggtggccgtggagaccaggacagtggagctgagcatcccagctgaccctgccaacctggacagcgaggccaagatcatccagcaggccggccaggtgtggttcccagacagcgccttcaagacctaccaggccatcaaggacttcaaccgggagggcctgcccctgatggtgtttgccaactggaggggcttcagcggcggcatgaaggacatgtatgaccaggtgctgaagtttggagcctacatcgtggatggcctgcgggagtgctgccagcctgtgctggtgtacatccccccccaggccgagctgcggggcggctcctgggtggtgattgacagcagcatcaaccccaggcacatggagatgtatgctgaccgggagagccggggctctgtgctggagcctgagggcaccgtggagatcaagttccggaggaaggacctggtgaagaccatgagaagagtggaccctgtgtacatccacctggccgagcggctgggcaccccagagctgagcacagctgagaggaaggagctggagaacaagctgaaggagcgggaggagttcctgatccccatctaccaccaggtggccgtgcagtttgctgacctgcatgacaccccaggccgcatgcaggagaagggcgtcatcagtgacatcctggactggaagaccagcaggaccttcttctactggaggctgcggcggctgctgctggaggacctggtgaagaagaagatccacaatgccaaccctgagctgacagatggccagatccaggccatgctgcggcgctggtttgtggaggtggagggcaccgtgaaggcctacgtgtgggacaacaacaaggacctggccgagtggctggagaagcagctgacagaagaagatggagtgcacagcgtcatcgaggagaacatcaagtgcatcagccgggactatgtgctgaagcagatccgcagcctggtgcaggccaaccctgaggtggccatggacagcatcatccacatgacccagcacatcagccccacccagagagctgaggtgatccgcatcctgagcaccatggacagccccagcacctag

SEQ ID NO: 317468 - DNA, 7041 bp, Artificial Sequence
  derived and/or modified sequence
atggacgagcccagccccctggcccagcccctggagctgaaccagcactcgcgctttatcatcgggtccgttagcgaggataactccgaagacgagatttctaacctcgtgaaacttgatttgctcgaagagaaagagggatccctgagccctgctagtgtgggctctgataccttgtcagacttgggcatctccagcctccaggatgggttggccctgcacatccgcagtagtatgtccggactccacctggtcaaacagggcagagatcgaaaaaaaatcgattcccagcgggattttacagttgcttcgccagctgagtttgtcacgcgattcggtggcaataaggttatcgagaaggtgctgattgccaataacggcatcgccgccgtgaagtgcatgcggtccatccgacgatggtcatacgagatgttcaggaacgagcgggcaatccggtttgttgttatggtgacgcccgaagacctgaaagctaatgcagagtatatcaagatggctgaccactacgtcccagtgccaggtggacccaacaacaataactacgccaacgttgagctaattctagatattgcgaaacgcatccccgtacaggccgtgtgggctggttgggggcacgcaagcgagaaccccaagctccctgagctcttgctgaaaaatggaatcgcctttatgggtcctccttcacaagccatgtgggcgctgggcgacaagattgcatcttccatcgttgcgcagacggctggcatccctaccctcccatggtccgggagcggtctaagagtggattggcaagaaaatgatttcagcaaaagaattctgaacgtgccccaggaactgtacgagaagggctacgtcaaggatgttgatgacggtctccaggctgcagaggaggtgggctaccccgtgatgattaaagcaagtgagggcggcgggggcaagggtatcaggaaggtgaataacgcagatgactttcccaacctgttcaggcaggtacaggccgaggtgccggggagcccaatctttgtgatgagactggcaaagcagagcagacatctggaggttcaaattctggcggaccagtacggcaacgccatttcactctttggtcgcgactgctccgtgcaaagacggcaccagaaaatcattgaagaggcgcctgcaacaattgccacacccgctgtgttcgagcacatggaacagtgcgcggttaagctggccaagatggtcggctacgtgtctgctggaactgtggagtacctttacagtcaagacggctccttttacttcctggaactgaacccaaggctccaggtagagcacccttgtaccgaaatggtggctgacgttaatctgcctgcagcacaactgcaaatcgctatgggtatccctctataccgaattaaggacataaggatgatgtacggggtgtccccctggggtgattctcccatcgacttcgaggattctgcacacgttccctgccccagagggcacgtgattgccgcaaggattacatccgagaaccctgatgagggcttcaaaccatcgagtggcaccgtccaggagttaaatttccgtagcaataagaatgtctgggggtatttcagcgtcgctgccgcggggggtctacatgagttcgctgattcacagttcggacactgtttcagctggggagagaaccgggaagaagctatctcaaatatggtcgtagctctgaaggaactgagcatccgtggcgactttcgtaccacggtggagtaccttatcaagctgctggagaccgaaagtttccaaatgaaccgcattgatacaggctggcttgaccgcctgatcgcagaaaaagtgcaggccgaacgccccgacacaatgctgggggtagtgtgcggcgctctccatgtggcagacgtgtctcttagaaattcagtgtctaacttcctgcactccttggagcggggtcaagtgctcccggcccacaccctgttaaacaccgtcgatgtggaactgatctacgagggcgtgaaatacgtcctgaaagtcacaaggcaaagccccaacagttacgtagttataatgaacggttcctgcgtggaggtagacgtgcaccggctctctgatggtggtcttttactgagctatgatggatcatcctatactacgtacatgaaagaggaggtcgatcggtaccgtattacgatcggaaacaagacctgtgtattcgagaaggaaaatgatccttcggtcatgcgcagcccatccgccggaaagttaatacagtatatcgttgaggacggaggccacgtgttcgcaggccagtgttacgccgagatcgaagtaatgaagatggtgatgacactcaccgctgttgaatctggatgcattcactatgtaaagcgccccggagccgccctggatccagggtgtgtcttggccaaaatgcagctcgacaacccttccaaagtgcagcaagcggagctgcacacaggctctttgccccggatccagagcaccgccctaagaggcgagaaactgcaccgcgtattccactacgtactcgacaacctagtgaacgtcatgaacgggtactgcctgccagacccttttttttcctccaaggtgaaagactgggtagagaggctgatgaaaaccctgagagacccgtctctgcctcttctggagcttcaggacataatgacgtcagtttcagggcgcattcccccgaatgtggagaaatccattaagaaggagatggctcagtacgcgtcaaatatcaccagcgtgctgtgccaattcccatcccagcagatcgccaacatacttgacagccatgctgcaacactcaatcgtaagagtgaaagggaagttttctttatgaatacgcagtccatcgtccagttggtgcagcgttatcgtagcgggatcaggggacacatgaaagccgtggttatggatctgctgaggcagtacctgcgcgttgagacacaatttcaaaatgggcactatgacaagtgcgtgttcgcccttcgcgaggagaacaaaagcgatatgaataccgtgctgaattatatctttagccatgcccaggtaacaaagaagaacttgctggtaacaatgctgattgaccagctttgtggccgcgatcccacgctcaccgatgagctgctgaacatcctgaccgagctgactcagttatctaagacaaccaacgcgaaagtggcactccgggctcgacaggtcctgattgccagccacctgccttcctacgagttgcgccacaatcaagtggaatcaatcttcctgagtgcaatcgacatgtatgggcaccagttttgcatagagaacctgcaaaagttaatcttgagtgaaacgtcgatattcgacgtgctgccaaactttttttaccacagtaatcaggtggtgcgaatggcagccttagaagtttacgttcgtcgtgcctatattgcctacgagcttaatagcgtccaacacagacagctcaaggacaacacctgtgtggtcgaatttcagtttatgctgccgacctcccacccgaacagaggcaacattcctactctgaacaggatgtccttctcatcaaatctgaaccactacggcatgacacacgtcgcgtccgtgagtgatgtcctactcgataatagtttcacaccgccctgccagcgaatgggagggatggtgtcttttagaaccttcgaggactttgttcggatcttcgacgaggttatgggttgtttctccgatagccccccccagtcccctacgttcccggaagcaggacataccagcctctacgatgaagacaaagttccaagagatgagcctattcacatcctgaacgtcgcaattaagacggactgcgatatcgaagatgataggctcgcggctatgtttcgtgagtttacacaacagaacaaggccacactggttgatcacgggattcgaagactgacctttctagtagcacagaaagattttcgaaaacaggtgaactacgaggtcgaccgccgttttcaccgggaattccctaagttcttcacgtttcgcgccagagataaatttgaggaggaccggatttaccgtcatttagagcccgcactcgcatttcagttagagttgaacagaatgcgaaattttgatttaacagcaataccgtgcgccaatcacaaaatgcatttatacctcggagcagctaaagtagaagtggggaccgaggtcactgattatcgctttttcgtacgggctatcataagacacagcgacctggtcaccaaggaggccagcttcgagtacttgcaaaacgaaggggaacgcctgctcctggaggcaatggacgagcttgaggtcgcattcaataacaccaacgtccgcacagactgtaaccatattttcctcaatttcgtgcctactgttattatggatccatctaagattgaggagtctgtgcggtctatggtcatgaggtatggatcacgcctctggaagctaagggtcttgcaggctgaattgaaaattaacattagactgaccccaacagggaaagccatcccaattcggctgttcctaacaaacgaatcaggatattacctcgatatcagcttgtacaaggaagtcaccgatagccgtacagcgcagattatgttccaagcgtatggagataagcagggccctctgcatggcatgctgatcaatacaccctatgttaccaaagacctgcttcagtctaaaaggttccaggcacaatccttgggaaccacctacatctatgacattcccgagatgttccgtcagtctctcataaagttatgggagagcatgtctacacaggcattcctgcctagcccccctttgccatccgacatgctcacctatacagagctcgtgctcgacgaccaaggccagctggtgcacatgaaccgtctcccagggggcaatgaaattggtatggtcgcgtggaagatgaccttcaagtcaccggaatatcccgaggggcgggacattatcgtcatcgggaacgacatcacctatagaatcgggagtttcggaccccaggaagacctgttgtttttacgcgcttcagagttagctagggcagaggggatcccccggatctatgtgtccgccaatagtggtgcaagaatcggcctggctgaggagataagacatatgtttcacgttgcgtgggtggatcctgaagatccctataagggttatcgctacctatatctaaccccgcaggactataaaagagtgagtgctctcaactctgttcactgcgagcatgtggaagacgaaggcgaaagcaggtataagatcaccgatatcatcggcaaggaggaaggtattggccccgagaaccttagaggtagcgggatgatcgcgggggaatctagtttggcctataatgagatcatcacaatctcccttgttacttgtcgtgccatcggaattggagcgtatctggtccgtctcggccagaggaccattcaggttgagaactctcacctgattctgaccggtgctggagcccttaacaaggttctgggtagggaggtgtacacatcaaacaaccagctaggagggatacagatcatgcataataatggcgtgacacattgtacagtctgcgatgattttgagggcgtgtttaccgtgctgcattggctgtcttacatgccaaaatcagttcacagtagcgttcccctcctgaattccaaggaccccatcgataggatcattgagtttgtgcctacaaagactccttacgacccacggtggatgctcgcaggccgcccccacccaactcagaagggacagtggctgtcgggtttttttgattatgggagcttttccgagatcatgcagccatgggcccaaacagtggtggtggggcgggcacgcctgggaggaatacccgtcggggtcgtggctgtggagacaagaacggtcgaactcagtatacccgcagacccggcaaaccttgattccgaagctaaaattattcaacaggccgggcaggtctggttcccagacagcgcctttaaaacctaccaggccattaaggatttcaatagagaagggttgcctctgatggtgtttgccaattggcggggattttccggcggtatgaaggacatgtacgaccaggtgttgaaatttggggcatatatagtggacggtctgagagagtgttgtcaacccgtccttgtctatatcccgcctcaggctgagctacgtggcggatcttgggtcgttatcgacagctccatcaatcctaggcacatggaaatgtatgctgatcgcgagagcagaggctccgtattggagcccgaagggaccgtcgaaatcaagtttaggcgcaaagatctagtcaagactatgcgccgggtggacccggtctatattcatttggccgagagactgggcacgcctgagttatcaactgctgaacgtaaagaactggagaataagctgaaggaaagagaggaatttctgattccaatctatcaccaggtggcagttcagtttgctgatctgcacgatacacctgggaggatgcaggaaaaaggagtgatctcggatatcctggattggaagacttccagaacatttttctattggcgacttcgccgcctgcttctcgaagatctcgtgaagaaaaagatacataatgcgaatcccgagctaacagatggacaaatccaggcaatgctgagaaggtggttcgtggaggtggaggggacagtgaaggcttatgtgtgggacaacaacaaggacctggctgaatggctcgagaagcagctaaccgaagaagatggggtgcattcagttatcgaggagaacattaagtgtattagtagagattatgtcttaaagcagattcgcagtttagtacaggcaaacccagaggtagccatggattccatcatccatatgacccaacatatttctcctacccagcgggccgaagttattcgtatactgtcaacaatggactcgcctagcacgtag

SEQ ID NO: 317469 - DNA, 7040 bp, Artificial Sequence
  derived and/or modified sequence
atggatgaaccctccccacttgcccaaccgcttgaactcaaccagcacagtcgatttattataggaagcgtcagtgaggacaactcagaggacgagatcagcaacctggtcaagctggatttattagaggaaaaggaggggtcactttcgcctgcaagcgtgggtagcgatacattgtctgacctggggattagctctctccaggatgggcttgccctacatatccggagctccatgagtggcctccatctcgtgaaacagggcagagataggaagaagattgacagtcagcgagactttaccgtggcgtcacccgctgagttcgtgacccgatttgggggtaataaagttatcgagaaggtgctgattgcaaataatggcattgccgctgtcaagtgtatgcgctcaatccgtcgctggtcttacgaaatgttccggaatgaacgagcgatacgttttgtggttatggtgactcccgaggacctgaaagccaacgcagagtacattaagatggctgaccactacgtcccagtgccaggcggtcctaacaacaataattatgccaatgtggagctcattctggatattgctaagagaatcccggttcaggcggtatgggccggatgggggcacgctagcgagaatccgaaactccctgagctgttactaaaaaacggcatcgcctttatgggcccaccaagccaagctatgtgggccctgggagataagatcgccagctctatcgtcgcccagaccgccggaatccctaccctgccttggtctggaagcggcctgagggttgattggcaagagaacgacttttcaaagcggatactcaatgtaccacaggagctatacgaaaagggatacgtaaaggacgtcgacgacggactccaagccgctgaggaagtcggataccctgtgatgattaaagccagcgaaggaggcggtggcaaggggataaggaaggtgaataatgccgatgactttccaaatctctttaggcaggtgcaggctgaggttcctgggtccccaatctttgttatgagattagccaagcaatcgcggcaccttgaagtacaaatcctcgctgaccaatatggaaatgccataagcctgtttggaagagattgttctgtccaacggaggcatcagaagattatcgaggaggctcccgctacaatcgcgactccagcagtgttcgaacacatggagcagtgtgccgtgaagctagccaagatggtgggatatgtatcggccggtaccgtggagtatttgtattctcaggacggaagtttttactttctggagctgaatcctaggttgcaagtagagcatccatgcaccgagatggtggctgatgtgaacttgcccgcagcgcagttgcagatcgctatgggtatccccctttacagaatcaaagatattagaatgatgtatggtgttagtccgtggggagactcacctatcgattttgaagatagcgctcacgttccctgtcccaggggacacgttatcgccgcacgcattacctccgaaaatcctgacgaagggttcaagccttcttccggcaccgttcaggaactgaatttcagatctaacaagaatgtgtggggatacttcagcgttgcggcagccggtggcctacacgagtttgctgatagccagttcggccactgctttagttggggggagaatagggaggaggccatttcgaatatggtcgtggcactgaaggaactgagtatcagaggcgattttcggaccaccgtggaatacttgatcaaactgctcgagaccgagagtttccaaatgaatcgcatcgatacaggatggctagaccgtcttattgccgagaaagttcaagccgaacggcctgataccatgctgggagttgtgtgcggcgctctgcatgttgccgacgtaagtctgcgcaacagtgtctccaacttcctgcacagcctggagaggggacaggtactgcctgcacatacactgcttaataccgttgatgtcgagttgatctatgagggtgttaaatatgtcttgaaagtgactcggcaaagcccaaatagctatgttgtgataatgaacggctcatgcgtggaagtggacgttcacaggctttctgatggaggtttgctgctcagttacgacggctcctcatacacaacatacatgaaagaagaagtggatcgttataggatcacgatcggaaacaagacatgcgtctttgagaaagaaaatgatccaagcgtcatgagaagccccagtgccggaaagctcatccaatatattgtggaagatggagggcacgtgtttgcagggcagtgctatgcagagatagaggtcatgaaaatggtgatgaccctcaccgccgtagagtccggctgcattcactacgtgaaacgaccaggcgctgctctcgatccagggtgcgtgttagctaagatgcagcttgacaacccgagcaaggtgcagcaggccgagctgcacacggggtccctgcctaggatacaatctacagccctgcgtggcgagaaactccacagagtgtttcactatgtgttggataacctggtgaacgtgatgaacgggtactgtcttcccgatccattcttctcttctaaggtgaaagactgggtagagcggctcatgaagactctccgcgatccaagccttccactgcttgaactgcaggacatcatgacttccgtctccggccgaattcctcctaatgtggaaaagtctatcaagaaagagatggcacagtatgcaagtaatattacctctgtcctctgtcagttcccgtcccagcagattgcaaacatcctcgacagtcatgccgcaactctgaatcggaaaagcgaaagagaggttttttttatgaacacacagagtatagtccagctggtacagcgttaccgatctggaattcgtggacacatgaaagctgtggtgatggacttgctcagacagtatctgcgcgtcgagacccagttccagaatggccactacgacaaatgcgtcttcgccctgcgcgaggaaaacaagtcagacatgaacacagtattgaactacatcttctctcacgcacaggtcactaagaagaatctcctagtgacaatgttgatcgatcagctgtgtggaagagaccccaccctcactgacgagctcctgaatattctgaccgagctgacccagctctcaaagaccaccaacgctaaggtcgcccttcgcgcaagacaggtcttgatcgcttctcatctaccttcgtatgagctgagacataaccaggtggaatctatattcctgagtgcgatcgatatgtatggtcatcagttttgtatcgagaaccttcaaaaactgattctgagcgagacttcaatcttcgatgtgctgcctaacttcttttaccattccaaccaggtggtccggatggctgcactcgaggtgtacgtccgacgcgcttacattgcctacgaactcaacagcgttcagcaccgtcaacttaaggataatacttgcgttgttgaatttcagttcatgctgccaaccagtcaccctaatcgcggaaatataccaaccctgaatcgcatgagtttctcctcgaatttaaatcattatggtatgacacatgtggcctccgtttccgacgtccttcttgataactcctttaccccgccttgccagcgtatgggtggcatggtgtcctttagaaccttcgaagactttgtcaggatcttcgacgaagtcatgggctgtttttccgattcacccccacaaagtcctacttttcccgaagccggtcacacgtcattgtatgatgaggataaggtgccccgagatgaacccatccacatcctgaacgttgccatcaagaccgattgcgacatcgaggacgatcgactggctgcaatgtttcgcgagttcactcaacagaacaaggcaacactcgtcgaccatgggatcaggaggctgacctttcttgtggctcagaaagatttcagaaaacaggttaattatgaggtggaccgaagattccacagagagttccccaagttttttaccttccgcgctcgggataagtttgaagaggatcgaatatacagacacctggaacccgcacttgcctttcaattggagctgaatcgaatgagaaatttcgatcttacagccatcccgtgcgccaaccataagatgcacctctacctgggtgctgcaaaggtagaggtgggtacagaagtgacagattatcgctttttcgtgagagctatcataaggcactcagacctggtgactaaagaagcttccttcgagtatctgcagaatgagggagagcgattactgctggaggctatggatgagctggaggtcgccttcaacaacaccaatgtcagaaccgattgcaatcatatttttcttaattttgtaccaactgttatcatggacccttccaaaatagaagagtctgtgagatccatggtaatgagatacgggtccaggctgtggaaattgcgtgtgttgcaagctgagctcaaaatcaatattcggctgacaccaactggcaaggcgatccctatcagactttttttgaccaacgaatcagggtactacctcgacatctcattgtacaaggaggtaacagactctcgtactgcacagataatgttccaggcttacggtgataagcaaggaccactccacggcatgctgataaataccccctacgtgaccaaagacctgcttcagtcaaaacggttccaagcccagagtctaggaactacctacatctacgatattcctgaaatgtttagacagtctttgattaaactctgggaatctatgagcactcaggcgtttcttccctcccctccactgccctcagacatgttgacttacactgaactggtgctggatgatcagggtcagcttgtgcacatgaatcggcttcccggtggcaacgagatcggtatggtagcatggaagatgaccttcaagtctcccgaatacccggaaggaagggatatcatagtaatcggtaatgatatcacgtatagaatcggctcctttgggccacaagaggatctactgttcttgcgtgcttccgagctggcgagagcagaagggattccgaggatttatgtcagtgccaacagtggtgcccgaatcggcctcgccgaggagatcagacacatgttccacgtcgcatgggtggatcccgaagatccttataaaggttataggtatttgtatttgaccccccaagactacaagcgagtgagtgcacttaactccgtccattgcgagcacgttgaggatgaaggcgagtcccgatataagatcactgatatcattggaaaagaggagggcattggcccagagaacctacgaggttctggcatgattgccggagagagcagccttgcatataacgaaattataaccataagtctggttacttgcagagcaatcggaattggtgcctatctggttcgcctggggcagcgaactatacaggtcgaaaactctcatctcatcctaaccggcgctggtgccctgaacaaagttttggggagagaggtctacacaagcaacaaccaattggggggtattcagattatgcacaacaacggcgttactcattgcacggtctgtgacgacttcgaaggggtctttactgttctgcactggctaagttatatgcccaagagcgtccatagttctgtgccgctgctcaattcaaaggaccccatcgataggattatagaatttgtccccacaaagacgccctacgacccgagatggatgcttgccggtcgaccccaccctacgcaaaagggccaatggttgagcggcttcttcgattacggcagtttttctgaaataatgcagccttgggctcagacagtggtggtaggccgagcccgtctgggcggaatacccgtgggcgtcgtggcagtggaaaccaggaccgtcgaactctccatcccagcggatccagctaacctggactcggaggcgaagattattcagcaggcgggacaggtgtggttccccgatagcgcgttcaagacctaccaggccatcaaagattttaaccgcgagggtttgcccctgatggtgtttgcgaactggcggggattttcgggcggaatgaaggatatgtacgaccaggtcctcaagtttggagcttacattgttgacggactgagagagtgttgccagccagtgcttgtgtacatcccgcctcaagccgaactgcgcggagggtcttgggtggtgattgatagctctatcaatcccaggcacatggagatgtatgcagatagggaatccagagggtccgtgttggagcctgaagggactgtagaaataaaattccggagaaaggacttagttaagacgatgcgcagggtggaccctgtctatatacaccttgccgagcggctcggaacacctgagcttagtacagcagaaagaaaggagttggaaaacaaacttaaagaacgggaggagttccttatccctatataccaccaggtggccgtgcagtttgctgacttgcatgacacacccggtcgcatgcaggaaaagggggtgatatccgacattctcgattggaagacatcacgaaccttcttctattggcggctacgccgtctacttctggaggatctcgtgaaaaagaaaattcataatgcaaatcctgaactgaccgacggacagattcaggctatgctgcggaggtggtttgtcgaggtggaaggcacagtcaaggcctatgtctgggataacaacaaggatctggccgagtggttagaaaagcaattaacagaggaagatggcgtgcattccgtaatcgaagaaaatataaaatgcatatcccgggattacgtgctgaagcaaatcaggagcctggtgcaggccaacccagaggttgccatggactctatcatccacatgacccagcacatttcacccacccaaagggccgaagtgatccggatactgtctacaatggacagcccaagcacata

SEQ ID NO: 317470 - DNA, 7041 bp, Artificial Sequence
  derived and/or modified sequence
atggacgagcccagccccctggcccagcccctggagctgaaccagcacagcagattcatcatcggcagcgtgagcgaggacaacagcgaggacgagatcagcaacctggtgaagctggacctgctggaggagaaggagggcagcctgagccccgccagcgtgggcagcgacaccctgagcgacctgggcatcagcagcctgcaggacggcctggccctgcacatcagaagcagcatgagcggcctgcacctggtgaagcagggcagagacagaaagaagatcgacagccagagagacttcaccgtggccagccccgccgagttcgtgaccagattcggcggcaacaaggtgatcgagaaggtgctgatcgccaacaacggcatcgccgccgtgaagtgcatgagaagcatcagaagatggagctacgagatgttcagaaacgagagagccatcagattcgtggtgatggtgacccccgaggacctgaaggccaacgccgagtacatcaagatggccgaccactacgtgcccgtgcccggcggccccaacaacaacaactacgccaacgtggagctgatcctggacatcgccaagagaatccccgtgcaggccgtgtgggccggctggggccacgccagcgagaaccccaagctgcccgagctgctgctgaagaacggcatcgccttcatgggcccccccagccaggccatgtgggccctgggcgacaagatcgccagcagcatcgtggcccagaccgccggcatccccaccctgccctggagcggcagcggcctgagagtggactggcaggagaacgacttcagcaagagaatcctgaacgtgccccaggagctgtacgagaagggctacgtgaaggacgtggacgacggcctgcaggccgccgaggaggtgggctaccccgtgatgatcaaggccagcgagggcggcggcggcaagggcatcagaaaggtgaacaacgccgacgacttccccaacctgttcagacaggtgcaggccgaggtgcccggcagccccatcttcgtgatgagactggccaagcagagcagacacctggaggtgcagatcctggccgaccagtacggcaacgccatcagcctgttcggcagagactgcagcgtgcagagaagacaccagaagatcatcgaggaggcccccgccaccatcgccacccccgccgtgttcgagcacatggagcagtgcgccgtgaagctggccaagatggtgggctacgtgagcgccggcaccgtggagtacctgtacagccaggacggcagcttctacttcctggagctgaaccccagactgcaggtggagcacccctgcaccgagatggtggccgacgtgaacctgcccgccgcccagctgcagatcgccatgggcatccccctgtacagaatcaaggacatcagaatgatgtacggcgtgagcccctggggcgacagccccatcgacttcgaggacagcgcccacgtgccctgccccagaggccacgtgatcgccgccagaatcaccagcgagaaccccgacgagggcttcaagcccagcagcggcaccgtgcaggagctgaacttcagaagcaacaagaacgtgtggggctacttcagcgtggccgccgccggcggcctgcacgagttcgccgacagccagttcggccactgcttcagctggggcgagaacagagaggaggccatcagcaacatggtggtggccctgaaggagctgagcatcagaggcgacttcagaaccaccgtggagtacctgatcaagctgctggagaccgagagcttccagatgaacagaatcgacaccggctggctggacagactgatcgccgagaaggtgcaggccgagagacccgacaccatgctgggcgtggtgtgcggcgccctgcacgtggccgacgtgagcctgagaaacagcgtgagcaacttcctgcacagcctggagagaggccaggtgctgcccgcccacaccctgctgaacaccgtggacgtggagctgatctacgagggcgtgaagtacgtgctgaaggtgaccagacagagccccaacagctacgtggtgatcatgaacggcagctgcgtggaggtggacgtgcacagactgagcgacggcggcctgctgctgagctacgacggcagcagctacaccacctacatgaaggaggaggtggacagatacagaatcaccatcggcaacaagacctgcgtgttcgagaaggagaacgaccccagcgtgatgagaagccccagcgccggcaagctgatccagtacatcgtggaggacggcggccacgtgttcgccggccagtgctacgccgagatcgaggtgatgaagatggtgatgaccctgaccgccgtggagagcggctgcatccactacgtgaagagacccggcgccgccctggaccccggctgcgtgctggccaagatgcagctggacaaccccagcaaggtgcagcaggccgagctgcacaccggcagcctgcccagaatccagagcaccgccctgagaggcgagaagctgcacagagtgttccactacgtgctggacaacctggtgaacgtgatgaacggctactgcctgcccgaccccttcttcagcagcaaggtgaaggactgggtggagagactgatgaagaccctgagagaccccagcctgcccctgctggagctgcaggacatcatgaccagcgtgagcggcagaatcccccccaacgtggagaagagcatcaagaaggagatggcccagtacgccagcaacatcaccagcgtgctgtgccagttccccagccagcagatcgccaacatcctggacagccacgccgccaccctgaacagaaagagcgagagagaggtgttcttcatgaacacccagagcatcgtgcagctggtgcagagatacagaagcggcatcagaggccacatgaaggccgtggtgatggacctgctgagacagtacctgagagtggagacccagttccagaacggccactacgacaagtgcgtgttcgccctgagagaggagaacaagagcgacatgaacaccgtgctgaactacatcttcagccacgcccaggtgaccaagaagaacctgctggtgaccatgctgatcgaccagctgtgcggcagagaccccaccctgaccgacgagctgctgaacatcctgaccgagctgacccagctgagcaagaccaccaacgccaaggtggccctgagagccagacaggtgctgatcgccagccacctgcccagctacgagctgagacacaaccaggtggagagcatcttcctgagcgccatcgacatgtacggccaccagttctgcatcgagaacctgcagaagctgatcctgagcgagaccagcatcttcgacgtgctgcccaacttcttctaccacagcaaccaggtggtgagaatggccgccctggaggtgtacgtgagaagagcctacatcgcctacgagctgaacagcgtgcagcacagacagctgaaggacaacacctgcgtggtggagttccagttcatgctgcccaccagccaccccaacagaggcaacatccccaccctgaacagaatgagcttcagcagcaacctgaaccactacggcatgacccacgtggccagcgtgagcgacgtgctgctggacaacagcttcacccccccctgccagagaatgggcggcatggtgagcttcagaaccttcgaggacttcgtgagaatcttcgacgaggtgatgggctgcttcagcgacagccccccccagagccccaccttccccgaggccggccacaccagcctgtacgacgaggacaaggtgcccagagacgagcccatccacatcctgaacgtggccatcaagaccgactgcgacatcgaggacgacagactggccgccatgttcagagagttcacccagcagaacaaggccaccctggtggaccacggcatcagaagactgaccttcctggtggcccagaaggacttcagaaagcaggtgaactacgaggtggacagaagattccacagagagttccccaagttcttcaccttcagagccagagacaagttcgaggaggacagaatctacagacacctggagcccgccctggccttccagctggagctgaacagaatgagaaacttcgacctgaccgccatcccctgcgccaaccacaagatgcacctgtacctgggcgccgccaaggtggaggtgggcaccgaggtgaccgactacagattcttcgtgagagccatcatcagacacagcgacctggtgaccaaggaggccagcttcgagtacctgcagaacgagggcgagagactgctgctggaggccatggacgagctggaggtggccttcaacaacaccaacgtgagaaccgactgcaaccacatcttcctgaacttcgtgcccaccgtgatcatggaccccagcaagatcgaggagagcgtgagaagcatggtgatgagatacggcagcagactgtggaagctgagagtgctgcaggccgagctgaagatcaacatcagactgacccccaccggcaaggccatccccatcagactgttcctgaccaacgagagcggctactacctggacatcagcctgtacaaggaggtgaccgacagcagaaccgcccagatcatgttccaggcctacggcgacaagcagggccccctgcacggcatgctgatcaacaccccctacgtgaccaaggacctgctgcagagcaagagattccaggcccagagcctgggcaccacctacatctacgacatccccgagatgttcagacagagcctgatcaagctgtgggagagcatgagcacccaggccttcctgcccagcccccccctgcccagcgacatgctgacctacaccgagctggtgctggacgaccagggccagctggtgcacatgaacagactgcccggcggcaacgagatcggcatggtggcctggaagatgaccttcaagagccccgagtaccccgagggcagagacatcatcgtgatcggcaacgacatcacctacagaatcggcagcttcggcccccaggaggacctgctgttcctgagagccagcgagctggccagagccgagggcatccccagaatctacgtgagcgccaacagcggcgccagaatcggcctggccgaggagatcagacacatgttccacgtggcctgggtggaccccgaggacccctacaagggctacagatacctgtacctgaccccccaggactacaagagagtgagcgccctgaacagcgtgcactgcgagcacgtggaggacgagggcgagagcagatacaagatcaccgacatcatcggcaaggaggagggcatcggccccgagaacctgagaggcagcggcatgatcgccggcgagagcagcctggcctacaacgagatcatcaccatcagcctggtgacctgcagagccatcggcatcggcgcctacctggtgagactgggccagagaaccatccaggtggagaacagccacctgatcctgaccggcgccggcgccctgaacaaggtgctgggcagagaggtgtacaccagcaacaaccagctgggcggcatccagatcatgcacaacaacggcgtgacccactgcaccgtgtgcgacgacttcgagggcgtgttcaccgtgctgcactggctgagctacatgcccaagagcgtgcacagcagcgtgcccctgctgaacagcaaggaccccatcgacagaatcatcgagttcgtgcccaccaagaccccctacgaccccagatggatgctggccggcagaccccaccccacccagaagggccagtggctgagcggcttcttcgactacggcagcttcagcgagatcatgcagccctgggcccagaccgtggtggtgggcagagccagactgggcggcatccccgtgggcgtggtggccgtggagaccagaaccgtggagctgagcatccccgccgaccccgccaacctggacagcgaggccaagatcatccagcaggccggccaggtgtggttccccgacagcgccttcaagacctaccaggccatcaaggacttcaacagagagggcctgcccctgatggtgttcgccaactggagaggcttcagcggcggcatgaaggacatgtacgaccaggtgctgaagttcggcgcctacatcgtggacggcctgagagagtgctgccagcccgtgctggtgtacatccccccccaggccgagctgagaggcggcagctgggtggtgatcgacagcagcatcaaccccagacacatggagatgtacgccgacagagagagcagaggcagcgtgctggagcccgagggcaccgtggagatcaagttcagaagaaaggacctggtgaagaccatgagaagagtggaccccgtgtacatccacctggccgagagactgggcacccccgagctgagcaccgccgagagaaaggagctggagaacaagctgaaggagagagaggagttcctgatccccatctaccaccaggtggccgtgcagttcgccgacctgcacgacacccccggcagaatgcaggagaagggcgtgatcagcgacatcctggactggaagaccagcagaaccttcttctactggagactgagaagactgctgctggaggacctggtgaagaagaagatccacaacgccaaccccgagctgaccgacggccagatccaggccatgctgagaagatggttcgtggaggtggagggcaccgtgaaggcctacgtgtgggacaacaacaaggacctggccgagtggctggagaagcagctgaccgaggaggacggcgtgcacagcgtgatcgaggagaacatcaagtgcatcagcagagactacgtgctgaagcagatcagaagcctggtgcaggccaaccccgaggtggccatggacagcatcatccacatgacccagcacatcagccccacccagagagccgaggtgatcagaatcctgagcaccatggacagccccagcacctag

SEQ ID NO: 317471 - DNA, 6807 bp, Artificial Sequence
  derived and/or modified sequence
atgagcggattacacctcgtcaagcaggggagggatcgcaagaagatcgactcacagagagatttcaccgtggcaagcccagccgaatttgtgactagattcggaggcaacaaggtcatcgagaaggtgttaatagctaacaacggaattgccgccgtgaagtgtatgaggagcattcgccgttggagctatgaaatgtttagaaatgagagggccattagattcgtagtgatggtgacaccagaggatctcaaggctaatgcagagtatatcaaaatggccgaccactatgtgcctgttcctgggggacctaataacaacaactacgccaacgttgagttgatcctggacattgctaaacgaatacctgtgcaggccgtgtgggcaggctggggtcatgccagcgagaatccgaaactgcccgaactcctgttgaagaacggcatcgctttcatgggccctccttcccaagccatgtgggcgctcggagacaaaatcgcctcctctatcgtggcacaaaccgcgggtatccccacacttccgtggagtgggagcggtctgagggtggattggcaggagaacgacttctcaaagcggattctgaatgtgccccaggagctttatgagaaaggctacgtaaaagacgtggatgacggcctccaggctgctgaggaagtaggctatccagtaatgatcaaggcctccgaaggggggggaggcaaggggattcggaaagtgaacaacgccgacgatttcccgaatttgtttagacaggtgcaggcagaagtgccaggcagtcccatatttgtcatgcggttagcaaagcagtccagacatctcgaggtccagattctcgctgatcaatacggcaacgccatctccctgttcgggcgggattgttccgtccagagacgtcatcagaaaatcatcgaagaggccccagctacaatcgctacaccggctgtgtttgagcacatggagcagtgtgcagttaaattggctaagatggtcggatatgtctctgccggaacagtggaatatctctattctcaggacgggtctttttacttcctcgaactgaatcctagactgcaagtagagcatccttgcaccgaaatggtggccgacgttaacctgccagccgcccagcttcaaatcgctatggggatcccattgtataggattaaagacatccgtatgatgtatggcgtgtctccgtggggagacagccctattgatttcgaagactccgcccatgtgccttgtcctaggggacatgttatcgcagccagaattacaagtgagaaccccgatgaaggctttaagccctctagtggtacagtgcaggagctaaatttccggagtaataagaatgtgtggggttacttttcagtggccgcggcaggcgggttgcacgagtttgcagattcccagttcggccattgtttttcatggggcgaaaatagggaggaagctattagtaatatggtggtggctttaaaggagctgtctatccggggcgatttcagaactaccgtggagtatcttattaagttgttggaaaccgagagctttcagatgaaccgcatcgacacaggttggctcgatcgtctgatagcagagaaagtccaagcagagcgacccgatacgatgttgggcgtagtgtgcggagctctgcatgtagcagacgtaagcttgcgtaacagtgtatcaaattttctgcattctctcgagcggggtcaggtactgcccgctcacactttattgaacacagtggatgttgaactgatttacgagggtgtcaaatacgtgctcaaagtcacaaggcaatcccctaactcatatgttgttattatgaatggttcttgtgtcgaagtcgatgttcatcgactctctgatggtggcctcctcctgtcgtacgacggctcgtcatacactacttatatgaaggaagaagtcgaccggtaccgtataaccattggcaataaaacctgcgttttcgagaaggaaaacgatccatccgtgatgcggtcaccaagcgctggcaagctgatccagtacattgtggaggacggtggacacgtcttcgcaggtcagtgctacgccgagattgaagtgatgaaaatggtgatgaccctcacagccgtagaatctggatgcatccactatgtgaaacgccctggtgcagccctcgatccaggctgtgtcttggctaagatgcaacttgacaatccgtctaaggtccaacaggcggagctccacacaggaagtctcccacgtatacagtccacagcgctgcggggagaaaaattacacagagtgtttcactatgtcctggataaccttgttaacgtgatgaacggatactgtctgcccgatccattctttagcagtaaggtcaaagattgggtggagcggttgatgaagactctgagggacccctctctacctctgctggagctgcaagacattatgacctccgtgtccggacggatccctccaaatgtggaaaaaagtatcaaaaaggagatggcccagtacgctagtaacatcactagcgtattgtgccagttcccctctcagcagattgcaaatattctggacagtcatgctgcaactctgaacagaaagtctgagagagaagtgtttttcatgaacactcagagcattgtccagctcgtacagcgctacaggagcggcatccggggtcatatgaaggccgtcgtgatggatttgctgaggcagtacttgcgcgtagaaacacagttccagaatggacattatgacaaatgtgtgttcgcactgcgggaggagaacaaatcagacatgaataccgtgttgaattacatctttagccacgcccaggtcacaaaaaagaatctgctagtgaccatgctcatagaccagttgtgtggtagggaccctaccttaacggatgagttgcttaatattcttaccgagctcactcagctgtccaagacaactaatgccaaggtagccctgcgcgctcgtcaggtgctcattgctagccacttgccttcctatgaactcagacataatcaggttgaaagcatttttctgtccgccatcgacatgtacggacaccagttttgtatcgagaacctgcagaagcttatcctttccgagactagcattttcgatgtgctgccaaactttttttatcacagcaatcaggtcgttcggatggccgccctagaggtctatgtgaggcgtgcatacatcgcttatgagctaaattccgtccagcaccgccagctgaaggacaacacctgtgtagtggagttccaattcatgctgccaacttcccatcccaatcgcgggaacattcctactctgaataggatgtctttttcctcaaatctcaaccattacgggatgacacatgtcgcctcagtgagtgatgtgttgttggacaactcttttaccccgccctgtcagcggatgggcggcatggtgtccttccggacttttgaggatttcgttcgcatttttgatgaggttatgggatgctttagcgactctcctccgcagagtccaacctttcccgaagccggccataccagcctgtatgacgaggacaaagtacctcgggacgagcctatccatattctgaatgttgctattaaaacagactgcgatatcgaggacgatagactggctgcaatgttccgcgaattcactcagcagaataaggctactcttgtagatcatggcattagaagactaacatttcttgtggcacagaaagatttccgcaagcaggtgaattatgaggtcgacaggagattccatagggagtttcccaagttttttaccttccgggcacgggataagtttgaagaggaccggatctatcgtcacttggaacctgcactagccttccagctggaactcaatcggatgagaaacttcgacttgaccgccatcccatgcgccaatcacaagatgcatttgtacctaggagctgccaaagtcgaggttggaacagaagtaacggactatcgtttcttcgtgcgggcaattatccgacattccgacctagtcacaaaagaagcttcatttgaatacctgcagaacgagggtgagcggctgctgctggaagctatggacgagctcgaggtcgcttttaataataccaatgtgaggactgactgtaatcacattttcctgaacttcgtgcccactgttatcatggaccctagcaaaatcgaagagagcgtgcgatccatggtgatgagatatgggagtcgcctctggaagctacgcgtgctgcaggcggaactgaagatcaacatacgactgactccaacaggcaaggcaataccgatacggcttttcctgactaatgagtcaggatactatctggatattagcctgtacaaagaggtgacagattcacgtactgctcaaattatgttccaggcatatggagacaaacagggtcctctgcacggtatgctcatcaatacaccttacgtgactaaggacctgcttcagtcgaagcgcttccaagctcaatccctgggcactacctatatttacgacatccccgaaatgtttcgtcaatctctcattaaactgtgggaatcgatgagcacacaggcattccttccaagcccgccccttcccagtgacatgttgacctacacggagctcgtgctcgacgaccagggacagctcgtgcacatgaatcgcctccctggtggtaacgaaataggtatggttgcctggaaaatgacttttaaaagtccagaataccctgagggcagagatataattgtgatcggaaatgatattacatacaggatcgggagtttcggtccccaagaggacctcttgttcctgagggccagtgagctggcacgggccgaaggaattccccgtatctacgtgtctgcaaactccggagccaggattggcttggccgaggagatccgccacatgtttcatgtcgcctgggtcgatccggaagatccctacaaaggataccgctacctgtaccttacccctcaggactacaaacgggtgtcagccctgaatagtgttcattgtgaacacgtggaggacgagggggagagccgatacaagattacggatatcataggcaaagaggaggggattgggcccgaaaacctccgaggcagcggtatgattgctggcgaatcaagtcttgcctacaatgagatcattactatctcactggtcacatgtagagcaatcggcataggcgcctatctggttcgattggggcagaggaccattcaggtagaaaactcccacctcatcctgaccggggccggggccctgaataaggtattagggagagaggtgtacacaagtaataatcaactcggtggtatccagataatgcataacaatggcgtgactcattgtaccgtgtgtgacgattttgagggggtgttcaccgtgctgcattggctgtcatacatgcccaaatccgtgcactcttccgtgccactactgaacagcaaggatcccatagatcggatcatcgaatttgttccaaccaaaactccgtatgatccaagatggatgctcgccggcagaccacaccctactcagaaagggcaatggcttagtggctttttcgattacggcagctttagcgagataatgcaaccctgggctcagacagtagtggttgggcgcgccaggctcggggggattcctgtgggcgtggtggccgtcgaaaccaggacggttgagctaagtatccctgcagaccccgccaatctcgacagcgaagctaaaataattcagcaagctggccaggtgtggtttcccgatagcgcttttaagacttatcaggcaattaaggatttcaaccgggagggcttacctcttatggtattcgcaaattggaggggtttctcgggggggatgaaagacatgtacgatcaagtgctgaagttcggagcatatattgtcgacggcctgcgggagtgttgccagcctgtgctcgtgtatattcctcctcaggccgagctgaggggcggctcctgggttgttatagattcatccattaatccccgacacatggagatgtacgctgatagggagagcagaggaagcgtccttgagcccgaaggcacggtcgagatcaaatttaggcgcaaagaccttgtgaagaccatgcggagggtggatcccgtctacatccacctggctgaacgtttggggacgccagaactgagtactgcagaacggaaagagttggaaaataaattaaaagagcgggaggagttccttattcccatctatcaccaggtggccgttcagtttgccgatctccacgacacaccagggcgcatgcaggagaagggggttattagcgacattctcgactggaagacatctcgtacatttttttactggcggctgcgccgccttctcctagaggatttagtgaagaaaaagattcacaatgcaaacccagagcttacggatggccagatacaggccatgctccgccggtggttcgtggaggttgaggggaccgtgaaggcctacgtctgggataataacaaggatttagccgagtggctggagaagcaactcaccgaggaagatggagtgcactccgtgattgaggagaatatcaaatgtatctccagagactacgttctgaaacaaattcgctctttggttcaagcgaatcctgaagtggcaatggatagcatcattcacatgacacagcatatctccccaactcagagggctgaagtcatccgaatcctgtccacgatggatagcccgagcacatag

SEQ ID NO: 317472 - DNA, 1419 bp, Artificial Sequence
  derived and/or modified sequence
atgcacaataacggtgtcacccattgtacagtctgcgacgacttcgagggtgtcttcacagtccttcactggcttagctacatgcccaagtccgtgcattccagcgtgccactactgaactctaaggatccaatcgacaggataattgagttcgtccctaccaagaccccctacgatccccggtggatgctggccggccgcccccacccaactcaaaagggacagtggttatcgggattttttgattatggcagcttttcagagattatgcagccttgggcacaaacggtagtggtcggccgtgcccgtttaggggggatccccgttggcgtcgtggcagtcgagacacgcactgtcgagctgtccattcccgctgaccctgccaatctggacagcgaagctaagatcatccagcaggccggtcaagtatggttccctgactcagccttcaagacttatcaagcaataaaggactttaaccgggagggattgcctctgatggtgtttgccaattggagaggattttcaggtggtatgaaagatatgtacgatcaggtcttaaagtttggcgcatatatagtagacgggctgcgggagtgctgccagcccgtattggtatacattccaccacaggccgagctgcggggaggttcctgggtggtcattgacagtagcattaacccccgtcacatggagatgtatgccgatagagagtcccgcggatctgtcctggagccggagggtaccgtggagatcaagtttcgtagaaaggacttggttaagactatgcgacgggttgatcctgtgtacatccatttggctgaaagattgggcacgcccgaactcagcaccgccgaacgcaaagagttggagaataaattgaaggagagagaggaatttttgattccaatttatcaccaggtcgccgtacagttcgcggatcttcacgacacgcccggacgaatgcaggaaaagggcgttattagcgacattttggactggaaaacttcgaggacctttttctattggcggctacgccgacttttactggaggacctagtaaaaaagaagattcataatgccaaccccgaactcactgacggtcagatacaggcgatgcttcgccgatggttcgttgaggtggagggtacagttaaggcgtatgtgtgggataacaacaaggacctagcagagtggctggagaagcaactgactgaagaagatggggtgcacagtgtcattgaagaaaatatcaaatgtatttctcgagactacgtgctcaagcaaatcagatctctggtccaggcaaaccctgaggtggcaatggattccatcatacatatgacacaacatattagtcccacccagagagctgaggttatccgcatactgtccacaatggatagtccctcaacctag

SEQ ID NO: 317473 - DNA, 3138 bp, Artificial Sequence
  derived and/or modified sequence
atgggatgcttttccgactcccccccacaaagcccaaccttccccgaggcaggtcatacatccctttacgacgaggataaggtcccccgggacgaacctattcatattcttaacgtcgcgattaagactgactgcgatattgaggatgataggctggcagcgatgtttagggaattcacacagcagaataaggccactctggtagatcacggtatccgccgactgaccttcctcgtggctcaaaaggattttcgcaaacaggttaactacgaagtggacagacgctttcacagggagtttcctaagttctttacgttccgagcccgggacaaattcgaggaggaccggatctaccggcatctggagcccgctttggcctttcagttagaactcaacaggatgaggaactttgatcttactgcgattccatgcgcgaaccataagatgcacctgtacttaggagctgccaaggtagaggtggggaccgaagtaactgattaccgcttcttcgtgagagctattatccgccatagcgaccttgttaccaaagaagcctctttcgagtacctccagaacgaaggagagcgtctcctgttagaagctatggacgagcttgaggttgcttttaataatacaaacgtgcggaccgattgcaaccacatttttctcaactttgtgccaaccgtcattatggatccttcaaagattgaggaatccgtccggtcaatggtaatgaggtatggaagcaggctatggaaattgagggtgctccaggcagagctcaaaattaatattcgacttactcctactggcaaggccattcccatcagactctttttgaccaatgagtccggatactatctggatatctctctatataaggaggttacagactccagaacagcacagattatgttccaagcttacggcgataagcagggaccgcttcacggtatgttgatcaatacaccctacgtgacgaaagatttactccagagcaaacggttccaggcacagagtctgggaaccacctacatttatgacattccagagatgttccgtcaaatcggcatggttgcttggaagatgactttcaagagccccgaataccctgagggaagagacataatcgtgattggaaacgacatcacctacaggattggatctttcggaccccaggaggacctcctgttccttagagcttccgagctggctagagccgaggggatacccagaatctatgtttccgccaattcaggcgctcgcattggtcttgcagaagaaattaggcatatgtttcatgtcgcttgggtggaccctgaggacccatataagggctaccgctatttgtacctgacgcctcaagactacaagcgcgtctccgcattgaattccgttcattgcgagcacgtggaggacgaaggggagtcacggtacaagatcacagatattataggaaaggaggaagggatcggccctgagaaccttagagggtctggcatgatagcaggcgaatcaagcctggcatataacgaaatcatcacgatcagtctcgttacttgccgcgctatcggcattggagcttatttggtaagacttgggcagagaacaatccaagtggaaaattcccatctcattctcacaggcgcaggggccctgaataaggtgctcgggcgggaagtgtacaccagcaacaaccagttgggcggaatccagattatgcacaataacggcgtgacacattgcacagtctgcgacgacttcgagggagttttcactgtgttacactggttgagctacatgcctaagtccgtgcactctagcgtccccctgctcaacagcaaagatcccatagaccgaattattgagtttgtccctacaaaaacaccgtacgaccccagatggatgctcgccggtcgcccgcatccaacgcagaagggacagtggcttagcggtttttttgattatggatctttctccgagatcatgcagccatgggctcagacagtggtcgttggtagggcacggttagggggaatcccagtgggtgtcgtagccgtcgagacaaggaccgtggaactcagcattccagccgaccctgccaatttggatagtgaggccaagataatccagcaggcaggacaggtctggtttccagacagcgctttcaaaacctatcaagctattaaagacttcaatcgggagggtttacccctgatggtgttcgccaactggcggggtttcagcggaggcatgaaagacatgtacgatcaggtgctcaagtttggggcctatattgtcgatggtctgcgagagtgttgccagcctgttctcgtgtatatccctccacaggctgagttgcggggtggaagctgggtggtcatagactcctctatcaaccccagacacatggaaatgtacgctgaccgggagagtagaggcagcgtgctggagccagaaggtaccgtggagatcaaatttcggcgtaaagatctggtcaagaccatgcgtcgcgttgacccggtgtatattcaccttgcggagcgccttgggaccccagaactaagtaccgctgagaggaaggagctggaaaacaagttgaaagagagagaagaatttctgattcccatctatcaccaggtcgcggttcagttcgccgatctgcacgatacccctgggagaatgcaggaaaaaggcgtgatctccgatatattggactggaagacttcccgaacatttttctactggcggcttaggcgactgctcctggaggatctggtcaaaaaaaaaattcataatgccaatccagagctcacggatggccaaattcaggcaatgctgcgtcgatggttcgtcgaggttgagggcaccgtcaaggcttacgtgtgggataataataaggacctggccgaatggttggaaaaacaactgaccgaggaggacggcgtgcactccgtcatcgaggagaacattaagtgcatttcacgggactatgtgctgaagcagattcgctctctggtgcaggctaatccagaagttgccatggatagcatcatacatatgacccaacacatttcgcctacacagcgcgcagaagtgattagaatcctgtccaccatggatagccccagcacgtag

SEQ ID NO: 317474 - DNA, 777 bp, Artificial Sequence
  derived and/or modified sequence
atgtctggcttacacttggtgaagcaggggcgcgacagaaagaagatcgacagtcagcgcgattttactgtggccagccctgcggagtttgtgaccagatttggcgggaataaggtgattgagaaagtgctgattgccaataacgggatagccgccgtcaagtgtatgcgatccatccggcggtggagctacgagatgttcagaaacgagcgagccataaggttcgttgtgatggtaacaccagaggacttgaaggctaacgccgagtacatcaagatggcggatcattacgtgccagttcccggtgggcccaacaacaataattacgctaacgtggagctcatcttggatattgctaaacgaattccggtacaggctgtctgggcaggctggggtcatgcctctgagaacccaaagcttccagaattactgctaaagaatggaattgccttcatgggacccccaagccaggcgatgtgggcattgggcgacaagattgcatcttctattgtcgctcaaacagccgggatacctaccctgccatggtctggatccggcctgagagtggactggcaggaaaatgacttttcaaagcgaatcctaaatgtacctcaagagttgtacgaaaaaggatacgtgaaggatgtggatgacggcttacaggctgctgaggaagtgggctatccagttatgatcaaagcgtcagagggtggaggaggtaaagggatccgtaaagttaataatgccgatgacttcccgaacctctttcgccaatag

SEQ ID NO: 317475 - DNA, 6807 bp, Artificial Sequence
  derived and/or modified sequence
atgagcggcctgcacctggtgaagcagggccgggacaggaagaagattgacagccagagggacttcaccgtggccagccctgctgagtttgtgaccaggtttggaggcaacaaggtgattgagaaggtgctgattgccaacaacggcattgctgctgtgaagtgcatgaggagcatccgccgctggagctatgagatgttcagaaatgaaagagccatccgctttgtggtgatggtgaccccagaggacctgaaggccaatgctgagtacatcaagatggctgaccactacgtgcctgtgcctgggggccccaacaacaacaactatgccaacgtggagctgatcctggacatcgccaagagaattcctgtgcaggccgtgtgggccggctggggccacgccagcgagaaccccaagctgcctgagctgctgctgaagaatggaattgccttcatgggcccccccagccaggccatgtgggccctgggggacaagatcgccagcagcatcgtggcccagacagctggcatccccaccctgccctggagcggcagcggcctgcgggtggactggcaggagaatgacttcagcaagaggatcctgaatgtgccccaggagctgtatgagaagggctacgtgaaggatgtggatgatggcctgcaggccgctgaggaggtgggctaccctgtgatgatcaaggccagcgagggcggcggcggcaagggcatcaggaaggtgaacaatgctgatgacttccccaacctcttccggcaggtgcaggccgaggtgcccggcagccccatctttgtgatgaggctggccaagcagagccgccacctggaggtgcagatcctggccgaccagtatggaaatgccatcagcctgtttggccgggactgcagcgtgcagaggaggcaccagaagatcatcgaggaggccccagccaccatcgccaccccagctgtgtttgagcacatggagcagtgtgctgtgaagctggccaagatggtgggctacgtgtctgctggcaccgtggagtacctgtacagccaggacggcagcttctacttcctggagctgaacccccggctgcaggtggagcacccctgcacagagatggtggctgatgtgaacctgcctgctgcccagctgcagatcgccatgggcatccccctgtaccgcatcaaggacatccgcatgatgtatggagtgagcccctggggagacagccccatcgactttgaagattctgcccacgtgccctgcccccggggccacgtgattgctgcccgcatcaccagtgaaaatccagatgagggcttcaagcccagcagcggcaccgtgcaggagctgaacttccgcagcaacaagaatgtgtggggctacttctctgtggccgccgccggcggcctgcacgagtttgctgacagccagtttggccactgcttctcctggggagaaaatcgggaggaggccatcagcaacatggtggtggccctgaaggagctgagcatccggggggacttccgcaccaccgtggagtacctgatcaagctgctggagacagagagcttccagatgaacagaattgacaccggctggctggaccggctgattgctgagaaggtgcaggccgagaggccagacaccatgctgggcgtggtgtgtggggccctgcacgtggctgatgtgtccctgagaaattctgtgagcaacttcctgcacagcctggagcggggccaggtgctgcctgcccacaccctgctgaacacagtggatgtggagctgatctatgagggcgtgaagtatgtgctgaaggtgacccggcagagccccaacagctatgtggtgatcatgaatggcagctgtgtggaggtggatgtgcaccggctgagtgatggcggcctgctgctgtcctatgatggcagcagctacaccacctacatgaaggaggaggtggaccgctaccgcatcaccatcggcaacaagacctgtgtgtttgagaaggaaaatgaccccagcgtgatgaggagccccagcgctgggaagctgatccagtacatcgtggaggatggcggccacgtgtttgctggccagtgctacgccgagattgaggtgatgaagatggtgatgaccctgacagctgtggagagcggctgcatccactacgtgaagaggcctggagctgccctggaccccggctgtgtgctggccaagatgcagctggacaaccccagcaaggtgcagcaggccgagctgcacacaggcagcctgccccgcatccagagcacagccctgcggggggagaagctgcacagggtcttccactacgtgctggacaacctggtgaatgtgatgaatggctactgcctgcctgaccccttcttcagcagcaaggtgaaggactgggtggagcggctgatgaagaccctgcgggaccccagcctgcccctgctggagctgcaggacatcatgacctctgtgtctggccgcatccccccaaatgtggagaagagcatcaagaaggagatggcccagtatgccagcaacatcacctctgtgctgtgccagttccccagccagcagatcgccaacatcctggacagccatgctgccaccctgaacaggaagtctgagcgggaggtgttcttcatgaacacccagagcatcgtgcagctggtgcagcgctacagaagtggcatccggggccacatgaaggctgtggtgatggacctgctgcggcagtacctgcgggtggagacccagttccagaatggccactatgacaagtgtgtgtttgccctgcgggaggagaacaagagtgacatgaacacagtgctgaactacatcttcagccacgcccaggtgaccaagaagaacctgctggtgaccatgctgattgaccagctgtgtggccgggaccccaccctgacagatgagctgctgaacatcctgacagagctgacccagctgagcaagaccaccaatgccaaggtggccctgcgggcccggcaggtgctgattgccagccacctgcccagctatgagctgcggcacaaccaggtggagagcatcttcctgagcgccatcgacatgtatggccaccagttctgcatcgagaacctgcagaagctgatcctgtctgagaccagcatctttgatgtgctgcccaacttcttctaccacagcaaccaggtggtgaggatggccgccctggaggtgtatgtgagaagagcctacatcgcctatgagctgaacagcgtgcagcaccggcagctgaaggacaacacctgtgtggtggagttccagttcatgctgcccaccagccaccccaacagaggcaacatccccaccctgaacaggatgtccttcagcagcaacctgaaccactacggcatgacccacgtggcctctgtgtctgatgtgctgctggacaacagcttcaccccaccctgccagaggatgggcggcatggtgtccttccgcacctttgaagattttgtgcgcatctttgatgaggtgatgggctgcttcagtgacagccccccccagagccccaccttccctgaggccggccacaccagcctgtatgatgaggacaaggtgcccagagatgagcccatccacatcctgaatgtggccatcaagacagactgtgacattgaagatgaccggctggccgccatgttccgggagttcacccagcagaacaaggccaccctggtggaccacggcatccggcggctgaccttcctggtggcccagaaggacttcaggaagcaggtgaactatgaggtggaccggcgcttccaccgggagttccccaagttcttcaccttccgggcccgggacaagtttgaggaggaccgcatctaccgccacctggagcccgccctggccttccagctggagctgaacaggatgaggaactttgacctgacagccatcccctgtgccaaccacaagatgcacctgtacctgggcgccgccaaggtggaggtgggcacagaggtgacagactaccgcttctttgtgcgggccatcatccgccacagcgacctggtgaccaaggaggccagctttgagtacctgcagaatgaaggagagcggctgctgctggaggccatggatgagctggaggtggccttcaacaacaccaacgtgaggacagactgcaaccacatcttcctgaactttgtgcccaccgtcatcatggaccccagcaagattgaggagagcgtgcgctccatggtgatgagatatggcagccggctgtggaagctgcgggtgctgcaggccgagctgaagatcaacatccggctgacccccaccgggaaggccatccccatccgcctcttcctgaccaatgaaagtggctactacctggacatcagcctgtacaaggaggtgacagacagcaggacagcccagatcatgttccaggcctatggagacaagcagggccccctgcacggcatgctgatcaacaccccctacgtgaccaaggacctgctgcagagcaagcgcttccaggcccagagcctgggcaccacctacatctatgacatccctgagatgttccggcagagcctcatcaagctgtgggagagcatgagcacccaggccttcctgcccagcccccccctgcccagcgacatgctgacctacacagagctggtgctggatgaccagggccagctggtgcacatgaaccggctgcccggcggcaatgaaattggcatggtggcctggaagatgaccttcaagagccctgagtacccagagggccgggacatcatcgtgattggaaatgacatcacctaccgcatcggcagctttggcccccaggaggacctgctcttcctgcgggccagcgagctggcccgggcagagggcatcccccgcatctacgtgtctgccaacagcggggcccgcatcggcctggccgaggagatccgccacatgtttcatgtggcctgggtggaccctgaggacccctacaagggctaccgctacctgtacctgaccccccaggactacaagagggtgtctgccctgaacagcgtgcactgtgaacatgtggaggatgaaggagagagccgctacaagatcacagacatcatcggcaaggaggagggcatcggccctgagaacctgcggggcagcggcatgattgctggggagagcagcctggcctacaatgagatcatcaccatcagcctggtgacctgccgggccatcggcattggagcctacctggtgcggctgggccagaggaccatccaggtggagaacagccacctgatcctgactggagctggggccctgaacaaggtgctgggccgggaggtgtacaccagcaacaaccagctgggcggcatccagatcatgcacaacaacggggtgacccactgcaccgtgtgtgatgactttgaaggagtcttcaccgtgctgcactggctgagctacatgcccaagtctgtgcacagctctgtgcccctgctgaacagcaaggaccccatcgaccgcatcattgaatttgtgcccaccaagaccccctatgacccccgctggatgctggccggccggccccaccccacccagaagggccagtggctgagcggcttctttgattatggcagcttcagcgagatcatgcagccctgggcccagacagtggtggtgggccgggcccggctgggcggcatccctgtgggcgtggtggccgtggagaccaggacagtggagctgagcatcccagctgaccctgccaacctggacagcgaggccaagatcatccagcaggccggccaggtgtggttcccagacagcgccttcaagacctaccaggccatcaaggacttcaaccgggagggcctgcccctgatggtgtttgccaactggaggggcttcagcggcggcatgaaggacatgtatgaccaggtgctgaagtttggagcctacatcgtggatggcctgcgggagtgctgccagcctgtgctggtgtacatccccccccaggccgagctgcggggcggctcctgggtggtgattgacagcagcatcaaccccaggcacatggagatgtatgctgaccgggagagccggggctctgtgctggagcctgagggcaccgtggagatcaagttccggaggaaggacctggtgaagaccatgagaagagtggaccctgtgtacatccacctggccgagcggctgggcaccccagagctgagcacagctgagaggaaggagctggagaacaagctgaaggagcgggaggagttcctgatccccatctaccaccaggtggccgtgcagtttgctgacctgcatgacaccccaggccgcatgcaggagaagggcgtcatcagtgacatcctggactggaagaccagcaggaccttcttctactggaggctgcggcggctgctgctggaggacctggtgaagaagaagatccacaatgccaaccctgagctgacagatggccagatccaggccatgctgcggcgctggtttgtggaggtggagggcaccgtgaaggcctacgtgtgggacaacaacaaggacctggccgagtggctggagaagcagctgacagaagaagatggagtgcacagcgtcatcgaggagaacatcaagtgcatcagccgggactatgtgctgaagcagatccgcagcctggtgcaggccaaccctgaggtggccatggacagcatcatccacatgacccagcacatcagccccacccagagagctgaggtgatccgcatcctgagcaccatggacagccccagcacctag

SEQ ID NO: 317476 - DNA, 1419 bp, Artificial Sequence
  derived and/or modified sequence
atgcacaacaacggggtgacccactgcaccgtgtgtgatgactttgaaggagtcttcaccgtgctgcactggctgagctacatgcccaagtctgtgcacagctctgtgcccctgctgaacagcaaggaccccatcgaccgcatcattgaatttgtgcccaccaagaccccctatgacccccgctggatgctggccggccggccccaccccacccagaagggccagtggctgagcggcttctttgattatggcagcttcagcgagatcatgcagccctgggcccagacagtggtggtgggccgggcccggctgggcggcatccctgtgggcgtggtggccgtggagaccaggacagtggagctgagcatcccagctgaccctgccaacctggacagcgaggccaagatcatccagcaggccggccaggtgtggttcccagacagcgccttcaagacctaccaggccatcaaggacttcaaccgggagggcctgcccctgatggtgtttgccaactggaggggcttcagcggcggcatgaaggacatgtatgaccaggtgctgaagtttggagcctacatcgtggatggcctgcgggagtgctgccagcctgtgctggtgtacatccccccccaggccgagctgcggggcggctcctgggtggtgattgacagcagcatcaaccccaggcacatggagatgtatgctgaccgggagagccggggctctgtgctggagcctgagggcaccgtggagatcaagttccggaggaaggacctggtgaagaccatgagaagagtggaccctgtgtacatccacctggccgagcggctgggcaccccagagctgagcacagctgagaggaaggagctggagaacaagctgaaggagcgggaggagttcctgatccccatctaccaccaggtggccgtgcagtttgctgacctgcatgacaccccaggccgcatgcaggagaagggcgtcatcagtgacatcctggactggaagaccagcaggaccttcttctactggaggctgcggcggctgctgctggaggacctggtgaagaagaagatccacaatgccaaccctgagctgacagatggccagatccaggccatgctgcggcgctggtttgtggaggtggagggcaccgtgaaggcctacgtgtgggacaacaacaaggacctggccgagtggctggagaagcagctgacagaagaagatggagtgcacagcgtcatcgaggagaacatcaagtgcatcagccgggactatgtgctgaagcagatccgcagcctggtgcaggccaaccctgaggtggccatggacagcatcatccacatgacccagcacatcagccccacccagagagctgaggtgatccgcatcctgagcaccatggacagccccagcacctag

SEQ ID NO: 317477 - DNA, 3138 bp, Artificial Sequence
  derived and/or modified sequence
atgggctgcttcagtgacagccccccccagagccccaccttccctgaggccggccacaccagcctgtatgatgaggacaaggtgcccagagatgagcccatccacatcctgaatgtggccatcaagacagactgtgacattgaagatgaccggctggccgccatgttccgggagttcacccagcagaacaaggccaccctggtggaccacggcatccggcggctgaccttcctggtggcccagaaggacttcaggaagcaggtgaactatgaggtggaccggcgcttccaccgggagttccccaagttcttcaccttccgggcccgggacaagtttgaggaggaccgcatctaccgccacctggagcccgccctggccttccagctggagctgaacaggatgaggaactttgacctgacagccatcccctgtgccaaccacaagatgcacctgtacctgggcgccgccaaggtggaggtgggcacagaggtgacagactaccgcttctttgtgcgggccatcatccgccacagcgacctggtgaccaaggaggccagctttgagtacctgcagaatgaaggagagcggctgctgctggaggccatggatgagctggaggtggccttcaacaacaccaacgtgaggacagactgcaaccacatcttcctgaactttgtgcccaccgtcatcatggaccccagcaagattgaggagagcgtgcgctccatggtgatgagatatggcagccggctgtggaagctgcgggtgctgcaggccgagctgaagatcaacatccggctgacccccaccgggaaggccatccccatccgcctcttcctgaccaatgaaagtggctactacctggacatcagcctgtacaaggaggtgacagacagcaggacagcccagatcatgttccaggcctatggagacaagcagggccccctgcacggcatgctgatcaacaccccctacgtgaccaaggacctgctgcagagcaagcgcttccaggcccagagcctgggcaccacctacatctatgacatccctgagatgttccggcagatcggcatggtggcctggaagatgaccttcaagagccctgagtacccagagggccgggacatcatcgtgattggaaatgacatcacctacagaattggcagctttggcccccaggaggacctgctcttcctgcgggccagcgagctggcccgggcagagggcatcccccgcatctacgtgtctgccaacagcggggccagaattggcctggccgaggagatccgccacatgttccacgtggcctgggtggaccctgaggacccctacaagggctaccgctacctgtacctgaccccccaggactacaagagggtgtctgccctgaacagcgtgcactgtgagcacgtggaggatgaaggagagagccgctacaagatcacagacatcatcggcaaggaggagggcatcggccctgagaacctgcggggcagcggcatgattgctggggagagcagcctggcctacaatgagatcatcaccatcagcctggtgacctgccgggccatcggcatcggggcctacctggtgcggctgggccagaggaccatccaggtggagaacagccacctgatcctgaccggggccggggccctgaacaaggtgctgggccgggaggtgtacaccagcaacaaccagctgggcggcatccagatcatgcacaacaatggagtgacccactgcaccgtgtgtgatgactttgagggcgtcttcaccgtgctgcactggctgagctacatgcccaagtctgtgcacagctctgtgcccctgctgaacagcaaggaccccatcgaccgcatcatcgagtttgtgcccaccaagaccccctatgacccccgctggatgctggccggccggccccaccccacccagaagggccagtggctgagcggcttctttgattatggcagcttcagcgagatcatgcagccctgggcccagacagtggtggtgggccgggcccggctgggcggcatccctgtgggcgtggtggccgtggagaccaggacagtggagctgagcatcccagctgaccctgccaacctggacagcgaggccaagatcatccagcaggccggccaggtgtggttcccagattctgccttcaagacctaccaggccatcaaggacttcaaccgggagggcctgcccctgatggtgtttgccaactggaggggcttcagcggcggcatgaaggacatgtatgaccaggtgctgaagtttggagcctacatcgtggatggcctgcgggagtgctgccagcctgtgctggtgtacatccccccccaggccgagctgcggggcggctcctgggtggtgattgacagcagcatcaaccccaggcacatggagatgtatgctgaccgggagagccggggctctgtgctggagcctgagggcaccgtggagatcaagttccggaggaaggacctggtgaagaccatgagaagagtggaccctgtgtacatccacctggccgagcggctgggcaccccagagctgagcacagctgagaggaaggagctggagaacaagctgaaggagcgggaggagttcctgatccccatctaccaccaggtggccgtgcagtttgctgacctgcatgacaccccaggccgcatgcaggagaagggcgtcatcagtgacatcctggactggaagaccagcaggaccttcttctactggaggctgcggcggctgctgctggaggacctggtgaagaagaagatccacaatgccaaccctgagctgacagatggccagatccaggccatgctgcggcgctggtttgtggaggtggagggcaccgtgaaggcctacgtgtgggacaacaacaaggacctggccgagtggctggagaagcagctgacagaggaggatggagtgcacagcgtgattgaggagaacatcaagtgcatcagccgggactatgtgctgaagcagatccgcagcctggtgcaggccaaccctgaggtggccatggacagcatcatccacatgacccagcacatcagccccacccagagagctgaggtgatccgcatcctgagcaccatggacagccccagcacctag

SEQ ID NO: 317478 - DNA, 777 bp, Artificial Sequence
  derived and/or modified sequence
atgagcggcctgcacctggtgaagcagggccgggacaggaagaagattgacagccagagggacttcaccgtggccagccctgctgagtttgtgaccaggtttggaggcaacaaggtgattgagaaggtgctgattgccaacaacggcattgctgctgtgaagtgcatgaggagcatccgccgctggagctatgagatgttcagaaatgaaagagccatccgctttgtggtgatggtgaccccagaggacctgaaggccaatgctgagtacatcaagatggctgaccactacgtgcctgtgcctgggggccccaacaacaacaactatgccaacgtggagctgatcctggacatcgccaagagaattcctgtgcaggccgtgtgggccggctggggccacgccagcgagaaccccaagctgcctgagctgctgctgaagaatggaattgccttcatgggcccccccagccaggccatgtgggccctgggggacaagatcgccagcagcatcgtggcccagacagctggcatccccaccctgccctggagcggcagcggcctgcgggtggactggcaggagaatgacttcagcaagaggatcctgaatgtgccccaggagctgtatgagaagggctacgtgaaggatgtggatgatggcctgcaggccgctgaggaggtgggctaccctgtgatgatcaaggccagcgagggcggcggcggcaagggcatcaggaaggtgaacaatgctgatgacttccccaacctcttccggcagtag

SEQ ID NO: 317479 - DNA, 1803 bp, Artificial Sequence
  derived and/or modified sequence
agaaattcgccatatgtttcatgtggcctgggtagatcctgaggatccttacaagggatacaggtatttatatctgactcctcaagattataagagagtcagtgctctcaactctgtccattgtgaacacgtggaagatgaaggagaatccaggtgacgtgccgggccattgggattggggcttaccttgtccggctgggacagagaaccatccaggttgagaattctcacttaattctaacaggagctggagccctcaacaaagtcctcgggcgggaagtgtacacctccaataaccagctggggggcatccagattatgcacaacaatggggtgacccactgcactgtgtgtgatgactttgaaggggttttcactgtcctgcactggctgtcttacatgcccaagagcgtgcacagttcagttcctcttctgaactcaaaggatcctatagacagaatcatcgagtttgttcccacaaagaccccatacgatcctcgatggatgctagcaggccgtcctcacccaacccaaaaaggtcagtggttgagtggcttttttgactatggatctttctcagagattatgcagccctgggcacagactgtggtggttggtagagccaggctaggaggaatacctgtgggagttgttgctgtagaaacccgaacagtagaactaagtatcccagctgatccagcaaacctggattctgaagccaagataatccagcaggctggccaggtttggttcccagattctgcgtttaagacatatcaggccatcaaggacttcaaccgggaagggctgcctctgatggtctttgccaactggagaggcttctctggtggaatgaaagatatgtacgaccaagtgctgaagtttggtgcttacattgtggatggcttgagggagtgctgccagcctgtgctggtttacattcctccccaggctgagctgcggggtggctcctgggtggtgattgactcctccatcaacccccggcacatggagatgtatgctgaccgagaaagcaggggatctgttctggagccagaagggacagtagaaatcaaattccgcagaaaggatctggtgaaaaccatgcgtcgggtggacccagtctacatccacttggctgagcgattggggaccccagagctaagcacagctgagcggaaggagttggagaacaagttgaaggagcgggaggaattcctaattcccatttaccatcaggtagccgtgcagtttgctgacttgcacgacacaccaggccggatgcaggagaagggtgttattagcgatatcctggattggaaaacatcccgtaccttcttctactggcggctgaggcgtcttctgctggaggacctggtcaagaagaaaatccacaatgccaaccctgagctgactgatggccagattcaagccatgttaaggcgctggtttgtggaagtggaaggaacagtgaaggcttatgtttgggacaataataaggatctggcggagtggctagagaaacagctgacagaggaggatggtgttcactcggtaatagaggaaaacatcaaatgcatcagcagagactacgtcctcaagcaaatccgcagcttggtccaggccaatccagaggttgccatggattccatcatccatatgacgcagcacatatcacccactcagcgagcagaagtcatacggatcctctccacaatggattccccttccacgtaggaagagcttcctgcctgtccctgccctgtctctggagaaaagggctagagctgccttttacaactg

SEQ ID NO: 317480 - DNA, 6807 bp, Artificial Sequence
  derived and/or modified sequence
atgagcggcctgcacctggtgaagcagggccgggaccggaagaagattgactcacaacgcgattttactgttgcttctcccgctgagttcgtcacgagatttggcggaaacaaagtcatcgaaaaggtcttgatcgcaaataatggcatcgcagccgtaaagtgtatgcgatccatccgtagatggtcatacgagatgttccgaaatgagagggcaattaggttcgtcgtaatggtcacccccgaggatctgaaagctaatgcagaatacataaaaatggcagaccattatgtaccagtgcctggcgggccaaacaataacaactacgcgaacgtggagcttatattagatatcgccaagcgcataccagtgcaagctgtctgggccggctggggccacgcttcagagaatcccaaactacccgagctgctacttaagaacggcatcgctttcatgggtccaccctctcaggcgatgtgggctctcggcgacaagatcgcatccagcattgtggcccagaccgcgggcatccctactctgccgtggagcggtagtggcctccgggtggattggcaggagaatgacttctcaaagagaattctgaacgtgccccaggagctatatgagaaagggtacgtgaaggacgttgacgacggactccaggcagcagaagaggtgggctacccagtaatgataaaggccagcgaaggagggggcggcaagggtattagaaaagtaaacaacgctgatgacttccccaatctgtttaggcaggtacaggcggaggttcccgggagccccatatttgtcatgcgactggccaagcagagccggcatctggaggttcagatcctagccgatcaatacggaaatgctatctccttgttcggccgcgattgtagcgttcagcgaaggcaccagaaaataattgaggaggccccagctactatcgccaccccagcggtctttgagcacatggagcaatgcgccgttaaactggccaagatggtgggatatgtctcagcaggcactgttgaatacctgtacagccaggacggcagcttctacttcttggagctgaacccgcgactgcaggtcgagcacccttgcactgagatggtggcggatgtgaacctacccgcggcacagctgcaaatcgcaatggggattccactgtatcggatcaaagacatcagaatgatgtacggagtcagcccctggggcgattcccccatcgatttcgaagattccgcacatgtgccatgcccaagggggcatgtcattgctgcacgcataactagcgaaaatccagacgagggtttcaagcctagtagcggcaccgtccaggagttgaattttaggtctaataaaaacgtgtggggctatttctccgtggccgctgccggaggcctgcatgagttcgcggattcccaattcggccactgtttcagctggggagagaatagagaagaagcgatcagcaatatggtagtcgctcttaaggaactgagtatacggggggatttcaggacaacggtcgaatacttgatcaagctgctggagaccgagagtttccagatgaacaggatagacaccggttggctggatcgcctaatcgccgaaaaggtccaggccgaaaggccagacacgatgcttggcgttgtgtgcggtgcactgcacgtggctgacgtatccttgagaaactctgtctctaactttcttcattctctggaacgcggccaagtgctgcccgcccatacattgctcaataccgtggacgtcgaattgatttatgagggcgtgaagtatgttcttaaggtgacccgccagagtccaaatagctacgtcgtgattatgaacggttcctgtgtcgaagtcgatgtgcaccgcctgtcagacgggggcttgcttctcagttacgacggcagctcctatacgacatacatgaaagaggaagtggatcgatacaggatcaccattggaaataaaacatgcgtgttcgaaaaggaaaacgatccttctgttatgagatcacccagcgccggtaagctgattcagtacatagtggaggacggaggccacgttttcgctgggcagtgctacgcagagatcgaagtcatgaagatggtgatgacgctgactgccgtcgagtccggatgcatccactacgtgaaaaggccgggagcagccctggatcccggatgcgtgctcgctaaaatgcaactggataacccttccaaagtgcagcaggctgagcttcatacgggctccctgccacgcatacagagcactgccctacggggcgaaaaattacaccgggtcttccactatgttttagacaacctggtgaatgttatgaatggatactgcctaccagatccatttttcagctccaaagtaaaggactgggtggaacggctcatgaaaacattaagagacccctctttgcccctactcgagttgcaagacataatgacttcagtgagcgggcgcattcctccgaatgttgagaagagcataaaaaaggaaatggctcagtacgcctccaatatcacctccgtgctgtgccagtttcccagccaacagatcgccaacattctcgattcccatgccgctacgttaaatcgcaaaagtgagagagaagtgttttttatgaatacccagagtatcgtccagttggtccagcggtaccggagcggtatccgcggccatatgaaggcagtggtaatggacttactgcgacaatacctcagggtggaaacccagtttcaaaacggccactacgataaatgtgtgtttgcactaagggaggaaaacaagtctgatatgaatacagttcttaattacatctttagccacgcccaagtgactaagaagaatctgctggttaccatgttaatcgaccagttgtgcgggagggatcctaccctgactgacgagttacttaacatcctgactgagctcactcagctctctaaaactaccaacgcgaaagttgcactcagagcaaggcaggtgcttattgcttcgcatctcccaagttatgagctcagacacaaccaggttgagtctattttcctgtccgccattgacatgtatggacaccaattctgcatagagaatcttcaaaaattgattttgtcagagacatcaatcttcgacgtgttgcccaatttcttctatcattccaaccaagtggtcagaatggcagctctggaagtctacgtgcggagggcttatatagcatacgaattgaacagtgtccaacaccgtcagctgaaagataacacatgcgtcgtggagtttcagttcatgctgcccactagtcatcccaacaggggtaacatacctaccctcaataggatgtcctttagttcgaacctgaaccactatggcatgacccacgtggctagcgtgtctgacgtacttctggacaactcttttacccctccatgtcaaagaatgggggggatggtgtctttccgcacctttgaagacttcgtcaggatctttgacgaagtcatgggctgcttttccgatagtcctcctcagtctccgacatttcccgaagccgggcacacaagcctttacgacgaagacaaagtgcctagggatgagcctatccacattttgaatgtcgccattaagactgactgcgacatcgaagatgaccgccttgctgctatgtttcgcgagttcacccagcagaataaagctactctggtcgaccacggtattaggaggctcacgttccttgtggcccagaaagatttcagaaaacaggttaactacgaggtggacaggcggttccatagggagtttcctaagttttttactttccgcgcgagggataaatttgaggaggatcggatctatcgtcaccttgagcccgcgctcgccttccagctggaacttaatcgtatgcggaattttgacctgactgcaataccatgtgccaaccacaagatgcatctgtatctgggcgcggctaaagtcgaagtggggacagaggttaccgattaccggttcttcgtcagggccataattaggcattctgatctggtcacaaaggaggcctccttcgagtatctgcagaatgagggcgagcgactacttctggaggccatggatgaactcgaagtcgcctttaataataccaacgtgcgcactgactgtaatcacatcttcttaaactttgttcccaccgttattatggatccgtctaagatcgaagaatctgtgaggtcaatggttatgcgttacgggtctcggctttggaaattaagagtgttgcaggcggagctgaagattaacattcgtctgacacctacaggtaaggctattccgattcgcctgttcctgacaaatgaatctgggtattacctggacatttctctgtacaaagaggttacagactcccgcactgcacagatcatgttccaagcttacggagacaagcaggggccgttacatgggatgctgattaatactccttacgtgaccaaggacctgctccagagcaagcggttccaggcacaatctctcggcacgacctatatctacgatattcctgaaatgtttagacagtcactgatcaaactgtgggagtctatgagtacgcaggctttcctcccgtcccctccacttccgagcgacatgctgacctatactgagctcgttctggacgaccagggccaactggtacatatgaatagactccctggtggaaacgaaatcgggatggtggcctggaagatgacgttcaagagcccagagtatcctgagggccgtgacatcatcgttatcggcaatgacatcacttaccggattggtagcttcgggccacaggaggacctcctatttttgagagcctctgagctggcaagggcagaaggcattcctagaatctacgtctcagcaaactcaggcgcacgaatcgggcttgcggaggagataagacacatgtttcatgtggcgtgggtggatcctgaagacccctataaaggatatcgttatctgtatctgactccacaggactacaaaagggtttcagccctgaacagtgtgcattgcgagcacgttgaagatgaaggagagagtcgatacaagattacagacattattggaaaagaggaaggaatcggtccggagaacctgcgcggctctggaatgattgcgggcgagtctagtcttgcctataatgaaatcatcacgatttccctcgtgacctgccgcgctatcggtatcggagcataccttgttaggctgggccagcgcactatccaagtggagaacagccatctcatcttgactggcgccggtgccttaaacaaggtcctgggaagagaggtgtatacctccaacaaccagctcgggggcattcagattatgcacaacaatggagtcacccactgtaccgtctgtgacgactttgagggagtctttaccgtcctgcactggctgagctacatgccaaagtctgttcactctagcgtgcccctcctcaactctaaagacccaatagatcgcattattgagtttgtaccaacgaagacgccatatgatcctcggtggatgttggcaggtagaccgcacccaactcagaaaggtcagtggctgagcggctttttcgactacgggagtttcagtgaaattatgcagccttgggcccagactgtcgtggtcgggcgagcgaggctcggcggaatccctgttggagttgtggccgtggagactagaacagtggaactatcaatccctgccgaccctgcgaacctggactccgaggcgaagatcatccaacaggccggtcaggtgtggtttcccgacagtgcctttaagacgtaccaagcaattaaagatttcaatcgcgaagggctccctttaatggtttttgctaactggcgcggcttttcaggagggatgaaagatatgtatgatcaggttctgaaattcggcgcgtacatagttgatggcctgagggagtgctgtcagccagtactggtttacatacccccccaggccgagctgaggggcggctcttgggttgtgattgacagctctatcaaccctagacatatggaaatgtacgcagatagggaatcaagaggttccgtgctggagccggagggcactgtggagatcaagttccgcaggaaggatttagttaagaccatgcgcagggttgatccagtgtacattcatctcgccgaacgtttgggaaccccagagttgtccaccgccgagagaaaggagctggagaacaagttgaaggagcgcgaagagttcctgatccccatataccaccaagttgccgtgcagttcgcagatcttcatgatacacccggccgtatgcaggaaaagggtgtcatctctgatatcctcgactggaaaaccagtaggacgttcttctattggcggcttaggagacttctgcttgaagatcttgtcaagaaaaaaattcacaatgctaatccggaactgactgatggtcaaattcaggccatgctccggcggtggtttgtcgaggtggagggaactgttaaggcatacgtctgggataataacaaagaccttgctgagtggctcgagaagcaactgacggaagaagacggtgtgcattctgtcattgaagagaatattaagtgcatctcacgcgattatgtgttgaaacagatacgatctctggtacaggcaaatccggaagtggccatggacagtatcattcacatgacacagcatatttcgcccactcaaagggccgaggtaattcggatcttgtctactatggacagcccgtctacctag

SEQ ID NO: 317481 - DNA, 1419 bp, Artificial Sequence
  derived and/or modified sequence
atgcacaacaacggcgtgacccactgcaccgtgtgcgacgacttcgagggcgtattcacagtgctccactggcttagctatatgcccaagagcgtacacagttccgtgcctctgcttaacagtaaagatccaatcgaccgcataattgagtttgtgccaactaaaacaccatacgatccccggtggatgctggccggtaggccccatcctacacagaaggggcaatggctttctggattctttgactacggatctttcagcgagatcatgcagccctgggctcaaacggttgtggtcgggcgggctaggctgggcgggatcccggtgggcgtcgtagcggtggaaaccaggaccgtggagctatcgatcccagctgacccggcaaatctcgactcggaggccaagattattcaacaggcgggacaggtttggttccccgattcagcattcaagacttaccaagccatcaaagactttaaccgggagggcttgccactcatggtattcgccaattggaggggctttagcgggggcatgaaagacatgtacgaccaggtactgaaatttggggcatacattgtggacgggcttcgagagtgctgtcagccagtgctcgtgtatatccctccccaggccgagctacgcggagggtcatgggtcgtcatagattcatctattaacccaaggcacatggagatgtacgccgacagagagtcccgaggatctgtgttagagcctgaggggacagtggagatcaagttccggagaaaagaccttgtgaaaacaatgcgcagagttgatccagtgtatatccacttggcagaaagactggggacccctgagctgagcactgccgaacgcaaggagctggagaataaacttaaggaacgagaagaattcttgattcccatctatcatcaagtagctgttcaattcgccgacctgcacgacactcccggccggatgcaagagaaaggcgtgattagtgacattctggactggaagaccagcagaaccttcttttactggaggttgcgccggttgctcctggaggacctggtgaaaaagaaaattcacaacgccaatcctgagctaacggacggacagatccaggctatgctgcggcggtggtttgtggaagtggaagggaccgttaaagcatatgtctgggacaacaacaaggacctagccgagtggcttgaaaagcagctgacagaagaggatggcgtgcactcagtgatagaggagaatatcaaatgcattagtagggattacgtcctcaaacagatccgctcattggtacaggcaaatcctgaggtggccatggactctatcatacatatgacacaacatatttcccccactcaaagggcagaagtgattcgtatattgagcacaatggactcccctagcacctag

SEQ ID NO: 317482 - DNA, 3138 bp, Artificial Sequence
  derived and/or modified sequence
atgggctgcttcagcgacagccccccccagagccccaccttccccgaggcgggccacacttctctgtacgatgaagacaaggttcctagggacgaacccattcacattttgaatgttgctataaaaacagattgtgacatagaggatgaccgcctcgctgctatgttcagagagtttacccagcagaacaaagcaaccctggtcgatcatggcattcgaagactgacctttctggtcgcccaaaaagattttagaaagcaggttaactacgaagtggacaggaggttccatagggagttccctaagttctttacatttcgcgcccgggataaatttgaggaagaccgaatatatcgacatcttgaacctgctttggcctttcagttggagctgaacagaatgcggaatttcgatctaaccgccataccttgcgctaatcataagatgcacctatacctcggcgccgctaaggttgaagtgggcaccgaggttacagattaccgcttcttcgtgcgggccatcatcagacacagcgatctcgttacgaaggaggcttcattcgagtacctgcagaatgaaggcgagcggctacttctcgaagccatggatgagctggaagtagcctttaacaacactaacgtccggactgactgcaaccacattttcttaaacttcgtaccaacagtgattatggacccttctaaaattgaggaatctgtgcgttcaatggtgatgcgctatggctcgaggctttggaagctgagggtgttgcaagctgaactgaagattaacatccgccttactccaactggcaaggctatccctatccgactcttcttgactaacgaatcaggctattaccttgacatttccctgtacaaggaagtgaccgacagccgcacagcccagatcatgtttcaggcttacggggataagcagggcccgctccatggtatgctgatcaatacaccctatgtcaccaaggatctgttacagtccaagaggttccaggcacaaagcttgggaactacctatatatacgacatcccagaaatgttcaggcagatcggaatggtggcctggaaaatgacctttaaaagcccagaataccctgaagggagagacattatagtcatcggcaatgatatcacataccggataggctcatttggaccacaggaggacctcctgttcctgcgcgcgtctgaattggcccgggctgagggaataccccgcatctacgtctctgctaactcaggggcccgcattggcctggcggaggaaataagacatatgttccacgtggcttgggtcgaccctgaagatccctataagggataccggtacctttatctgactccacaggactacaaaagagtgtccgccttaaatagcgtgcattgtgagcacgtggaagatgagggcgagtctagatataagataacggacatcatcggaaaggaggagggcataggacctgagaatttgcgtggttcaggcatgattgccggagaaagctcacttgcttataatgagataatcacgatctcgcttgtgacttgcagagccatcgggattggagcctacctcgtaagacttggtcaacgtacaatacaggttgaaaactctcatcttatcctcactggtgcaggagcacttaacaaggtcctcggaagggaggtttacaccagtaataaccagttgggtggaattcagattatgcacaataatggcgtgacccactgcactgtctgtgacgacttcgagggggtctttaccgtcctacactggctgtcttacatgcctaaatccgttcacagcagcgtgcctctgctgaactctaaagaccctatagaccgcattatcgagtttgtacctactaagaccccctatgatccacggtggatgcttgctggccgccctcaccctacacagaaaggccagtggctgtcaggatttttcgactacgggagcttcagcgaaatcatgcagccgtgggctcagacagtcgttgttggccgcgcgaggctgggaggcatccccgtgggcgtggtggctgttgaaacaagaactgtcgaattgtcgatcccggcagatccagccaatcttgactcggaagcgaagattatccaacaggctggccaagtttggttccctgactccgctttcaagacatatcaagccataaaagactttaaccgggagggtttgcccctcatggtgtttgctaattggaggggattttcaggtggcatgaaagacatgtacgatcaggttttgaaattcggagcatatattgtggatggactacgggaatgctgtcagccagtcttggtgtatattcctcctcaggccgaactgaggggcgggtcctgggtcgtgatcgattcctcaataaacccccgccatatggaaatgtatgccgacagagaatcacgtggcagcgtcctcgagcccgagggcacagtggagattaaattcaggcgcaaggatctggtcaaaacgatgcgaagagttgaccccgtatatatacatctggctgaacggctgggcacgcccgagctgtccaccgctgaacggaaggagttggaaaacaaattgaaggaaagggaagagtttttgataccaatttatcaccaggttgccgtgcagttcgctgatttacacgacacaccagggcgaatgcaggagaagggggttatcagtgatatccttgactggaagacaagtagaacattcttttattggcggctgcggcggctcctcttggaggatttggtgaagaagaaaatccacaacgcgaatcccgaactgaccgacggccagatccaagcaatgctgagacgctggtttgtggaggtggaaggcaccgttaaggcttacgtctgggataacaataaggacctggcagagtggctggagaagcagttgacagaggaagacggtgtgcattctgtgatcgaagagaacataaagtgtatctcccgcgattatgtgttaaaacaaatccggagcctcgtccaagctaatccagaagtggccatggacagcataatccatatgacccagcacatcagcccaacgcagagagctgaggtgatcaggattctgagtacaatggactcacccagtacatag

SEQ ID NO: 317483 - DNA, 777 bp, Artificial Sequence
  derived and/or modified sequence
atgagcggcctgcacctggtgaagcagggccgggaccggaagaagattgactctcagcgcgactttaccgtggcctcccctgcggaattcgtgactagattcgggggtaacaaggtgatagagaaagtgctcatagctaacaacggtattgccgccgttaaatgcatgagaagtataagaaggtggtcttatgaaatgttccgaaacgaaagagccattcgcttcgtggtgatggtaacaccagaggatctgaaagccaacgccgaatatatcaaaatggcagatcactatgttcctgtgccaggcggaccgaataacaacaactatgctaacgtagagctgatcctcgacatagcaaagcgaatacctgtgcaagcagtgtgggccgggtggggtcacgctagcgaaaaccctaaactgccagaacttcttttaaaaaatggcatcgccttcatgggacccccttctcaggcaatgtgggccttgggagacaaaatcgcctctagcatcgtcgcccagaccgccgggatccccacactaccatggagcggttctggtctgcgggtggactggcaagagaacgattttagcaagagaatccttaacgtgcctcaagaactgtacgaaaagggctatgtcaaggatgtcgacgacggcctccaggctgccgaagaggtcggttacccggtgatgattaaagcttctgaaggtggaggtggtaaaggcattcgcaaagtgaataacgcagacgatttccccaacctgtttaggcaatag

SEQ ID NO: 317484 - DNA, 6806 bp, Artificial Sequence
  derived and/or modified sequence
atgagtgggttgcacctggtaaaacagggacgcgacaggaaaaagatagatagccaaagagattttacagttgcctctcctgcagagttcgtgactcgctttgggggtaacaaagtgattgagaaagtgctcattgctaacaatggcatagccgctgttaagtgcatgcgctcaatcaggagatggagttatgagatgttcagaaacgagagggcaatccgcttcgtcgttatggtgacgcccgaagacctgaaagccaacgccgagtacatcaaaatggctgatcactacgttcccgtgcctggcggacccaataataacaattacgctaacgtcgagctcatactcgatatcgccaaacggatccccgtgcaagccgtctgggccggttggggccacgcgtccgaaaatcccaagttgccggaactcctgctcaaaaacggcatcgccttcatggggcctccttctcaggccatgtgggccctgggagacaagatcgcatcctccatcgtcgcccaaactgcaggcattcctaccctcccttggagcgggtctgggctccgagtggattggcaagaaaatgacttcagcaagagaatcttgaatgtacctcaggaattgtacgagaagggatatgtgaaggatgtggatgatggtctgcaagctgcagaggaagtcggctatccagtgatgatcaaagctagcgaggggggaggagggaaaggcatacggaaggttaataacgccgacgacttccccaacctctttagacaggtccaggcggaagtgcctggtagccctatattcgtgatgagactggctaaacagagccgacatctggaggtccagatcctggcggaccagtatggcaacgccatcagtctgttcggacgggactgctccgtccagcggagacaccagaagattattgaggaggctcccgcaaccattgctacacccgctgtatttgaacacatggaacaatgcgctgtgaaactcgctaagatggtgggctacgtgtctgccggtacggtggagtacctgtactcgcaggatggatctttttattttcttgagctgaaccccaggctgcaggtcgaacacccctgtaccgagatggtggccgacgtgaacctccccgcagcccagctccagatagctatgggcattcccctgtaccggattaaggacatcagaatgatgtacggagtgtctccatggggtgattcccccattgattttgaggactctgcccacgtgccttgcccgagaggccatgttatcgccgcaaggatcaccagcgagaatcctgatgagggtttcaagccgtcttcaggtaccgtacaggaattaaatttcaggtccaacaaaaacgtgtgggggtatttctctgtggccgctgcaggcggattgcatgaatttgctgatagtcagttcggacattgcttctcatggggcgagaatcgggaggaggccatttccaatatggtggtggcgttaaaggaattgagtatccgaggggacttcaggacaaccgtggaatatttaatcaagttgttggagacagaatcctttcagatgaatagaattgatactggttggttagataggctgattgccgagaaagtgcaagctgagcgaccagacaccatgctcggtgtcgtctgcggagcactgcatgttgccgatgtgagtctgaggaatagtgtgagcaatttcctgcacagcctggagcggggtcaagtacttcctgcgcatactctgctgaacaccgtggatgttgagctaatctacgaaggcgtgaaatacgtgctcaaagtgaccaggcagagccccaactcatacgtcgtgattatgaacggcagttgcgtggaggttgacgttcacagactgtccgacggcggtcttttgctctcctatgatggcagtagctatacgacatacatgaaggaggaggtcgacaggtaccgtataacaattggcaacaaaacatgtgtttttgagaaggagaatgaccccagtgtgatgcggtccccgagtgccggaaaactcattcagtacatagtcgaagacggaggacacgtgttcgctgggcaatgttatgccgaaatagaagtgatgaagatggtgatgaccttgaccgctgtcgaaagtgggtgcatacattatgtgaagagaccaggtgcagcccttgatcctggatgtgtgctggctaagatgcagctcgacaacccaagtaaagtgcaacaagcagaacttcacactggttccctgcccagaatccagagcaccgcactccgcggagaaaaactgcatcgcgtctttcactatgtactggacaacctggtgaatgtaatgaatgggtattgcctgcctgatccttttttctcttctaaggtgaaggactgggtcgagagattgatgaagacactgcgagatccctctctgcccttactggaacttcaagacattatgacctcagtgtcaggccgaattcctccaaatgtggaaaaaagcatcaagaaagagatggcccagtatgcatccaatataaccagcgtactctgtcagtttcctagccaacagatagcaaacattctggactctcacgctgccaccctgaatcgcaagtctgaaagggaagtgttcttcatgaatacgcagtcgatcgttcagctcgtacagaggtaccgaagtggaatcagaggacacatgaaagccgtggtgatggatcttctaaggcagtacctcagggttgagacacaatttcagaatggacactacgataaatgcgtgttcgctctgcgggaggagaacaagtcagacatgaacacagtcctcaattatattttcagccacgcccaggtgacaaagaagaatcttctcgtcaccatgttgattgaccagctgtgcggcagagatccaacactgacagatgagctcctgaacattctcacggaattgacacagctgtcaaaaactaccaatgccaaggtagcccttagagccaggcaggtcctgattgccagtcatcttccctcttacgagctccgtcacaaccaggtggaaagtatctttctgtctgcaattgatatgtacgggcatcaattttgcatcgagaacctccagaagctgattctaagtgagactagcatttttgatgtgcttcccaactttttctatcacagcaaccaggtagtccgcatggctgcgttggaagtgtatgtccggcgagcatacatcgcctacgaattgaattcagtccagcacaggcagctgaaggacaacacttgtgttgtggagttccagtttatgttacctacgagtcatcctaatcggggtaacatcccgacgctgaaccgtatgtctttttcctcgaatctcaaccactacgggatgacccatgtcgccagcgtaagcgatgtgctgctagataactcatttacacctccctgtcagcgaatgggaggaatggtgtctttccgtacattcgaggacttcgtgagaatcttcgacgaggtaatggggtgcttttccgacagtccgcctcagagcccaacctttcccgaagcaggtcatactagcctctacgatgaggataaagtgcccagagacgaacccatccatatcctaaatgttgccattaaaaccgactgtgacatcgaggacgatagattggctgcaatgttccgggagttcacccagcagaataaagccacattggtggaccatggtatcagacggctcacatttctagtcgctcagaaggattttcggaaacaagtgaactatgaggtggaccgaaggttccatcgagagttccctaaattctttaccttccgggctagggacaagtttgaggaggacagaatttacagacatctggagcccgcactggcctttcagttggaacttaatcgtatgagaaatttcgacctgactgccatcccttgtgccaatcacaaaatgcacctctacctgggcgctgctaaagttgaagtgggtacagaagtgactgactatagatttttcgttcgcgcaataattagacactctgacctcgtgacaaaagaggctagtttcgagtacttacaaaatgagggggagaggctgttgcttgaggcaatggacgaactcgaagtggccttcaataacaccaatgtacggactgactgcaatcacatcttcctaaatttcgtccctaccgtaatcatggacccctccaaaattgaggagtcagtccggtcgatggtcatgaggtatggctcacggctgtggaagctcagagtgcttcaggccgagctgaaaatcaacattagactgacaccaacaggcaaggctattcctattcggctgttcttgaccaacgagtccggctactatctagacatatccctttacaaagaggtgactgactctcggactgctcagatcatgttccaggcatacggggacaagcaggggcctctgcatgggatgttgattaacactccttatgtcaccaaggacctgcttcagtctaaaagatttcaggcccagtccctaggcacaacctatatatacgacatccctgagatgtttaggcagtcccttattaaactttgggagagtatgagcacacaggccttcttgccatccccgcctttaccaagcgacatgctcacatatactgagctggtcctggacgatcagggccagttagtgcatatgaacagactacccggaggcaacgaaattggaatggtcgcctggaagatgacattcaaatctccagagtatccagagggcagggacatcattgtgataggtaatgatatcacctaccgcattggatcctttgggcctcaagaagacttactgttcctccgcgcatctgaactggcacgcgctgaggggatcccaaggatatacgtcagtgctaattctggtgccaggatcggcctggctgaggagatcaggcacatgtttcacgtcgcttgggtggaccccgaggacccctataagggataccgatatttatacctcacaccacaggactataaaagagtttctgcactaaactctgttcactgtgagcacgtcgaggacgagggagagtctcgatataaaatcacagacattatcggaaaggaggagggaataggacccgaaaacctcaggggctccggcatgatagcaggcgagtccagtctagcttataatgaaatcatcacaatttctcttgtgacatgcagagctatcggcattggggcatacctggtgcggctgggacaaagaactatccaagtggagaactctcaccttatcctgaccggggcaggagccctgaataaggtgctgggcagggaggtatataccagcaataaccagctcgggggaatccagattatgcacaacaacggagtcacacactgtacggtgtgtgatgattttgaaggggtgttcacagtgctccattggctgtcctatatgcccaaatccgtgcactcgagcgttccgctgctgaactcgaaggacccaattgatcggattatcgaatttgtgcccactaaaactccgtatgaccccagatggatgctcgcaggcagaccccaccctacccagaaggggcagtggttatctggcttcttcgactacggttccttctccgaaatcatgcagccctgggcccagaccgtggtggtcggacgggcaaggttgggcggaatccctgttggcgtcgtggccgtggagactcggactgtcgaattgtccatcccagcagatcccgctaatctggactccgaggctaagatcatacagcaggctgggcaggtgtggtttccggattcagcctttaaaacctatcaggccatcaaagactttaatagagagggccttccactaatggtctttgccaactggcggggtttcagtggtggcatgaaggacatgtacgaccaggtcctcaaatttggggcttacattgtcgatgggctgcgggagtgctgtcagcccgtcctcgtttacatacctccacaagcggagttaagggggggtagttgggtcgtcatcgactcatcaattaatcctagacatatggaaatgtatgccgacagggaatctcggggatcagtcctggagccagaaggcacagtagaaatcaaattccggaggaaggacttggttaagacaatgcggagagtggaccctgtctatatacatttggccgaaaggctggggacacctgaactgtccaccgccgaacggaaggaattggagaataagctgaaggagcgcgaagagttcctcattcctatatatcaccaagtcgctgtgcaattcgcagatctccacgatacccccggacgaatgcaggaaaagggcgtcatctctgacattctagactggaaaacatctcgcacattcttttactggaggcttcgcaggttgctgctcgaagacttggtgaagaagaaaatccacaatgcaaatcccgagctaacagatggacagatccaagccatgctacgccgttggtttgtggaagtggaagggaccgtaaaggcatacgtgtgggacaataataaagacttagccgaatggctggaaaagcagctgaccgaagaggacggcgtccattccgtgattgaggaaaacatcaagtgtatttctagagactatgttctcaaacagatcaggtccttggtccaagctaatcctgaagtggctatggacagtatcatccacatgacacagcatatctcgccaacgcagagagctgaggtgattagaatcctctccactatggattctcctagtactta

SEQ ID NO: 317485 - DNA, 1419 bp, Artificial Sequence
  derived and/or modified sequence
atgcacaataacggtgtgactcactgtaccgtgtgtgatgatttcgagggggtgttcaccgtcctccactggctgtcttatatgcccaaatcggtgcactccagcgtgcctctcctgaatagcaaggaccctattgatcgtataatcgagttcgtgcccacaaaaaccccatatgaccccaggtggatgttagctggtcgcccacaccccacccagaaaggtcagtggctcagcgggtttttcgattacggatcctttagtgaaataatgcagccctgggctcaaacagtggttgtaggacgggcaaggttaggcggaattccggtgggtgtcgttgcagtcgaaacaagaacagttgaactgagcattccagccgatccagcgaatctggatagcgaggccaagatcattcagcaggccggtcaggtctggtttcccgatagtgcttttaaaacatatcaggccataaaggacttcaatagagaaggtctcccactgatggttttcgcaaattggcggggatttagcgggggaatgaaggacatgtatgatcaggtgctcaagttcggcgcttacatcgtggacggtctcagagagtgttgtcagcctgtgttggtttacataccacctcaggccgaactgaggggcggtagctgggttgtgattgattcttcaatcaatcccaggcacatggaaatgtacgccgatcgcgagtcccgaggatctgtgctggagccagagggtaccgttgaaattaaatttcgtcgtaaggacttagtcaaaaccatgcggagagtggacccagtgtatatccatttagcagagcgcctgggaacacctgagctcagtaccgctgagcgaaaggaactggagaacaaactcaaagaacgagaggaatttctcattccaatctatcaccaagtggcagtccagtttgcggatctgcatgacactcccggtcggatgcaagaaaaaggcgtgatctctgacatccttgactggaagacaagccggacttttttttactggcggctccgcaggctgttgttagaagacctggttaaaaagaagatccataacgcgaatcctgagctgactgatgggcagatccaagccatgctccggcgatggtttgttgaagtggaaggaacagtcaaagcctacgtgtgggataataacaaagacctagctgagtggctggaaaaacaactgaccgaggaggatggggtgcattctgtgatcgaggaaaatattaagtgcatctccagggattatgttttaaagcaaatcaggtcgctggtgcaagcgaaccctgaagtggcaatggattccattatacacatgacacaacacattagcccaactcagagagctgaggtgattcggatcttaagcactatggattccccatccacctag

SEQ ID NO: 317486 - DNA, 3138 bp, Artificial Sequence
  derived and/or modified sequence
atgggctgttttagcgacagtccaccacagtctcccacattccccgaggcgggacacacgagtctgtatgacgaggacaaagtccccagggacgaaccaatccatattttaaatgtagctattaagaccgattgtgatattgaagatgatcgactggccgcaatgttccgcgaattcacccaacagaacaaggcaaccctcgttgatcatggaatccggagactgacctttcttgttgctcagaaggatttcagaaaacaagtcaactacgaggtcgatcggagattccatagggagttcccgaaattctttactttccgggctcgcgacaagtttgaagaggacaggatctatcggcatctggagcctgcccttgctttccagctggagctgaacaggatgaggaattttgatctgaccgccataccatgtgcaaaccataaaatgcacctatatctcggtgcggcaaaagtcgaagttggaactgaggtgacagattatagattttttgttcgggcaattatcagacattcagatctggtgactaaagaggcgagctttgaatatttgcagaatgagggggagcgattacttcttgaggcaatggatgagctggaggtggctttcaataatactaatgttcggactgactgcaatcacatctttctcaactttgtgcccacggtgatcatggatccatcaaaaatcgaggagtctgtaagatctatggtgatgcggtatggatcacgtttgtggaaattgcgtgtcctccaggctgagctgaagatcaatattcggctcacccctaccgggaaggctataccaatacggcttttcttgacgaacgagtccggctactatctcgacatcagtctatacaaagaagttacagacagccgcacagctcagattatgtttcaggcttacggagataagcaaggacccttgcacggcatgctcattaatactccttacgttactaaggatcttctacagtccaagcgttttcaggcccagagccttggcactacttatatttacgacatacctgagatgtttaggcagattggaatggtggcctggaagatgaccttcaagtccccagagtacccggaaggaagagatataatagtcataggtaacgatataacatacagaatagggtcatttggccctcaggaggacctcctctttctgcgggctagtgaattggctagagccgaagggatacctcgcatctacgtcagcgcaaatagtggcgcaaggatcggccttgccgaggaaataaggcatatgttccatgtagcttgggtcgatcccgaagacccatataaaggatataggtatctatacctgactccccaagactacaagcgggtctccgctctgaatagtgtccattgcgagcacgtggaggatgaaggcgaaagtaggtacaagattacagatatcattggtaaagaagagggaatcggccctgagaaccttcgtggcagtggaatgattgccggagagtcatcattggcatacaatgagatcattactatttcattagtaacctgtcgcgcaatcggcatcggagcctatctggtgagattggggcagcgaacaatacaggtcgaaaactcgcatctgattctgactggggcaggcgctctaaacaaagttctgggcagagaggtgtacacttcaaacaaccaactaggaggaatacagataatgcacaataacggtgtcacccattgcaccgtctgcgacgatttcgaaggcgttttcaccgtgcttcattggctgagttacatgcccaagtctgtgcattctagcgtgccccttctgaattcaaaagaccccattgaccggattattgagtttgtcccaaccaagaccccgtacgatccaaggtggatgttggctggcagaccgcaccccacccagaaggggcagtggctcagcggattttttgactatgggagcttcagtgaaatcatgcagccatgggctcagactgtggtagttggacgcgctaggttggggggtatccccgttggggtggtggccgtggaaacgaggactgtggagctgtccattcctgcagaccctgccaacctcgattcagaagctaaaatcattcaacaggcaggtcaagtgtggtttcctgactcagcttttaaaacctatcaggcaattaaggatttcaatagggagggacttccgctgatggtgtttgcaaattggcgcggttttagtggcggaatgaaggacatgtacgaccaggtgttaaagtttggggcatacattgtggatggcctcagggagtgttgccagcccgtgttggtctacatccccccacaagccgagctgagaggtggctcatgggtcgtcattgacagtagtatcaatccacgccatatggagatgtatgccgatcgtgagtctcggggatccgtcctagagcccgaggggacagtagaaatcaaatttcgcagaaaagacctggtcaagacaatgcgcagagtcgaccccgtctacatccatctggctgaaagactcgggacccccgagcttagcacggctgagagaaaagaactggagaacaagctgaaggagagagaggagttcctgattcctatataccaccaggtagccgtgcagtttgctgacctgcatgatacacccggaagaatgcaggaaaaaggagtcataagcgacatactagattggaagacttccagaacctttttctactggagactccggagactgttgctggaagatctcgtgaaaaagaagattcacaatgctaatcccgagttgacagacggtcaaatccaggcgatgctgagacgatggttcgtcgaagttgaaggcacagtcaaagcttatgtctgggacaacaacaaagacctggccgaatggctggagaaacagcttacagaagaggacggggtgcattctgtgatcgaagagaacataaagtgcatatcgcgcgactacgtactgaaacagatcaggtcactggtccaggccaaccccgaggtcgcgatggatagcataattcacatgacacaacacatttcccctacccagcgtgctgaagtcatccgcattctctcaacaatggactcccctagtacctag

SEQ ID NO: 317487 - DNA, 777 bp, Artificial Sequence
  derived and/or modified sequence
atgtctggtcttcaccttgtgaagcagggtagggatcgtaaaaaaatcgattctcaaagggacttcacagtggcatcccctgctgagttcgtcacacgttttggcggaaacaaggtcattgagaaggtgttgatcgcaaacaacggcatcgctgccgttaagtgtatgaggagcattagaagatggagctatgagatgtttcgaaatgagcgcgcaatcaggtttgtagtgatggtgacccctgaggatctcaaagccaatgccgaatacattaagatggcagaccattacgtgcctgtgcctggtggcccaaataacaacaattacgccaatgttgagcttatactcgatatcgccaagcggatcccagtgcaagccgtgtgggccggttgggggcacgcctcagaaaatcccaagttgccagagttactgctcaagaatggaattgccttcatgggtcccccatcacaggccatgtgggcgttgggcgataagattgcttcttcaatagtcgctcaaactgctggcattcccaccttgccgtggagtggaagtggactgagggtcgactggcaggaaaacgatttctccaagcgcatattgaacgttcctcaggagttatatgagaaaggttacgtgaaagacgtagacgacggtttgcaagccgcagaagaggtgggttaccctgtaatgattaaagcctcagaaggaggtggaggtaaagggatccgcaaagtaaacaacgccgatgatttccccaacctgttcaggcagtag

SEQ ID NO: 317488 - DNA, 6807 bp, Artificial Sequence
  derived and/or modified sequence
atgagcggcctgcacctggtgaagcagggcagagacagaaagaagatcgacagccagagagacttcaccgtggccagccccgccgagttcgtgaccagattcggcggcaacaaggtgatcgagaaggtgctgatcgccaacaacggcatcgccgccgtgaagtgcatgagaagcatcagaagatggagctacgagatgttcagaaacgagagagccatcagattcgtggtgatggtgacccccgaggacctgaaggccaacgccgagtacatcaagatggccgaccactacgtgcccgtgcccggcggccccaacaacaacaactacgccaacgtggagctgatcctggacatcgccaagagaatccccgtgcaggccgtgtgggccggctggggccacgccagcgagaaccccaagctgcccgagctgctgctgaagaacggcatcgccttcatgggcccccccagccaggccatgtgggccctgggcgacaagatcgccagcagcatcgtggcccagaccgccggcatccccaccctgccctggagcggcagcggcctgagagtggactggcaggagaacgacttcagcaagagaatcctgaacgtgccccaggagctgtacgagaagggctacgtgaaggacgtggacgacggcctgcaggccgccgaggaggtgggctaccccgtgatgatcaaggccagcgagggcggcggcggcaagggcatcagaaaggtgaacaacgccgacgacttccccaacctgttcagacaggtgcaggccgaggtgcccggcagccccatcttcgtgatgagactggccaagcagagcagacacctggaggtgcagatcctggccgaccagtacggcaacgccatcagcctgttcggcagagactgcagcgtgcagagaagacaccagaagatcatcgaggaggcccccgccaccatcgccacccccgccgtgttcgagcacatggagcagtgcgccgtgaagctggccaagatggtgggctacgtgagcgccggcaccgtggagtacctgtacagccaggacggcagcttctacttcctggagctgaaccccagactgcaggtggagcacccctgcaccgagatggtggccgacgtgaacctgcccgccgcccagctgcagatcgccatgggcatccccctgtacagaatcaaggacatcagaatgatgtacggcgtgagcccctggggcgacagccccatcgacttcgaggacagcgcccacgtgccctgccccagaggccacgtgatcgccgccagaatcaccagcgagaaccccgacgagggcttcaagcccagcagcggcaccgtgcaggagctgaacttcagaagcaacaagaacgtgtggggctacttcagcgtggccgccgccggcggcctgcacgagttcgccgacagccagttcggccactgcttcagctggggcgagaacagagaggaggccatcagcaacatggtggtggccctgaaggagctgagcatcagaggcgacttcagaaccaccgtggagtacctgatcaagctgctggagaccgagagcttccagatgaacagaatcgacaccggctggctggacagactgatcgccgagaaggtgcaggccgagagacccgacaccatgctgggcgtggtgtgcggcgccctgcacgtggccgacgtgagcctgagaaacagcgtgagcaacttcctgcacagcctggagagaggccaggtgctgcccgcccacaccctgctgaacaccgtggacgtggagctgatctacgagggcgtgaagtacgtgctgaaggtgaccagacagagccccaacagctacgtggtgatcatgaacggcagctgcgtggaggtggacgtgcacagactgagcgacggcggcctgctgctgagctacgacggcagcagctacaccacctacatgaaggaggaggtggacagatacagaatcaccatcggcaacaagacctgcgtgttcgagaaggagaacgaccccagcgtgatgagaagccccagcgccggcaagctgatccagtacatcgtggaggacggcggccacgtgttcgccggccagtgctacgccgagatcgaggtgatgaagatggtgatgaccctgaccgccgtggagagcggctgcatccactacgtgaagagacccggcgccgccctggaccccggctgcgtgctggccaagatgcagctggacaaccccagcaaggtgcagcaggccgagctgcacaccggcagcctgcccagaatccagagcaccgccctgagaggcgagaagctgcacagagtgttccactacgtgctggacaacctggtgaacgtgatgaacggctactgcctgcccgaccccttcttcagcagcaaggtgaaggactgggtggagagactgatgaagaccctgagagaccccagcctgcccctgctggagctgcaggacatcatgaccagcgtgagcggcagaatcccccccaacgtggagaagagcatcaagaaggagatggcccagtacgccagcaacatcaccagcgtgctgtgccagttccccagccagcagatcgccaacatcctggacagccacgccgccaccctgaacagaaagagcgagagagaggtgttcttcatgaacacccagagcatcgtgcagctggtgcagagatacagaagcggcatcagaggccacatgaaggccgtggtgatggacctgctgagacagtacctgagagtggagacccagttccagaacggccactacgacaagtgcgtgttcgccctgagagaggagaacaagagcgacatgaacaccgtgctgaactacatcttcagccacgcccaggtgaccaagaagaacctgctggtgaccatgctgatcgaccagctgtgcggcagagaccccaccctgaccgacgagctgctgaacatcctgaccgagctgacccagctgagcaagaccaccaacgccaaggtggccctgagagccagacaggtgctgatcgccagccacctgcccagctacgagctgagacacaaccaggtggagagcatcttcctgagcgccatcgacatgtacggccaccagttctgcatcgagaacctgcagaagctgatcctgagcgagaccagcatcttcgacgtgctgcccaacttcttctaccacagcaaccaggtggtgagaatggccgccctggaggtgtacgtgagaagagcctacatcgcctacgagctgaacagcgtgcagcacagacagctgaaggacaacacctgcgtggtggagttccagttcatgctgcccaccagccaccccaacagaggcaacatccccaccctgaacagaatgagcttcagcagcaacctgaaccactacggcatgacccacgtggccagcgtgagcgacgtgctgctggacaacagcttcacccccccctgccagagaatgggcggcatggtgagcttcagaaccttcgaggacttcgtgagaatcttcgacgaggtgatgggctgcttcagcgacagccccccccagagccccaccttccccgaggccggccacaccagcctgtacgacgaggacaaggtgcccagagacgagcccatccacatcctgaacgtggccatcaagaccgactgcgacatcgaggacgacagactggccgccatgttcagagagttcacccagcagaacaaggccaccctggtggaccacggcatcagaagactgaccttcctggtggcccagaaggacttcagaaagcaggtgaactacgaggtggacagaagattccacagagagttccccaagttcttcaccttcagagccagagacaagttcgaggaggacagaatctacagacacctggagcccgccctggccttccagctggagctgaacagaatgagaaacttcgacctgaccgccatcccctgcgccaaccacaagatgcacctgtacctgggcgccgccaaggtggaggtgggcaccgaggtgaccgactacagattcttcgtgagagccatcatcagacacagcgacctggtgaccaaggaggccagcttcgagtacctgcagaacgagggcgagagactgctgctggaggccatggacgagctggaggtggccttcaacaacaccaacgtgagaaccgactgcaaccacatcttcctgaacttcgtgcccaccgtgatcatggaccccagcaagatcgaggagagcgtgagaagcatggtgatgagatacggcagcagactgtggaagctgagagtgctgcaggccgagctgaagatcaacatcagactgacccccaccggcaaggccatccccatcagactgttcctgaccaacgagagcggctactacctggacatcagcctgtacaaggaggtgaccgacagcagaaccgcccagatcatgttccaggcctacggcgacaagcagggccccctgcacggcatgctgatcaacaccccctacgtgaccaaggacctgctgcagagcaagagattccaggcccagagcctgggcaccacctacatctacgacatccccgagatgttcagacagagcctgatcaagctgtgggagagcatgagcacccaggccttcctgcccagcccccccctgcccagcgacatgctgacctacaccgagctggtgctggacgaccagggccagctggtgcacatgaacagactgcccggcggcaacgagatcggcatggtggcctggaagatgaccttcaagagccccgagtaccccgagggcagagacatcatcgtgatcggcaacgacatcacctacagaatcggcagcttcggcccccaggaggacctgctgttcctgagagccagcgagctggccagagccgagggcatccccagaatctacgtgagcgccaacagcggcgccagaatcggcctggccgaggagatcagacacatgttccacgtggcctgggtggaccccgaggacccctacaagggctacagatacctgtacctgaccccccaggactacaagagagtgagcgccctgaacagcgtgcactgcgagcacgtggaggacgagggcgagagcagatacaagatcaccgacatcatcggcaaggaggagggcatcggccccgagaacctgagaggcagcggcatgatcgccggcgagagcagcctggcctacaacgagatcatcaccatcagcctggtgacctgcagagccatcggcatcggcgcctacctggtgagactgggccagagaaccatccaggtggagaacagccacctgatcctgaccggcgccggcgccctgaacaaggtgctgggcagagaggtgtacaccagcaacaaccagctgggcggcatccagatcatgcacaacaacggcgtgacccactgcaccgtgtgcgacgacttcgagggcgtgttcaccgtgctgcactggctgagctacatgcccaagagcgtgcacagcagcgtgcccctgctgaacagcaaggaccccatcgacagaatcatcgagttcgtgcccaccaagaccccctacgaccccagatggatgctggccggcagaccccaccccacccagaagggccagtggctgagcggcttcttcgactacggcagcttcagcgagatcatgcagccctgggcccagaccgtggtggtgggcagagccagactgggcggcatccccgtgggcgtggtggccgtggagaccagaaccgtggagctgagcatccccgccgaccccgccaacctggacagcgaggccaagatcatccagcaggccggccaggtgtggttccccgacagcgccttcaagacctaccaggccatcaaggacttcaacagagagggcctgcccctgatggtgttcgccaactggagaggcttcagcggcggcatgaaggacatgtacgaccaggtgctgaagttcggcgcctacatcgtggacggcctgagagagtgctgccagcccgtgctggtgtacatccccccccaggccgagctgagaggcggcagctgggtggtgatcgacagcagcatcaaccccagacacatggagatgtacgccgacagagagagcagaggcagcgtgctggagcccgagggcaccgtggagatcaagttcagaagaaaggacctggtgaagaccatgagaagagtggaccccgtgtacatccacctggccgagagactgggcacccccgagctgagcaccgccgagagaaaggagctggagaacaagctgaaggagagagaggagttcctgatccccatctaccaccaggtggccgtgcagttcgccgacctgcacgacacccccggcagaatgcaggagaagggcgtgatcagcgacatcctggactggaagaccagcagaaccttcttctactggagactgagaagactgctgctggaggacctggtgaagaagaagatccacaacgccaaccccgagctgaccgacggccagatccaggccatgctgagaagatggttcgtggaggtggagggcaccgtgaaggcctacgtgtgggacaacaacaaggacctggccgagtggctggagaagcagctgaccgaggaggacggcgtgcacagcgtgatcgaggagaacatcaagtgcatcagcagagactacgtgctgaagcagatcagaagcctggtgcaggccaaccccgaggtggccatggacagcatcatccacatgacccagcacatcagccccacccagagagccgaggtgatcagaatcctgagcaccatggacagccccagcacctag

SEQ ID NO: 317489 - DNA, 1419 bp, Artificial Sequence
  derived and/or modified sequence
atgcacaacaacggcgtgacccactgcaccgtgtgcgacgacttcgagggcgtgttcaccgtgctgcactggctgagctacatgcccaagagcgtgcacagcagcgtgcccctgctgaacagcaaggaccccatcgacagaatcatcgagttcgtgcccaccaagaccccctacgaccccagatggatgctggccggcagaccccaccccacccagaagggccagtggctgagcggcttcttcgactacggcagcttcagcgagatcatgcagccctgggcccagaccgtggtggtgggcagagccagactgggcggcatccccgtgggcgtggtggccgtggagaccagaaccgtggagctgagcatccccgccgaccccgccaacctggacagcgaggccaagatcatccagcaggccggccaggtgtggttccccgacagcgccttcaagacctaccaggccatcaaggacttcaacagagagggcctgcccctgatggtgttcgccaactggagaggcttcagcggcggcatgaaggacatgtacgaccaggtgctgaagttcggcgcctacatcgtggacggcctgagagagtgctgccagcccgtgctggtgtacatccccccccaggccgagctgagaggcggcagctgggtggtgatcgacagcagcatcaaccccagacacatggagatgtacgccgacagagagagcagaggcagcgtgctggagcccgagggcaccgtggagatcaagttcagaagaaaggacctggtgaagaccatgagaagagtggaccccgtgtacatccacctggccgagagactgggcacccccgagctgagcaccgccgagagaaaggagctggagaacaagctgaaggagagagaggagttcctgatccccatctaccaccaggtggccgtgcagttcgccgacctgcacgacacccccggcagaatgcaggagaagggcgtgatcagcgacatcctggactggaagaccagcagaaccttcttctactggagactgagaagactgctgctggaggacctggtgaagaagaagatccacaacgccaaccccgagctgaccgacggccagatccaggccatgctgagaagatggttcgtggaggtggagggcaccgtgaaggcctacgtgtgggacaacaacaaggacctggccgagtggctggagaagcagctgaccgaggaggacggcgtgcacagcgtgatcgaggagaacatcaagtgcatcagcagagactacgtgctgaagcagatcagaagcctggtgcaggccaaccccgaggtggccatggacagcatcatccacatgacccagcacatcagccccacccagagagccgaggtgatcagaatcctgagcaccatggacagccccagcacctag

SEQ ID NO: 317490 - DNA, 3138 bp, Artificial Sequence
  derived and/or modified sequence
atgggctgcttcagcgacagccccccccagagccccaccttccccgaggccggccacaccagcctgtacgacgaggacaaggtgcccagagacgagcccatccacatcctgaacgtggccatcaagaccgactgcgacatcgaggacgacagactggccgccatgttcagagagttcacccagcagaacaaggccaccctggtggaccacggcatcagaagactgaccttcctggtggcccagaaggacttcagaaagcaggtgaactacgaggtggacagaagattccacagagagttccccaagttcttcaccttcagagccagagacaagttcgaggaggacagaatctacagacacctggagcccgccctggccttccagctggagctgaacagaatgagaaacttcgacctgaccgccatcccctgcgccaaccacaagatgcacctgtacctgggcgccgccaaggtggaggtgggcaccgaggtgaccgactacagattcttcgtgagagccatcatcagacacagcgacctggtgaccaaggaggccagcttcgagtacctgcagaacgagggcgagagactgctgctggaggccatggacgagctggaggtggccttcaacaacaccaacgtgagaaccgactgcaaccacatcttcctgaacttcgtgcccaccgtgatcatggaccccagcaagatcgaggagagcgtgagaagcatggtgatgagatacggcagcagactgtggaagctgagagtgctgcaggccgagctgaagatcaacatcagactgacccccaccggcaaggccatccccatcagactgttcctgaccaacgagagcggctactacctggacatcagcctgtacaaggaggtgaccgacagcagaaccgcccagatcatgttccaggcctacggcgacaagcagggccccctgcacggcatgctgatcaacaccccctacgtgaccaaggacctgctgcagagcaagagattccaggcccagagcctgggcaccacctacatctacgacatccccgagatgttcagacagatcggcatggtggcctggaagatgaccttcaagagccccgagtaccccgagggcagagacatcatcgtgatcggcaacgacatcacctacagaatcggcagcttcggcccccaggaggacctgctgttcctgagagccagcgagctggccagagccgagggcatccccagaatctacgtgagcgccaacagcggcgccagaatcggcctggccgaggagatcagacacatgttccacgtggcctgggtggaccccgaggacccctacaagggctacagatacctgtacctgaccccccaggactacaagagagtgagcgccctgaacagcgtgcactgcgagcacgtggaggacgagggcgagagcagatacaagatcaccgacatcatcggcaaggaggagggcatcggccccgagaacctgagaggcagcggcatgatcgccggcgagagcagcctggcctacaacgagatcatcaccatcagcctggtgacctgcagagccatcggcatcggcgcctacctggtgagactgggccagagaaccatccaggtggagaacagccacctgatcctgaccggcgccggcgccctgaacaaggtgctgggcagagaggtgtacaccagcaacaaccagctgggcggcatccagatcatgcacaacaacggcgtgacccactgcaccgtgtgcgacgacttcgagggcgtgttcaccgtgctgcactggctgagctacatgcccaagagcgtgcacagcagcgtgcccctgctgaacagcaaggaccccatcgacagaatcatcgagttcgtgcccaccaagaccccctacgaccccagatggatgctggccggcagaccccaccccacccagaagggccagtggctgagcggcttcttcgactacggcagcttcagcgagatcatgcagccctgggcccagaccgtggtggtgggcagagccagactgggcggcatccccgtgggcgtggtggccgtggagaccagaaccgtggagctgagcatccccgccgaccccgccaacctggacagcgaggccaagatcatccagcaggccggccaggtgtggttccccgacagcgccttcaagacctaccaggccatcaaggacttcaacagagagggcctgcccctgatggtgttcgccaactggagaggcttcagcggcggcatgaaggacatgtacgaccaggtgctgaagttcggcgcctacatcgtggacggcctgagagagtgctgccagcccgtgctggtgtacatccccccccaggccgagctgagaggcggcagctgggtggtgatcgacagcagcatcaaccccagacacatggagatgtacgccgacagagagagcagaggcagcgtgctggagcccgagggcaccgtggagatcaagttcagaagaaaggacctggtgaagaccatgagaagagtggaccccgtgtacatccacctggccgagagactgggcacccccgagctgagcaccgccgagagaaaggagctggagaacaagctgaaggagagagaggagttcctgatccccatctaccaccaggtggccgtgcagttcgccgacctgcacgacacccccggcagaatgcaggagaagggcgtgatcagcgacatcctggactggaagaccagcagaaccttcttctactggagactgagaagactgctgctggaggacctggtgaagaagaagatccacaacgccaaccccgagctgaccgacggccagatccaggccatgctgagaagatggttcgtggaggtggagggcaccgtgaaggcctacgtgtgggacaacaacaaggacctggccgagtggctggagaagcagctgaccgaggaggacggcgtgcacagcgtgatcgaggagaacatcaagtgcatcagcagagactacgtgctgaagcagatcagaagcctggtgcaggccaaccccgaggtggccatggacagcatcatccacatgacccagcacatcagccccacccagagagccgaggtgatcagaatcctgagcaccatggacagccccagcacctag

SEQ ID NO: 317491 - DNA, 777 bp, Artificial Sequence
  derived and/or modified sequence
atgagcggcctgcacctggtgaagcagggcagagacagaaagaagatcgacagccagagagacttcaccgtggccagccccgccgagttcgtgaccagattcggcggcaacaaggtgatcgagaaggtgctgatcgccaacaacggcatcgccgccgtgaagtgcatgagaagcatcagaagatggagctacgagatgttcagaaacgagagagccatcagattcgtggtgatggtgacccccgaggacctgaaggccaacgccgagtacatcaagatggccgaccactacgtgcccgtgcccggcggccccaacaacaacaactacgccaacgtggagctgatcctggacatcgccaagagaatccccgtgcaggccgtgtgggccggctggggccacgccagcgagaaccccaagctgcccgagctgctgctgaagaacggcatcgccttcatgggcccccccagccaggccatgtgggccctgggcgacaagatcgccagcagcatcgtggcccagaccgccggcatccccaccctgccctggagcggcagcggcctgagagtggactggcaggagaacgacttcagcaagagaatcctgaacgtgccccaggagctgtacgagaagggctacgtgaaggacgtggacgacggcctgcaggccgccgaggaggtgggctaccccgtgatgatcaaggccagcgagggcggcggcggcaagggcatcagaaaggtgaacaacgccgacgacttccccaacctgttcagacagtag

SEQ ID NO: 317492 - DNA, 228 bp, Artificial Sequence
  derived and/or modified sequence
atgacccacgacaagagctggcggcggtgcagcatcagcggcagcactaagtgccgctgcggaagtaggattgctgggccaaacgcgttaggcagcggcggctcccgcagctccagctcttcgtccaggtccatcctttcatctagcatcctctcatcctccatcccttcaagttccagctcaagcagcagtccctcgtcttccccttcctcatcttcaccttcttag

SEQ ID NO: 317493 - protein, 299 aa, Artificial Sequence
  derived and/or modified sequence
MKESRQTSKLKNNSPGTAEGCGGGGGGGGGGGSGGSGGGGGGGGGGDKSPPGSAASKRARTAYTSAQLVELEKEFHFNRYLCRPRRVEMANLLNLSERQIKIWFQNRRMKYKKDQKAKGLASSSGGPSPAGSPPQPMQSTAGFMNALHSMTPSYESPSPPAFGKAHQNAYALPSNYQPPLKGCGAPQKYPPTPAPEYEPHVLQANGGAYGTPTMQGSPVYVGGGGYADPLPPPAGPSLYGLNHLSHHPSGNLDYNGAPPMAPSQHHGPCEPHPTYTDLSSHHAPPPQGRIQEAPKLTHL

SEQ ID NO: 317494 - protein, 358 aa, Artificial Sequence
  derived and/or modified sequence
MRPGLAPEPLSAPPGSPPPSAAPTSATSNSSNGGGPSKSGPPKCGPGTNSTLTKQIFPWMKESRQTSKLKNNSPGTAEGCGGGGGGGGGGGSGGSGGGGGGGGGGDKSPPGSAASKRARTAYTSAQLVELEKEFHFNRYLCRPRRVEMANLLNLSERQIKIWFQNRRMKYKKDQKAKGLASSSGGPSPAGSPPQPMQSTAGFMNALHSMTPSYESPSPPAFGKAHQNAYALPSNYQPPLKGCGAPQKYPPTPAPEYEPHVLQANGGAYGTPTMQGSPVYVGGGGYADPLPPPAGPSLYGLNHLSHHPSGNLDYNGAPPMAPSQHHGPCEPHPTYTDLSSHHAPPPQGRIQEAPKLTHL

SEQ ID NO: 317495 - DNA, 1909 bp, Artificial Sequence
  derived and/or modified sequence
gacactttaactgctcgctgtggtggggaagggggcagaggtaggtgagcactctcccagcctggagcagccggaccagcccagaaggcagcggcggcccaggccagcattcccgcagaggggagatttgtcgcctgccgctcgctctggggctcgatgtgaatatatattatgtctgcctgttctcccctcgtcggtggctaaggccgccacgcacctggagggcgactaccagcgctcagcttgctcgctgcagtccctgggcaacgctgccccacatgccaagagcaaggagctcaacggcagctgcatgaggccgggtctggcccccgagcccctgtcggccccgcctggctcacccccgcccagtgccgcacctaccagtgccactagcaacagcagtaatgggggcgggcccagcaaaagtggtcccccaaagtgcggtcccggcaccaactccaccctcaccaaacagatattcccctggatgaaagagtcgaggcaaacgtccaagctgaaaaacaactcccccggcacagcagagggctgtggtggcggcggcggtggcggcggcggcggaggcagtggtggcagcgggggcggtggcggcggcggcgggggaggggacaagagccccccggggtcggcggcgtccaagcgggcgcggacggcgtacacgagcgcgcagctggtggagctggagaaggagttccattttaaccgctacctgtgccggcctcgccgtgtagagatggccaacctgctgaacctcagcgagcggcagatcaagatctggttccagaaccggcgcatgaagtacaagaaggaccagaaggccaagggattggcctcgtcgtcggggggcccatctccagccggcagccccccgcagcccatgcagtccacggccggcttcatgaacgccttacactccatgacccccagctacgagagcccgtccccacccgccttcggtaaagcccaccagaatgcctacgcgctgccctccaactaccagccccctctcaaaggctgcggcgccccgcagaagtaccctccgaccccggcgcccgagtatgagccgcacgtcctccaagccaacgggggcgcctacgggacgcccaccatgcagggcagtccggtgtacgtgggcgggggcggctacgcggatccgctgccgccccctgccggcccctccctctatggcctcaaccacctttcccatcacccttccgggaacctggactacaacggggcgccccctatggcgcccagccagcaccacggaccctgcgaaccccaccccacctacacagacctctcctctcaccacgcgcctcctcctcagggtagaatccaagaagcgcccaaattaacacacctgtgatgggaaagggcgaacgaggattaggggatggggaggaagagagagactgtggagctctggggggcaacctggaggtctgaaaagaggagccagagaaggtggtacccaggcttcctggtcagaaccggcctggagctccttcccttccccctggcctgagaggttgcttttaagtcttccaccccttgttccatctgcctgccaacccatcggaaaggaatccacatcatattggagatgaccccatcaaccccagggctccagcactaccaagttggaattccacgcccgggagtggggtagaggaagacgagacaggacgaggcagaaaagcacattttaaaaaccagacaagatggctaggccatcaccaaccaacggacttaccttacatctttgtaggtaattccccccaaatcttgatttttttttttcctcaattatcctttaaaaaataagaaaacacatttcaaacccaaaaggcacaaaacacgttcccttccaactttcccaaaacctcaa

SEQ ID NO: 317496 - DNA, 1845 bp, Artificial Sequence
  derived and/or modified sequence
atagtaactgcctgctcgtgggggaggctgggagagaggtgaaccgcaggtcacggcgtctaaaaattattaaaatgtttgagagcctcgtgacgcgcctagctgtttaacaaagactgccaaagtatgagattaacacgaaaacttgcgcttccaaaacaaaaacacaccaaaaaaaaaagtcacgttccggcttctgagggagcccgtggctgtgtccgccgccgcggtccggttttccggacacacaatagtggacaggagagagctcagctgttgcccggcgcgtccgcgggcggctcggcggccggcggggctggggagcctcccgcaaatctccttggaccggctgttgggggaaaaaagtgttagccgtctctcccggatctgcaagggggaaaaaatttggaaccataaagttgaaaacttttttctctcagtttggaagaagcccttcgtcatgaatgggatctgcagagttcgggcgagaggaggcgagaggcgcaaaggaggggagatttgtcgcctgccgctcgctctggggctcgatgtgaatatatattatgtctgcctgttctcccctcgtcggtggctaaggccgccacgcacctggagggcgactaccagcgctcagcttgctcgctgcagtccctgggcaacgctgccccacatgccaagagcaaggagctcaacggcagctgcatgaggccgggtctggcccccgagcccctgtcggccccgcctggctcacccccgcccagtgccgcacctaccagtgccactagcaacagcagtaatgggggcgggcccagcaaaagtggtcccccaaagtgcggtcccggcaccaactccaccctcaccaaacagatattcccctggatgaaagagtcgaggcaaacgtccaagctgaaaaacaactcccccggcacagcagagggctgtggtggcggcggcggtggcggcggcggcggaggcagtggtggcagcgggggcggtggcggcggcggcgggggaggggacaagagccccccggggtcggcggcgtccaagcgggcgcggacggcgtacacgagcgcgcagctggtggagctggagaaggagttccattttaaccgctacctgtgccggcctcgccgtgtagagatggccaacctgctgaacctcagcgagcggcagatcaagatctggttccagaaccggcgcatgaagtacaagaaggaccagaaggccaagggattggcctcgtcgtcggggggcccatctccagccggcagccccccgcagcccatgcagtccacggccggcttcatgaacgccttacactccatgacccccagctacgagagcccgtccccacccgccttcggtaaagcccaccagaatgcctacgcgctgccctccaactaccagccccctctcaaaggctgcggcgccccgcagaagtaccctccgaccccggcgcccgagtatgagccgcacgtcctccaagccaacgggggcgcctacgggacgcccaccatgcagggcagtccggtgtacgtgggcgggggcggctacgcggatccgctgccgccccctgccggcccctccctctatggcctcaaccacctttcccatcacccttccgggaacctggactacaacggggcgccccctatggcgcccagccagcaccacggaccctgcgaaccccaccccacctacacagacctctcctctcaccacgcgcctcctcctcagggtagaatccaagaagcgcccaaattaacacacctgtgatgggaaagggcgaacgaggattaggggatggggaggaagagagagactgtggagctctggggggca

SEQ ID NO: 317497 - DNA, 1525 bp, Artificial Sequence
  derived and/or modified sequence
actttaactgctcgctgtggtggggaagggggcagaggtaggtgagcactctcccagcctggagcagccggaccagcccagaaggcagcggcggcccaggccagcattcccgcagacacaagaggcttaagtacggcaaagcctttcatatcgtgatttatttgtcataagcaaataaaatgcggttaagctgtctccttttagacagaaggctctttggttattaaagttccgagagaggattccatgaggctggcctctttcctcgcagcataagaagcaaatctccttggaccggctgttgggggaaaaaagtgttagccgtctctcccggatctgcaagggggaaaaaatttggaaccataaagttgaaaacttttttctctcagtttggaagaagcccttcgtcatgaatgggatctgcagagttcgggcgagaggaggcgagaggcgcaaaggaggggagatttgtcgcctgccgctcgctctggggctcgatgtgaatatatattatgtctgcctgttctcccctcgtcggtggctaagatattcccctggatgaaagagtcgaggcaaacgtccaagctgaaaaacaactcccccggcacagcagagggctgtggtggcggcggcggtggcggcggcggcggaggcagtggtggcagcgggggcggtggcggcggcggcgggggaggggacaagagccccccggggtcggcggcgtccaagcgggcgcggacggcgtacacgagcgcgcagctggtggagctggagaaggagttccattttaaccgctacctgtgccggcctcgccgtgtagagatggccaacctgctgaacctcagcgagcggcagatcaagatctggttccagaaccggcgcatgaagtacaagaaggaccagaaggccaagggattggcctcgtcgtcggggggcccatctccagccggcagccccccgcagcccatgcagtccacggccggcttcatgaacgccttacactccatgacccccagctacgagagcccgtccccacccgccttcggtaaagcccaccagaatgcctacgcgctgccctccaactaccagccccctctcaaaggctgcggcgccccgcagaagtaccctccgaccccggcgcccgagtatgagccgcacgtcctccaagccaacgggggcgcctacgggacgcccaccatgcagggcagtccggtgtacgtgggcgggggcggctacgcggatccgctgccgccccctgccggcccctccctctatggcctcaaccacctttcccatcacccttccgggaacctggactacaacggggcgccccctatggcgcccagccagcaccacggaccctgcgaaccccaccccacctacacagacctctcctctcaccacgcgcctcctcctcagggtagaatccaagaagcgcccaaattaacacacctgtgatgggaaagggcgaacgaggattaggggatggggaggaagagagagactgtggagctctggggggcaa

SEQ ID NO: 317498 - DNA, 1279 bp, Artificial Sequence
  derived and/or modified sequence
atgaggctggcctctttcctcgcagcataagaagcaaatctccttggaccggctgttgggggaaaaaagtgttagccgtctctcccggatctgcaagggggaaaaaatttggaaccataaagttgaaaacttttttctctcagtttggaagaagcccttcgtcatgaatgggatctgcagagttcgggcgagaggaggcgagaggcgcaaaggaggggagatttgtcgcctgccgctcgctctggggctcgatgtgaatatatattatgtctgcctgttctcccctcgtcggtggctaagatattcccctggatgaaagagtcgaggcaaacgtccaagctgaaaaacaactcccccggcacagcagagggctgtggtggcggcggcggtggcggcggcggcggaggcagtggtggcagcgggggcggtggcggcggcggcgggggaggggacaagagccccccggggtcggcggcgtccaagcgggcgcggacggcgtacacgagcgcgcagctggtggagctggagaaggagttccattttaaccgctacctgtgccggcctcgccgtgtagagatggccaacctgctgaacctcagcgagcggcagatcaagatctggttccagaaccggcgcatgaagtacaagaaggaccagaaggccaagggattggcctcgtcgtcggggggcccatctccagccggcagccccccgcagcccatgcagtccacggccggcttcatgaacgccttacactccatgacccccagctacgagagcccgtccccacccgccttcggtaaagcccaccagaatgcctacgcgctgccctccaactaccagccccctctcaaaggctgcggcgccccgcagaagtaccctccgaccccggcgcccgagtatgagccgcacgtcctccaagccaacgggggcgcctacgggacgcccaccatgcagggcagtccggtgtacgtgggcgggggcggctacgcggatccgctgccgccccctgccggcccctccctctatggcctcaaccacctttcccatcacccttccgggaacctggactacaacggggcgccccctatggcgcccagccagcaccacggaccctgcgaaccccaccccacctacacagacctctcctctcaccacgcgcctcctcctcagggtagaatccaagaagcgcccaaattaacacacctgtgatgggaaagggcgaacgaggattaggggatggggaggaagagagagactgtggagctctggggggcaa

SEQ ID NO: 317499 - protein, 431 aa, Artificial Sequence
  derived and/or modified sequence
MQKATYYDNAAAALFGGYSSYPGSNGFGFDVPPQPPFQAATHLEGDYQRSACSLQSLGNAAPHAKSKELNGSCMRPGLAPEPLSAPPGSPPPSAAPTSATSNSSNGGGPSKSGPPKCGPGTNSTLTKQIFPWMKESRQTSKLKNNSPGTAEGCGGGGGGGGGGGSGGSGGGGGGGGGGDKSPPGSAASKRARTAYTSAQLVELEKEFHFNRYLCRPRRVEMANLLNLSERQIKIWFQNRRMKYKKDQKAKGLASSSGGPSPAGSPPQPMQSTAGFMNALHSMTPSYESPSPPAFGKAHQNAYALPSNYQPPLKGCGAPQKYPPTPAPEYEPHVLQANGGAYGTPTMQGSPVYVGGGGYADPLPPPAGPSLYGLNHLSHHPSGNLDYNGAPPMAPSQHHGPCEPHPTYTDLSSHHAPPPQGRIQEAPKLTHL

SEQ ID NO: 317500 - DNA, 1296 bp, Artificial Sequence
  derived and/or modified sequence
atgcagaaagcaacatactatgataacgccgccgcagccctgtttggcgggtacagctcctaccctggctcgaatggattcggattcgatgtgccgccccaaccccccttccaggcggccacccacctggagggagattatcaacgttccgcctgtagtcttcagtccctggggaatgctgcaccgcatgcaaaatcaaaagaactcaacggatcttgtatgagacccggcttggcaccggagcctctatctgccccccctgggagcccaccaccaagcgctgcacctactagtgcgactagtaacagctccaacgggggcgggccgagtaagagcgggccacctaagtgcggacccggcaccaactcaaccttgactaagcagatcttcccttggatgaaggagagcaggcaaacctctaagctgaaaaacaacagtcccggtactgctgagggatgcgggggaggtgggggtggaggaggcggagggggctccgggggctccgggggaggcggaggcgggggaggaggcggagacaagagtcctccgggaagcgccgccagtaagagagccagaactgcttacacatcggcccagcttgtggagctcgagaaagaatttcacttcaatcgttatctctgcagacctcgccgtgttgagatggccaatttgttgaatctgtcagaaagacagatcaagatctggtttcagaatcgacggatgaagtacaaaaaagaccaaaaagccaaaggcctggctagttcctctggcggcccctcacctgccggctcaccaccacagccaatgcagtcaaccgccggatttatgaacgccctgcactccatgacaccttcctacgagagccccagccccccagcatttggaaaggcacaccagaacgcctacgcattaccttctaattaccagccgccactgaagggatgcggtgcgcctcaaaagtacccaccaacccccgcccctgagtacgaaccacacgtcctgcaggcgaacggcggtgcctacggcacccctaccatgcaaggcagtccagtctacgtgggcgggggggggtatgccgaccctctgccgcctcccgcagggccctccttatacgggctgaatcacttgtcccatcacccctccggcaatctggattataatggggccccccctatggcaccctctcagcaccatgggccttgcgagccgcacccgacgtatactgatttaagtagtcatcacgccccgccccctcaggggcgcatccaggaggcccctaaacttacacatctgtag

SEQ ID NO: 317501 - DNA, 1296 bp, Artificial Sequence
  derived and/or modified sequence
atgcagaaggcgacatattatgacaacgcggctgccgccctgttcgggggttattcctcttatcccggttctaacggttttggattcgatgttcctccacaaccgcctttccaggccgccactcacctcgagggggactaccagcgaagcgcctgctcactccagtcccttggaaacgcagcccctcacgctaagtcaaaagaactgaacggcagctgcatgagaccaggtctcgcacccgagccactgtcagcccctcctggaagtccacccccctctgcagctcccacatctgctacgtcaaattcctccaatggcgggggcccaagtaagtctggacctcccaagtgcggaccaggcaccaacagtactttgaccaaacaaattttcccatggatgaaggagtcgcgccaaacttcaaaacttaaaaataattcccctgggaccgccgaaggctgcggtggcggcggtggcgggggaggcgggggggggtccggaggctccggaggtgggggagggggcggcggcggcggagataagtcacctccaggatcagccgcttcaaagcgggcgagaaccgcttacacatccgctcagttggtggaactggaaaaagaattccattttaaccgatatctctgcagaccccgcagggtggagatggccaacctgctaaacttgagtgaacggcagatcaaaatctggttccagaataggaggatgaaatataagaaggaccagaaagcaaagggcctcgccagcagttctggtggacccagcccagccggctctccgcctcaaccaatgcagagtaccgctgggtttatgaacgcactccatagtatgactccatcttacgagtctccatctccaccagcctttggtaaagctcaccagaacgcctatgccctccctagtaactaccagccgcctctaaaaggttgcggagcacctcagaagtatccgccaaccccggccccagaatatgaaccccacgttctgcaggcaaatggaggcgcgtatggcacccccacaatgcaggggtcccccgtatacgtggggggtggtggatatgctgatccactgcccccgcccgcaggaccatccctttatggtctcaatcacctgagccatcatccaagtgggaacttagactacaatggcgctcccccaatggccccatcacagcatcacggcccttgcgagcctcatcccacctacactgatttgagctcccatcacgcacccccccctcaggggcgcatccaggaggccccgaagctcacccatctgtag

SEQ ID NO: 317502 - DNA, 1296 bp, Artificial Sequence
  derived and/or modified sequence
atgcagaaagcgacctactatgataatgccgccgctgccctattcggcggctacagttcatacccaggttctaacgggtttggattcgacgtgccgccccagccaccatttcaggcagcaacccacctggagggcgactatcaacgctcagcttgttcgctccaaagcctggggaatgcggcaccccatgccaaaagcaaggagctgaacggaagctgtatgcgcccggggctggcaccagagcctctgagtgcccctccaggatctccgcctccctccgctgctccgacctctgccacatccaactctagtaatggcggcggtccctctaagagtggcccgcccaaatgcggacctggcaccaacagtacccttacaaagcagatcttcccatggatgaaagagagccgccagactagcaagttgaaaaataatagtcctggcacggctgagggatgcggtggcggcggcggcggtggaggtggcggtggctccggcggtagcggcggaggcggcggcggaggaggagggggagacaagtcccctcctggtagcgccgcatcaaagcgggctcgtacagcctacacaagcgcccagttggtggaacttgagaaagagtttcattttaatcggtacttatgcaggcccagacgtgtcgagatggcaaatctgttgaatctgagtgaacgccagattaagatctggtttcagaaccgtcgtatgaagtacaaaaaggaccagaaggccaagggtctggcttccagctctggaggcccatcacccgctggatcccccccccaaccgatgcagagcacggccgggtttatgaacgccctgcacagcatgacgccctcctatgaaagcccctcccctcctgccttcggtaaggcgcatcaaaacgcctatgccttgccgagtaactatcagccccctctgaaaggttgcggagccccacaaaagtacccgcccacacccgcgcctgagtatgaacctcatgtcctccaggccaatggtggagcctacggaacaccaaccatgcagggctcaccagtgtacgtgggtggagggggctatgccgaccctttacccccgcccgccgggccgtccctgtatggactgaaccacctgagccaccacccatccggaaaccttgattacaacggtgcgcctccaatggcaccatctcaacaccatggaccttgtgagcctcatccgacatacacagacctctccagccatcacgctccccctccccagggccggattcaggaggcgccaaagttaacccacctttag

SEQ ID NO: 317503 - DNA, 1296 bp, Artificial Sequence
  derived and/or modified sequence
atgcaaaaagccacatactatgataacgccgccgcagctctttttggcgggtattccagctacccaggtagcaacgggtttgggtttgacgtacctccgcaaccccccttccaggctgcaacccacctggaaggggattatcagcggtctgcttgctcccttcaatcactcgggaacgccgctccacatgctaaaagtaaagagctgaatggctcttgtatgcgcccaggtcttgctcctgaaccgttatccgcccctccgggaagtccacccccctctgcagcccctacctctgcgacctctaactcttctaatggaggcggaccaagcaagagtggacccccaaaatgtgggcctggtacaaacagtactctgacgaaacagatcttcccatggatgaaagaaagtagacagacaagtaaactgaagaacaactcccccggaacagccgaaggctgtgggggcggggggggtggaggcggcgggggcgggagcgggggctcaggcggagggggcggggggggtggggggggagataagtctcctccggggagcgcggccagcaaaagggctcgtacggcttacacctcagcgcagttggttgagctcgagaaggagttccatttcaatagatatttatgccgaccaagacgggtggaaatggcgaacctgcttaacctttctgagcggcagatcaaaatctggtttcaaaaccgtcgcatgaagtataaaaaggaccagaaagctaaaggcctggcttcgagctcaggaggaccctctcctgctggttctccacctcaacccatgcagagtactgccgggttcatgaatgcgctgcattccatgacaccctcttacgagagcccttcacctcctgcgttcgggaaggctcatcaaaacgcgtacgcactcccatcaaattaccagcctcctctgaaagggtgcggtgccccccaaaaatacccaccaacccccgcgcccgaatacgagccacatgtgctgcaggccaacggaggagcctatggcacaccaactatgcagggctcacccgtctatgtgggcggcgggggctatgcagaccctctgcccccacccgcaggcccctctctctatgggctgaaccacctctctcaccacccctccggcaacctagactataatggcgcacccccaatggccccaagccagcatcatgggccttgtgagccccatccgacatataccgacctgtccagccatcacgctcctccaccccagggtaggatccaggaggccccgaagctgacccacctctag

SEQ ID NO: 317504 - DNA, 2642 bp, Artificial Sequence
  derived and/or modified sequence
ttttgcattcctccagcttgcagctccggtagttggaggctgggtagggcagggggaaccgacaggccggtgtccccagccgcaaaagagctgctgaactgtccgtttaaatgctgctgggagactcgtaaaaaaatcatcgtggacctggaggatgagaggggcgagctttatttcggtcggattgcggtgtggtggtttagctgcaaggggatgccgcagccccagttgagggggaaaatagttcttaaaaagcatatgcccccctaaggaatgtctctaaagaaccaaatcaaagctgctctttggaaggtatgaatagaatttaaaaaaaaaagatttctatggagcttaaagttcacagccattctgtgtagacaagagctaagaaaaatgtgagaattatacagaaaaccattaatcacttcttttctttaaatacgtatcctctctcctttgttattattcaacagcaaatctccttggaccggctgttgggggaaaaaagtgttagccgtctctcccggatctgcaagggggaaaaaatttggaaccataaagttgaaaacttttttctctcagtttggaagaagcccttcgtcatgaatgggatctgcagagttcgggcgagaggaggcgagaggcgcaaaggaggggagatttgtcgcctgccgctcgctctggggctcgatgtgaatatatattatgtctgcctgttctcccctcgtcggtggctaaggtcagccgcttggaacagaccccggaggaggggggcagagaggggaggtggggggggggggtccggcgtgtcacgtgacccccagggttgccaatgtccggtcctgagggtatcaggcctttccaagttgccacccactgcccaggcctcacccagcgatgcagaaagccacctactacgacaacgccgcggctgctctcttcggaggctattcctcgtaccctggcagcaatggcttcggcttcgatgtccccccccaacccccatttcaggccgccacgcacctggagggcgactaccagcgctcagcttgctcgctgcagtccctgggcaacgctgccccacatgccaagagcaaggagctcaacggcagctgcatgaggccgggtctggcccccgagcccctgtcggccccgcctggctcacccccgcccagtgccgcacctaccagtgccactagcaacagcagtaatgggggcgggcccagcaaaagtggtcccccaaagtgcggtcccggcaccaactccaccctcaccaaacagatattcccctggatgaaagagtcgaggcaaacgtccaagctgaaaaacaactcccccggcacagcagagggctgtggtggcggcggcggtggcggcggcggcggaggcagtggtggcagcgggggcggtggcggcggcggcgggggaggggacaagagccccccggggtcggcggcgtccaagcgggcgcggacggcgtacacgagcgcgcagctggtggagctggagaaggagttccattttaaccgctacctgtgccggcctcgccgtgtagagatggccaacctgctgaacctcagcgagcggcagatcaagatctggttccagaaccggcgcatgaagtacaagaaggaccagaaggccaagggattggcctcgtcgtcggggggcccatctccagccggcagccccccgcagcccatgcagtccacggccggcttcatgaacgccttacactccatgacccccagctacgagagcccgtccccacccgccttcggtaaagcccaccagaatgcctacgcgctgccctccaactaccagccccctctcaaaggctgcggcgccccgcagaagtaccctccgaccccggcgcccgagtatgagccgcacgtcctccaagccaacgggggcgcctacgggacgcccaccatgcagggcagtccggtgtacgtgggcgggggcggctacgcggatccgctgccgccccctgccggcccctccctctatggcctcaaccacctttcccatcacccttccgggaacctggactacaacggggcgccccctatggcgcccagccagcaccacggaccctgcgaaccccaccccacctacacagacctctcctctcaccacgcgcctcctcctcagggtagaatccaagaagcgcccaaattaacacacctgtgatgggaaagggcgaacgaggattaggggatggggaggaagagagagactgtggagctctggggggcaacctggaggtctgaaaagaggagccagagaaggtggtacccaggcttcctggtcagaaccggcctggagctccttcccttccccctggcctgagaggttgcttttaagtcttccaccccttgttccatctgcctgccaacccatcggaaaggaatccacatcatattggagatgaccccatcaaccccagggctccagcactaccaagttggaattccacgcccgggagtggggtagaggaagacgagacaggacgaggcagaaaagcacattttaaaaaccagacaagatggctaggccatcaccaaccaacggacttaccttacatctttgtaggtaattccccccaaatcttgatttttttttttcctcaattatccttt

SEQ ID NO: 317505 - DNA, 4208 bp, Artificial Sequence
  derived and/or modified sequence
ggagttgaacagctaggctgaatgagattaaagttttccaaacacacatggcagtatggaggttttatgaaaagtgatggtgaagagttgggagagatggagggaaaaaaatgcagtcagaagtttcagaacaaatacacaaaatcctatgttagtttgaatctttatttttctggcacacttttaaaaggctgtattaaaatagtgattttttttttttgcctcagggaacctcagtcaacaggaatacctctgtttctaacctagagaataatattgttaaaattgctttgttaatttttttttcctcaggaataattttctcttttggaaagcactttccccgtctcagtagaaaagtctagcagttgtaacttcttgtttcttatttgctttgggggaaatcaaagaaaacagacggtgaaggaaagggtgggaaaaattaagtctcatgaaaaaaaaaaaaagaggtccggggagagacctgggccaaatggtcacagcaccaactggcgtggcccaggaaattgaaacaatcctgctccatgtgggggccccacagggccactggctgcccgatcccaggtttggctgagcaaagacaagggctggaggtggtggtacctgcagcagggccatggacagatgagtctcggttcagctggctcttgaggttaaaaatcatcaggaagtttctaggtcaggctgttgttgtcttcctggtgggagagtggtgggaagtggagaggatacctcacaagagaagcttctctgctgaacttgcttctcctgcctgttcttttaggagatcctttggttttccttcaggctagactttgcttgggcaagagacctaaaccgacttggaaggaggcaaaggctggaagcatagaagcctctgggctcagaggagggtgttgatgatgcttttattttggagtctcctagtgtcccctcccttgagccatcctatcccagagttggggaggagagatagggagagagggactaggggaggtcaggggctagtgcacaggcaggagagaagcaatggcctttgccatagattctacatctaggcagtcttgaaaggcatatagtctttatttatttttttattttttagtggaaatgaaaactggtgggcttttttttctcagcatctgctttggagatgttggggaggggaaaagaaaaaaccctattgatgtcagttcccttttcagttcctaagatggattcgagccccagtcctcttctcccccttgtgtctcttctctcgcctcgcaggtcagccgcttggaacagaccccggaggaggggggcagagaggggaggtggggggggggggtccggcgtgtcacgtgacccccagggttgccaatgtccggtcctgagggtatcaggcctttccaagttgccacccactgcccaggcctcacccagcgatgcagaaagccacctactacgacaacgccgcggctgctctcttcggaggctattcctcgtaccctggcagcaatggcttcggcttcgatgtccccccccaacccccatttcaggccgccacgcacctggagggcgactaccagcgctcagcttgctcgctgcagtccctgggcaacgctgccccacatgccaagagcaaggagctcaacggcagctgcatgaggccgggtctggcccccgagcccctgtcggccccgcctggctcacccccgcccagtgccgcacctaccagtgccactagcaacagcagtaatgggggcgggcccagcaaaagtggtcccccaaagtgcggtcccggcaccaactccaccctcaccaaacagatattcccctggatgaaagagtcgaggcaaacgtccaagctgaaaaacaactcccccggcacagcagagggctgtggtggcggcggcggtggcggcggcggcggaggcagtggtggcagcgggggcggtggcggcggcggcgggggaggggacaagagccccccggggtcggcggcgtccaagcgggcgcggacggcgtacacgagcgcgcagctggtggagctggagaaggagttccattttaaccgctacctgtgccggcctcgccgtgtagagatggccaacctgctgaacctcagcgagcggcagatcaagatctggttccagaaccggcgcatgaagtacaagaaggaccagaaggccaagggattggcctcgtcgtcggggggcccatctccagccggcagccccccgcagcccatgcagtccacggccggcttcatgaacgccttacactccatgacccccagctacgagagcccgtccccacccgccttcggtaaagcccaccagaatgcctacgcgctgccctccaactaccagccccctctcaaaggctgcggcgccccgcagaagtaccctccgaccccggcgcccgagtatgagccgcacgtcctccaagccaacgggggcgcctacgggacgcccaccatgcagggcagtccggtgtacgtgggcgggggcggctacgcggatccgctgccgccccctgccggcccctccctctatggcctcaaccacctttcccatcacccttccgggaacctggactacaacggggcgccccctatggcgcccagccagcaccacggaccctgcgaaccccaccccacctacacagacctctcctctcaccacgcgcctcctcctcagggtagaatccaagaagcgcccaaattaacacacctgtgatgggaaagggcgaacgaggattaggggatggggaggaagagagagactgtggagctctggggggcaacctggaggtctgaaaagaggagccagagaaggtggtacccaggcttcctggtcagaaccggcctggagctccttcccttccccctggcctgagaggttgcttttaagtcttccaccccttgttccatctgcctgccaacccatcggaaaggaatccacatcatattggagatgaccccatcaaccccagggctccagcactaccaagttggaattccacgcccgggagtggggtagaggaagacgagacaggacgaggcagaaaagcacattttaaaaaccagacaagatggctaggccatcaccaaccaacggacttaccttacatctttgtaggtaattccccccaaatcttgatttttttttttcctcaattatcctttaaaaaataagaaaacacatttcaaacccaaaaggcacaaaacacgttcccttccaactttcccaaaacctcaaatttgttcccatttgaggtttattgaggtacacttctagcccccggtttttctgctctagaacattcatatctatacatcccacccccatcaattacagtttttagagggctcagggatggtgagagatcctgaaagagctgcctatattataaattatatacatttttttttaaggaaaagtgtggaggctagggcaggcaggttgttaggactgaaggtttgcccattctgctgcctccatctcagctccagctccatccccctctccacagaaagcagttggtgacacgaggttctatacttttcttctgttgctctcttgacttaacgtgaaaacagggtatatttgaacaaactgtcccaggcaggggctgggcagggcctgtgtgccttgctcagcctcctgacaggacacttttgttgcacttagaatttacattttaatggatgtaaaaacaactgtgagagatgtctgggcctgcagaagtccagcattgctcaaaaaagcgtgtgttctagtgaacattttcatatatatttattggttatagcctgttaaaatattttcttttttgtattatttatccccctacattatgtatttatatgagggaaaaaaaggaaaaaattgtacttttttagtatttacctgttacaaaggacattgtgtttcctgtcatgtaaaaccagctattttagttactattgtactctagaaaagagctgtagatttatgttaaactcgtacttacgaacaattgtaattagttctaaaaggcatgaactcagctcctaatcgtcactgtatagtcctgaatttgtagaactagagttaattccctcttggaactttctttgttcttcagtagttacttttttccttacctaaaagggttgtctgtcaaacaattcttgaataaactttctgttatcaatttta

SEQ ID NO: 317506 - DNA, 1420 bp, Artificial Sequence
  derived and/or modified sequence
ttaactgctcgctgtggtggggaagggggcagaggtaggtgagcactctcccagcctggagcagccggaccagcccagaaggcagcggcggcccaggccagcattcccgcagcctcacccagcgatgcagaaagccacctactacgacaacgccgcggctgctctcttcggaggctattcctcgtaccctggcagcaatggcttcggcttcgatgtccccccccaacccccatttcaggccgccacgcacctggagggcgactaccagcgctcagcttgctcgctgcagtccctgggcaacgctgccccacatgccaagagcaaggagctcaacggcagctgcatgaggccgggtctggcccccgagcccctgtcggccccgcctggctcacccccgcccagtgccgcacctaccagtgccactagcaacagcagtaatgggggcgggcccagcaaaagtggtcccccaaagtgcggtcccggcaccaactccaccctcaccaaacagatattcccctggatgaaagagtcgaggcaaacgtccaagctgaaaaacaactcccccggcacagcagagggctgtggtggcggcggcggtggcggcggcggcggaggcagtggtggcagcgggggcggtggcggcggcggcgggggaggggacaagagccccccggggtcggcggcgtccaagcgggcgcggacggcgtacacgagcgcgcagctggtggagctggagaaggagttccattttaaccgctacctgtgccggcctcgccgtgtagagatggccaacctgctgaacctcagcgagcggcagatcaagatctggttccagaaccggcgcatgaagtacaagaaggaccagaaggccaagggattggcctcgtcgtcggggggcccatctccagccggcagccccccgcagcccatgcagtccacggccggcttcatgaacgccttacactccatgacccccagctacgagagcccgtccccacccgccttcggtaaagcccaccagaatgcctacgcgctgccctccaactaccagccccctctcaaaggctgcggcgccccgcagaagtaccctccgaccccggcgcccgagtatgagccgcacgtcctccaagccaacgggggcgcctacgggacgcccaccatgcagggcagtccggtgtacgtgggcgggggcggctacgcggatccgctgccgccccctgccggcccctccctctatggcctcaaccacctttcccatcacccttccgggaacctggactacaacggggcgccccctatggcgcccagccagcaccacggaccctgcgaaccccaccccacctacacagacctctcctctcaccacgcgcctcctcctcagggtagaatccaagaagcgcccaaattaacacacctgtga

SEQ ID NO: 317507 - DNA, 2196 bp, Artificial Sequence
  derived and/or modified sequence
agtatatttcacattctccagaatgttaagtgacactttaactgctcgctgtggtggggaagggggcagaggtaggtgagcactctcccagcctggagcagccggaccagcccagaaggcagcggcggcccaggccagcattcccgcacaaatctccttggaccggctgttgggggaaaaaagtgttagccgtctctcccggatctgcaagggggaaaaaatttggaaccataaagttgaaaacttttttctctcagtttggaagaagcccttcgtcatgaatgggatctgcagagttcgggcgagaggaggcgagaggcgcaaaggaggggagatttgtcgcctgccgctcgctctggggctcgatgtgaatatatattatgtctgcctgttctcccctcgtcggtggctaaggtcagccgcttggaacagaccccggaggaggggggcagagaggggaggtggggggggggggtccggcgtgtcacgtgacccccagggttgccaatgtccggtcctgagggtatcaggcctttccaagttgccacccactgcccaggcctcacccagcgatgcagaaagccacctactacgacaacgccgcggctgctctcttcggaggctattcctcgtaccctggcagcaatggcttcggcttcgatgtccccccccaacccccatttcaggccgccacgcacctggagggcgactaccagcgctcagcttgctcgctgcagtccctgggcaacgctgccccacatgccaagagcaaggagctcaacggcagctgcatgaggccgggtctggcccccgagcccctgtcggccccgcctggctcacccccgcccagtgccgcacctaccagtgccactagcaacagcagtaatgggggcgggcccagcaaaagtggtcccccaaagtgcggtcccggcaccaactccaccctcaccaaacagatattcccctggatgaaagagtcgaggcaaacgtccaagctgaaaaacaactcccccggcacagcagagggctgtggtggcggcggcggtggcggcggcggcggaggcagtggtggcagcgggggcggtggcggcggcggcgggggaggggacaagagccccccggggtcggcggcgtccaagcgggcgcggacggcgtacacgagcgcgcagctggtggagctggagaaggagttccattttaaccgctacctgtgccggcctcgccgtgtagagatggccaacctgctgaacctcagcgagcggcagatcaagatctggttccagaaccggcgcatgaagtacaagaaggaccagaaggccaagggattggcctcgtcgtcggggggcccatctccagccggcagccccccgcagcccatgcagtccacggccggcttcatgaacgccttacactccatgacccccagctacgagagcccgtccccacccgccttcggtaaagcccaccagaatgcctacgcgctgccctccaactaccagccccctctcaaaggctgcggcgccccgcagaagtaccctccgaccccggcgcccgagtatgagccgcacgtcctccaagccaacgggggcgcctacgggacgcccaccatgcagggcagtccggtgtacgtgggcgggggcggctacgcggatccgctgccgccccctgccggcccctccctctatggcctcaaccacctttcccatcacccttccgggaacctggactacaacggggcgccccctatggcgcccagccagcaccacggaccctgcgaaccccaccccacctacacagacctctcctctcaccacgcgcctcctcctcagggtagaatccaagaagcgcccaaattaacacacctgtgatgggaaagggcgaacgaggattaggggatggggaggaagagagagactgtggagctctggggggcaacctggaggtctgaaaagaggagccagagaaggtggtacccaggcttcctggtcagaaccggcctggagctccttcccttccccctggcctgagaggttgcttttaagtcttccaccccttgttccatctgcctgccaacccatcggaaaggaatccacatcatattggagatgaccccatcaaccccagggctccagcactaccaagttggaattccacgcccgggagtggggtagaggaagacgagacaggacgaggcag

SEQ ID NO: 317508 - DNA, 1296 bp, Artificial Sequence
  derived and/or modified sequence
atgcagaaggccacctactatgacaatgctgctgctgccctgtttggaggctacagcagctacccaggcagcaatggatttggatttgatgtgcccccccagccccccttccaggccgccacccacctggagggggactaccagaggtctgcctgcagcctgcagagcctgggcaatgctgcccctcatgccaagagcaaggagctgaatggcagctgcatgaggcctggcctggcccctgagcccctgagcgcccctcctggcagccccccaccttctgctgcccccaccagcgccaccagcaacagcagcaatggaggcggccccagcaagagcggcccccccaagtgtggccctggcaccaacagcaccctgaccaagcagatcttcccctggatgaaggagagccggcagaccagcaagctgaagaacaacagccctggaacagctgagggctgcggcggcggcggcggcggcggcggcggcggcggcagcggcggcagcggcggcggcggcggcggcggcggcggcggggacaagagccccccaggcagcgctgccagcaagagggccaggacagcctacaccagcgcccagctggtggagctggagaaggagttccacttcaaccgctacctgtgccggcccaggagagtggagatggccaacctgctgaacctgtctgagcggcagatcaagatctggttccagaacagaaggatgaagtacaagaaggaccagaaggccaagggcctggccagcagcagcggcggccccagccctgctggcagccccccccagcccatgcagagcacagctggcttcatgaatgccctgcacagcatgacccccagctatgagagccccagccccccagccttcggcaaggcccaccagaatgcctatgccctgcccagcaactaccagccccccctgaagggctgtggggccccccagaagtacccacccaccccagccccagaatatgagccccacgtgctgcaggccaatggaggagcctacggcacccccaccatgcagggcagccctgtgtatgtgggcggcggcggctatgctgaccccctgcccccacctgctggccccagcctgtatggcctgaaccacctgagccaccaccccagcggcaacctggactacaatggagccccacccatggcccccagccagcaccacggcccctgtgagccccaccccacctacacagacctgagcagccaccacgcccccccaccccagggccgcatccaggaggcccccaagctgacccacctgtag

SEQ ID NO: 317509 - DNA, 1296 bp, Artificial Sequence
  derived and/or modified sequence
atgcagaaggccacctactacgacaacgccgccgccgccctgttcggcggttattcgtcctacccggggtctaacggtttcggatttgatgttccaccccaaccacctttccaggctgctacccacctcgaaggcgattaccagcgtagcgcctgttctctgcagtcccttgggaacgcagcacctcatgccaaaagcaaggagctgaacggatcctgtatgcgccctggactagcacccgagcccctgtccgctcctcccgggagcccccctccatccgccgctcccacatctgccacaagcaattccagtaatgggggaggcccctcaaagtctggaccccctaagtgtggccctggaactaactctaccctgactaagcagatctttccttggatgaaggaaagtaggcagacaagcaagcttaagaataactcccccgggaccgcggagggttgtgggggaggcggaggtggcggaggcggaggcgggtctggcggttctggcggcgggggaggagggggggggggcggggacaagtctcccccgggaagcgcggcgagtaaacgtgcccgtacagcttatacctcggcgcagttggtagagctggagaaggagttccactttaatcgctacctctgtagacctagaagggtcgaaatggctaatctgctgaacttgtccgaaaggcagattaaaatctggtttcaaaatcgcaggatgaagtataaaaaggatcagaaagcaaaaggcctggcatcatcctccggcggcccttctcccgccggctcacctcctcagcccatgcagagtaccgctggctttatgaatgcgctccacagtatgacaccaagctacgaaagtccttcaccaccagcttttggcaaggctcatcaaaatgcctacgccctgccaagtaactaccagccgccactcaagggatgcggtgcaccacagaagtatcctcccactccagcacccgaatatgaaccgcatgttttacaagccaacggaggtgcatatggtacccccaccatgcaagggtcccccgtgtacgtgggaggaggtggttacgccgatcctctgcccccacccgccgggcccagtctttacggactaaaccacctgtctcaccacccttcggggaatctggactataacggcgccccccctatggccccatcccagcaccacgggccatgtgagccccaccctacatatactgatctctccagccatcatgcaccccctcctcaggggagaatccaggaagcccctaaactgacgcacttgtag

SEQ ID NO: 317510 - DNA, 1296 bp, Artificial Sequence
  derived and/or modified sequence
atgcagaaggccacctactacgacaacgccgccgccgccctgttcggaggctactcctcataccctggctctaatggctttggattcgacgttcctccccaacccccattccaggctgccactcacctggagggggattaccagcgctccgcctgttcgctacagagccttggcaatgccgctcctcacgccaagtcaaaagagctcaacggaagttgtatgcgtcccgggttggcacctgaaccactgtccgcccctcccggtagtccgcccccctcggccgcccccacctctgccacctctaactcatcgaacgggggcggaccaagcaaaagtggcccgccaaagtgcggccccggcactaattccactttgaccaagcagattttcccatggatgaaggaaagccgccaaacaagcaagcttaagaataactcacccggcaccgctgaaggttgtggagggggaggaggcggaggcggcggcggcggatccgggggttcaggcgggggaggcggcggggggggcggaggcgataagtcccctcctggtagtgccgccagcaagcgagcccggacggcttacacctcagcgcagttagtggagctggagaaggaattccatttcaacagatacttgtgcaggccccggcgagtggagatggcaaacctcctgaatctgtctgagagacagatcaagatttggttccagaacagaaggatgaagtataagaaggaccagaaggcaaagggcctggcgtcctccagcggtggtcccagccctgctggaagtcctccacagcccatgcaaagtacagccgggttcatgaacgcgctccactccatgacaccgagttatgaatcgcccagcccaccagcattcggcaaggcccatcagaacgcatacgccctgcctagcaactatcaacctcccctcaaggggtgtggcgctccccagaaataccctccaacccctgccccagagtacgagcctcacgtgctgcaggctaacgggggagcttacggtactcccactatgcagggatctcctgtgtatgttggaggggggggctacgccgacccgcttccacctccagcaggaccttccctctatgggctgaaccacctctcccatcacccaagcggcaacctggactataacggcgctcctccaatggccccttctcagcaccatggaccctgcgaaccacatccgacttacacagatctgagctctcatcacgcgccgccccctcaggggaggattcaggaagcccctaagctcacacatctctag

SEQ ID NO: 317511 - DNA, 1296 bp, Artificial Sequence
  derived and/or modified sequence
atgcagaaggccacctactacgacaacgccgccgccgccctgttcggcggttactctagctacccaggttctaatggattcgggttcgatgttccaccccagcccccctttcaagcagctacacatttagaaggagattaccaacggtccgcttgctctctgcagtcgctggggaatgccgccccacatgcgaagtcgaaggagctgaatggcagttgcatgaggcccgggttggccccagagccactgagtgcgcctcccggtagtcctccaccttctgcagctccgacctccgccaccagtaacagctctaatggcggagggccttccaaatcaggaccgccgaagtgtggaccagggaccaactctactctgacaaagcaaatttttccgtggatgaaagagtcaagacaaacgtccaagttaaaaaataattcaccgggcacagcagagggatgtggtggggggggcgggggtggcgggggtggcggaagcgggggtagcgggggcggaggcggcggcggaggtggtggcgacaaatctccccctggcagcgcagctagcaagcgggcccgaactgcatacacttcagcccagctggtcgaactggagaaggaattccacttcaatagatacctttgccgacctcgccgcgtggaaatggcaaacttattgaatctatctgaacgtcagattaagatatggttccagaatcgtcgtatgaaatacaagaaggaccagaaggcgaaagggctggcttcgtccagcggtgggccctctccggccggtagtcctcctcagcctatgcagagtactgcgggtttcatgaacgccctgcatagcatgaccccatcgtacgaaagtcctagcccgcctgccttcggcaaggcccatcaaaatgcgtacgccctaccatcgaattaccagccccctcttaaagggtgcggggccccccaaaagtaccctcccaccccagctcccgagtacgagccacacgttctacaggccaacggcggagcgtacggaacacccaccatgcagggaagtccagtgtatgttggagggggcggatacgcagacccactgcctccccctgctggaccttcactgtacgggctgaaccatctttctcatcatccttcgggtaacttggactataacggcgcccctcctatggcaccatctcagcaccatggaccttgcgagccgcacccgacttacaccgacctgagtagtcaccacgccccacccccccaggggcgcatacaggaggcaccgaaactgacccacctgtag

SEQ ID NO: 317512 - DNA, 1296 bp, Artificial Sequence
  derived and/or modified sequence
atgcagaaggccacctactacgacaacgccgccgccgccctgttcggcgggtactcttcataccccggctctaatggatttggtttcgatgtgccaccccaaccaccttttcaagccgcaactcacctggaaggagactatcagcgcagcgcctgctcgctgcaatcgctcggaaacgccgctcctcatgccaagtccaaagaacttaacggatcctgtatgcggcctggcctggcacctgagcctttaagcgccccaccgggcagtccccccccatccgctgcccccacaagcgccacgagcaacagttctaacggtgggggaccttcaaagtctggtccgcctaaatgcggtccgggcacaaattcaacacttacaaaacaaatcttcccatggatgaaggaatcacgacaaacgtctaagctaaagaataacagcccaggaaccgccgaagggtgcggtggcggcggcggcggaggaggtggagggggcagtggcggcagtggaggcggcggagggggtgggggcgggggagacaagtctccccccgggtctgccgcgtctaagcgcgcccgcactgcttacaccagtgcgcaactggtggaactggagaaagaatttcactttaacagatacctctgcagaccacggagggtggaaatggccaatctcctcaatctttcggaacgccagattaagatttggttccagaatcgtcggatgaagtacaaaaaggaccaaaaggccaaaggcctcgctagctcaagcggtggcccctcaccagctgggtccccaccccaacctatgcagagtacagccggattcatgaacgccctccacagcatgacaccttcctacgagagtccctcgccccctgcattcgggaaggcccatcagaatgcctatgcgctcccatcaaattaccagccacctctgaaaggatgcggcgccccgcaaaaatacccccctactcccgcccctgagtacgagcctcacgtgcttcaagcaaacggcggtgcgtacggaactcccaccatgcagggatctccggtttatgtgggaggcggagggtacgccgatcctctgcctcccccggcaggaccctccctctacggcctgaatcacttgagccaccacccatccggaaatctggactataatggagccccccctatggccccctctcagcaccacggcccttgtgaaccacatccaacctacaccgacttaagcagtcaccacgcgccacctccgcagggacggatacaagaggcgccaaaacttacccacctctag

SEQ ID NO: 317513 - DNA, 1296 bp, Artificial Sequence
  derived and/or modified sequence
atgcagaaggcgacatactatgataatgcagctgcggcattgtttggaggatactcatcatatcccggatccaatgggtttgggtttgacgtgccacctcagccaccattccaggctgctacccacctcgagggcgactatcagagaagcgcttgtagtctccagtccctgggcaacgctgctccccatgctaagtcgaaggagctgaatggttcatgtatgaggccaggactcgcccctgaaccgttaagtgcaccacccggaagcccccctccttctgcagctccaacgagcgcaaccagcaatagtagcaacggaggcggtccatctaagtccggacctcctaagtgcggacccggaaccaattcaaccctgaccaaacaaatcttcccttggatgaaagagagcagacagacttccaaactgaagaacaacagcccaggaacagccgagggctgtggtggtggtggagggggaggtggaggcggaggctccggtggctcaggagggggaggagggggtgggggaggcggtgacaaatctcccccaggatccgctgcctccaaacgagctaggaccgcctatacttccgcccaacttgtggaactcgagaaggagttccacttcaacagatatctctgtaggcctcggcgagtggagatggctaacctcctaaatctatccgaacggcaaatcaaaatttggtttcagaaccgcaggatgaaatataagaaggatcaaaaagctaaagggctggcttcttcaagcggcggaccgagtccagctggatcccccccacagcccatgcagtctaccgccggatttatgaatgctcttcacagcatgacaccctcgtacgaatccccctctccaccggctttcggaaaagcccaccagaacgcttatgctctgccaagcaattatcaaccccctcttaaaggctgtggggctccgcagaagtacccaccaacgcccgctcccgagtacgagcctcatgtgctgcaggcgaacgggggtgcttatgggacccctaccatgcagggatcaccagtgtacgtgggtgggggtgggtatgccgaccctctacccccaccagcaggtccatccttgtatggcctgaaccacctgtcgcatcatccaagcgggaatctggactacaacggcgctccccctatggcaccctcgcagcatcacggcccttgtgagccacatcctacttataccgatctcagtagtcaccacgctccacctccacagggcaggatccaggaagctccaaagctgacccacctgtag

SEQ ID NO: 317514 - DNA, 1296 bp, Artificial Sequence
  derived and/or modified sequence
atgcagaaggctacttattatgacaatgctgctgccgcattattcggaggctactcaagctacccaggcagtaacggtttcggcttcgatgtcccacctcagcccccattccaggcggcaacccatctggagggcgactatcagcggtcggcctgttcactgcaatctctcggtaacgctgcaccccatgccaaatccaaagaactgaatgggtcgtgcatgcgccctggcctggcccctgaacctcttagcgcccctccaggatctccacccccaagcgcagcccctactagtgctacatctaattcctctaacggcggaggtccttccaagtccggcccaccaaaatgtggcccaggcaccaatagcactctgaccaagcagattttcccttggatgaaggagtctagacaaacatctaagctgaaaaacaattcacctggaaccgccgaaggctgcggcggtggagggggtggcggagggggaggtggcagcgggggatccggcggaggaggtggaggaggtggtggaggggataaatcccctccaggtagcgctgcctccaaacgggctcggaccgcttacacgagtgcccaattggtggaattggagaaggaattccacttcaatagatacctctgccggccacgtagggtcgaaatggccaatctgctgaatctgtctgaacgtcagatcaaaatctggtttcagaacaggagaatgaagtacaaaaaagatcagaaggcaaaagggctggccagctcctcaggcggaccctcacccgctggctcccctccgcagcccatgcagtccacagccggtttcatgaacgcactccactccatgacgcctagctacgaaagtccaagtcctcccgcatttgggaaagcccaccagaacgcatacgctcttccatctaattaccagcctccgctgaaggggtgcggcgcaccccagaagtatccgcctactcctgccccagaatacgaacctcatgtgctccaagccaatgggggtgcttacggcacaccgactatgcagggctctcctgtctacgtgggcggaggcggatatgccgatccacttcctccccctgccggaccctctctctacggacttaatcacctgagtcaccacccctctggcaacctcgattacaatggggctcccccaatggcgccatcccagcaccacggaccctgtgagcctcacccaacgtataccgacctctccagccatcacgccccacctcctcagggcaggatccaggaagcgccaaagttaacccacttgtag

SEQ ID NO: 317515 - DNA, 1296 bp, Artificial Sequence
  derived and/or modified sequence
atgcaaaaagccacatactacgacaacgccgcagctgccctttttgggggttactcgagctaccctgggtcaaatggctttggctttgatgttcctccccagccaccctttcaggcggcaactcacctagagggcgattatcaaaggtccgcgtgctcgcttcagtcgctagggaatgccgctccacatgctaaatcaaaagagttgaacgggagctgtatgcgaccagggctagccccagagcccctgtcagctccacccggaagccctcccccttccgccgctcctacttccgcgacctccaatagcagcaacgggggtggaccatctaaatccggccctccaaagtgtggcccagggaccaattctacgctgacaaaacaaatatttccctggatgaaagaaagccgacagaccagcaagctcaaaaacaactcccccggaaccgctgaggggtgtggcggtggcggaggcggaggaggcggaggcggaagcggcggaagtggcggtggaggagggggtggtggaggaggggacaaatctcctccgggttcggcagctagcaagagggccaggacagcctatacctcagcccagctcgtggagctggagaaggaatttcactttaatcggtacctatgtaggcctagacgtgtggaaatggccaacctcctgaacctgtcagaacggcagattaaaatctggtttcagaatcggcgtatgaagtataaaaaagaccaaaaggcgaaggggctcgcatctagtagcggcggaccctccccagctggttcaccaccccagcctatgcagtccaccgctggtttcatgaatgcattgcattcgatgactccctcatacgagtccccctctccccctgctttcggtaaggcacaccagaacgcctatgctttgcctagcaattatcaaccccctctgaaaggctgcggggctccccagaaataccccccaacacctgcaccagagtacgaaccccatgtcctgcaagctaatgggggagcgtacggaacacctactatgcaaggctccccagtctacgtcggcggaggaggttatgccgatcctcttcccccacctgcagggcctagtttatatggattaaatcacttatcccatcacccgtcggggaatctagattacaatggcgctccacccatggccccatctcagcaccacggcccttgcgagccgcatcccacctacaccgacttgtcctctcaccatgctcctccccctcagggacggatacaggaggcgcctaaactcacacatctgtag

SEQ ID NO: 317516 - DNA, 1296 bp, Artificial Sequence
  derived and/or modified sequence
atgcaaaaggccacttattacgacaatgccgcagcagcgctgtttgggggatatagctcgtatccaggtagcaacggattcggatttgatgttccccctcaaccgccttttcaggcggcaacacatctcgagggagactaccagcgcagtgcatgcagccttcagagtcttggtaatgcagcgccacacgccaagtctaaagagctaaatgggtcatgcatgaggccaggtttggccccagagccactttctgcaccgcctggctccccccctcccagcgcagccccaaccagtgccacatccaatagcagtaatggtggcggaccatcaaaaagtggcccacctaagtgcggccctggcacgaactctacactgacaaaacaaatttttccttggatgaaagaaagtagacagaccagtaaacttaagaataacagtcccggaactgccgagggatgcggcggaggagggggagggggtggaggaggaggcagcgggggtagtggcggtggaggaggtggcggaggtggaggcgataaaagtcctccgggaagcgcagcctcaaaacgagcccgtaccgcctacacctctgcccaattagtggaactggagaaggagttccacttcaatcgctatctgtgcaggccgaggcgagtggagatggccaacttgctgaacctttctgagcggcagatcaagatttggtttcagaatagaagaatgaagtataaaaaggatcagaaggcaaaagggctggccagttcgagtggcggtccatcacctgcagggagccctccacagcctatgcagtccactgccggttttatgaacgctctgcactctatgactccttcctatgaaagccccagccctcccgcattcggcaaagcccaccagaacgcatacgccctcccgtccaattaccagccaccacttaagggctgcggcgcaccccagaaatatccacccactccagcccctgaatatgagccccatgtgctgcaggccaacggtggagcgtacggcacccccacgatgcaggggtcaccggtgtacgtagggggtggcggttacgctgatcccctccctccccctgctggaccgagcttatacggactcaatcacctctcccatcaccctagtggcaacctcgactacaatggcgcaccacctatggccccttcacagcaccatggaccctgtgagccacatcccacctacacagacctgagctcccaccatgcacctcccccacaggggagaatccaagaagcgcctaaattgacacacttatag

SEQ ID NO: 317517 - DNA, 1296 bp, Artificial Sequence
  derived and/or modified sequence
atgcagaaggccacctactacgacaacgccgccgccgccctgttcggcggctacagcagctaccccggcagcaacggcttcggcttcgacgtgcccccccagccccccttccaggccgccacccacctggagggcgactaccagagaagcgcctgcagcctgcagagcctgggcaacgccgccccccacgccaagagcaaggagctgaacggcagctgcatgagacccggcctggcccccgagcccctgagcgccccccccggcagccccccccccagcgccgcccccaccagcgccaccagcaacagcagcaacggcggcggccccagcaagagcggcccccccaagtgcggccccggcaccaacagcaccctgaccaagcagatcttcccctggatgaaggagagcagacagaccagcaagctgaagaacaacagccccggcaccgccgagggctgcggcggcggcggcggcggcggcggcggcggcggcagcggcggcagcggcggcggcggcggcggcggcggcggcggcgacaagagcccccccggcagcgccgccagcaagagagccagaaccgcctacaccagcgcccagctggtggagctggagaaggagttccacttcaacagatacctgtgcagacccagaagagtggagatggccaacctgctgaacctgagcgagagacagatcaagatctggttccagaacagaagaatgaagtacaagaaggaccagaaggccaagggcctggccagcagcagcggcggccccagccccgccggcagccccccccagcccatgcagagcaccgccggcttcatgaacgccctgcacagcatgacccccagctacgagagccccagcccccccgccttcggcaaggcccaccagaacgcctacgccctgcccagcaactaccagccccccctgaagggctgcggcgccccccagaagtacccccccacccccgcccccgagtacgagccccacgtgctgcaggccaacggcggcgcctacggcacccccaccatgcagggcagccccgtgtacgtgggcggcggcggctacgccgaccccctgcccccccccgccggccccagcctgtacggcctgaaccacctgagccaccaccccagcggcaacctggactacaacggcgccccccccatggcccccagccagcaccacggcccctgcgagccccaccccacctacaccgacctgagcagccaccacgccccccccccccagggcagaatccaggaggcccccaagctgacccacctgtag

SEQ ID NO: 317518 - DNA, 450 bp, Artificial Sequence
  derived and/or modified sequence
atgaagcccgccggcaacggcttccccagccccctggccggccccggcagcagaagaggctgcgtgcccggcctgaccacctggatcagagccagagccagagagaccggcagcagaagaggcagaaacgtgttcagccccgagagagccgccggcagcggcggctgcttctgcagcggcagaatccccagagtgagcgccgtggacgccctgagagtggccggcgccagaagagccgccgtgagcagaggcaaggccggcgtgcccctgagatacagagagagacacctggagctgagcgagtggcccagaaagcccgccagagcccacttccccgccagaaccggctgctggtggttctggtggctgctgagcggcggcacccccggcaccagcaagggcggcttcatctggctgtacctgacctggcagttcctgctgaacaagtag

SEQ ID NO: 317519 - DNA, 450 bp, Artificial Sequence
  derived and/or modified sequence
atgaagccagctggaaatggcttccccagccccctggccggccctggcagccggcggggctgtgtgcccggcctgaccacctggatccgggcccgggcccgggagaccggcagcagaagaggaagaaatgtgttcagccctgagagagctgctggcagcggcggctgcttctgcagcggccgcatcccccgggtgtctgctgtggatgccctgcgggtggccggggccaggagagctgctgtgtcccggggcaaggccggcgtgcccctgcgctaccgggagcggcacctggagctgtctgagtggcccaggaagccagcccgggcccacttccctgccaggacaggctgctggtggttctggtggctgctgagcggcggcaccccaggcaccagcaaaggaggcttcatctggctgtacctgacctggcagttcctgctgaacaagtag

SEQ ID NO: 317520 - DNA, 1077 bp, Artificial Sequence
  derived and/or modified sequence
atgagacccggcctcgcaccggagccactgtccgcaccaccaggatctccccccccttccgctgcgcctactagtgctacttccaatagtagcaatgggggaggaccatcgaagtcgggtcctccaaaatgtggacccggcacgaactccactctcaccaagcagatcttcccttggatgaaggaatcgcgccagacatccaaactaaaaaacaatagcccaggtacagccgagggatgcggagggggtggggggggcggtgggggggggggatctggcggatcaggaggcggaggaggagggggcggaggaggggataaaagtcccccagggtccgctgcgtccaaacgagctcgtaccgcctataccagtgcacagttggtcgagctggaaaaagagtttcactttaacagatacctgtgcagacccagacgagtggaaatggccaacctgcttaacttgagcgagcggcagattaagatatggttccagaatcggagaatgaagtacaagaaggaccagaaggccaagggtttggcatctagctccggaggcccatctcccgctgggagtcctcctcagcctatgcagagtacagcgggatttatgaacgcgctgcactcgatgaccccttcctacgagagtcccagtccacctgcattcggcaaggcccaccagaatgcttacgcattaccaagcaattaccagccacctttaaagggatgtggcgctccacagaagtatccgccaacaccagcccctgagtacgaacctcacgttctgcaagctaatgggggcgcctatggaactcctacaatgcagggcagccccgtttacgttggagggggtggctatgcagaccccctgcctccccctgctggaccctctctgtatggcctgaatcatctgagtcaccacccctctggaaacttggactataacggagcacctccaatggcccccagccagcaccacgggccatgcgaaccccaccctacctacacagatctctcgagtcatcatgctccccccccacaggggcggattcaggaagcgccaaaactgactcatctgtag

SEQ ID NO: 317521 - DNA, 1077 bp, Artificial Sequence
  derived and/or modified sequence
atgcgacccggactggctcccgaaccgctgtccgccccccccgggtcgccaccaccatccgctgcccctacatccgcaacaagcaacagctcgaatgggggcggcccttccaagtccggccctccaaagtgtggccctgggaccaatagtaccctgactaagcaaatttttccatggatgaaagaaagcaggcagacctcaaaactaaaaaacaacagtcctggcacggcagaagggtgtggtggggggggaggcggaggagggggcggaggcagcggcggatctggaggcggcgggggaggtggaggaggaggtgacaaaagcccacctggctctgctgcaagtaagagggcaagaactgcctacacgagcgcgcaacttgttgagcttgagaaggaattccactttaaccggtatctctgtaggccacgtcgggttgaaatggctaatctgctgaacttgagcgagcggcagatcaagatctggtttcagaaccgtaggatgaagtataagaaagatcagaaagccaagggactggcatcgagctcaggggggccatcaccagccgggtcccctccacaaccaatgcaatctaccgcaggattcatgaatgcgctgcatagcatgacgccatcgtatgagtcaccgtcacccccagcctttggaaaagctcaccagaacgcctatgcactgccgagtaattatcagccacctttgaagggctgcggggcccctcaaaagtacccaccaacacccgccccagaatacgagccacacgtactccaagcaaacggcggcgcttatggaaccccaactatgcaaggcagcccagtgtacgttggaggcgggggctatgccgaccccctccccccaccggccggtcccagtctgtatggcttgaaccatctgtcccaccacccgagtggcaatctggactacaatggagctccaccaatggccccctcacaacaccacggcccctgcgagccacatccaacctacacggacctctcaagtcaccatgcacccccaccgcagggaaggatccaagaagcacccaagcttacccatttgtag

SEQ ID NO: 317522 - DNA, 1077 bp, Artificial Sequence
  derived and/or modified sequence
atgaggcctggcctggcccctgagcccctgagcgcccctcctggcagccccccacccagcgctgcccccaccagcgccaccagcaacagcagcaatggaggcggccccagcaagagcggcccccccaagtgtggccctggcaccaacagcaccctgaccaagcagatcttcccctggatgaaggagagccggcagaccagcaagctgaagaacaacagccctggaacagctgagggctgcggcggcggcggcggcggcggcggcggcggcggcagcggcggcagcggcggcggcggcggcggcggcggcggcggggacaagagccccccaggcagcgctgccagcaagagggccaggacagcctacaccagcgcccagctggtggagctggagaaggagttccacttcaaccgctacctgtgccggccccggcgggtggagatggccaacctgctgaacctgtctgagcggcagatcaagatctggttccagaacagaaggatgaagtacaagaaggaccagaaggccaagggcctggccagcagcagcggcggccccagccctgctggcagccccccccagcccatgcagagcacagctggcttcatgaatgccctgcacagcatgacccccagctatgagagccccagccccccagccttcggcaaggcccaccagaatgcctatgccctgcccagcaactaccagccccccctgaagggctgtggggccccccagaagtacccacccaccccagccccagaatatgagccccacgtgctgcaggccaacggcggggcctacggcacccccaccatgcagggcagccctgtgtatgtgggcggcggcggctacgccgaccccctgcccccacctgctggccccagcctgtatggcctgaaccacctgagccaccaccccagcggcaacctggactacaacggggccccacccatggcccccagccagcaccacggcccctgtgagccccaccccacctacacagacctgagcagccaccacgcccccccaccccagggccgcatccaggaggcccccaagctgacccacctgtag

SEQ ID NO: 317523 - DNA, 1077 bp, Artificial Sequence
  derived and/or modified sequence
atgcggcccggcctggcccccgagcccctgagcgccccccccggctctccccccccttcggcagcccctactagtgcaacgtcaaactcctctaacggcggaggtccttcaaagtcaggaccgcctaagtgcgggccagggaccaacagtactctgactaagcagatatttccttggatgaaggagtcccgacagaccagcaagctgaagaacaacagccctggaactgccgaaggatgcggcggaggaggcgggggcggggggggaggcgggagcgggggttccggaggcggcggcggaggggggggggggggcgataagtctcctcccggatcagccgcctccaagcgagcaaggacagcttacaccagcgcccagcttgtcgagcttgagaaggaattccacttcaaccgttacttgtgtcggccaagaagggttgaaatggccaacctgttgaacctgtctgaacgccagatcaaaatatggttccagaacaggcggatgaaatacaagaaagatcagaaagctaagggcctggcttcctcttctggcgggccatcaccagccgggagcccaccgcagcctatgcaatctactgcaggatttatgaacgctcttcatagtatgactccaagctacgagagcccctctcccccagcttttgggaaggcccaccagaatgcctatgctctgccctcaaattaccagccacccttaaagggttgtggagctcctcagaagtaccctcccacaccagcccccgaatatgaaccgcatgtccttcaggccaacggcggagcttacggtacgccaactatgcaagggtcacccgtctatgtggggggaggcggctacgctgatccactccccccacctgcaggcccctctctgtatggtctgaaccacttaagtcatcacccatcgggtaacctagattataacggtgctcctcctatggcgccttcccagcaccatggtccgtgcgagcctcaccctacctacacggacctcagttcccatcacgccccaccccctcagggccgcatacaagaggcgcccaaactcacccacttgtag

SEQ ID NO: 317524 - DNA, 1077 bp, Artificial Sequence
  derived and/or modified sequence
atgcggcccggcctggcccccgagcccctgagcgccccccccggcagtcctccgccaagcgccgcccctacgagcgccactagtaactcttccaacggcggtggccccagtaaatctggaccacccaaatgtggacctgggactaacagcacattaactaaacagatattcccctggatgaaggaatctaggcagacaagtaagctaaaaaataattcccctggcacggccgaaggatgtggcggaggcggcggagggggtggcggcgggggatctggaggttctgggggcggcggaggcggcgggggaggcggcgacaaatccccccccggaagcgcggcgtccaagcgagctagaacagcttacacatccgcccagttggttgaactcgagaaggagttccattttaaccgatacctgtgccgacccagacgagtcgagatggccaatctgctcaacctgagtgaaagacaaatcaaaatctggttccagaaccgccgcatgaagtacaagaaggatcaaaaagctaaaggactggcatccagctccggcgggccctcccctgcaggttcccccccacagcccatgcagtctaccgccggctttatgaacgcactgcactccatgactccatcatacgagtccccgagcccccccgccttcgggaaggcccatcagaacgcctacgctctcccttctaattatcaaccacctcttaaagggtgcggggcccctcaaaagtatccaccaacacccgccccagagtacgaaccacatgttctacaggccaacggcggcgcatacgggaccccaactatgcagggaagcccggtgtacgtgggcggcgggggttacgcggaccccctccccccacctgccggtccgtctctttatggtctcaatcatctttctcatcatccttctggaaacttagactacaacggagctcctcctatggccccatcacagcaccacgggccgtgtgaaccacatccgacctacaccgatttaagctcccaccacgctcccccaccacagggaagaatccaggaagcccctaaacttacccacctctag

SEQ ID NO: 317525 - DNA, 1077 bp, Artificial Sequence
  derived and/or modified sequence
atgagaccaggacttgcgcctgagcccctttccgccccacctggaagcccacccccatcagcggcaccgacgtctgccacaagcaattcttccaacgggggaggcccttccaagtccggcccacccaaatgtgggcctggtacaaacagcacgctaacaaaacaaatcttcccctggatgaaggaatctcgtcagacatccaagctcaaaaataacagccccggaacggccgaaggctgtggcggtggcggtggcggtgggggagggggtgggagtggcggaagcggcggaggagggggtggcggaggcggaggggacaagagccctccaggttccgcagcaagcaagcgtgcacgcacagcctacacatctgcgcagctggtggagttagaaaaagagtttcatttcaataggtatctgtgtaggcctaggagagtcgagatggccaaccttctgaacctgtcagaacgacagattaaaatatggttccaaaacagaaggatgaaatataagaaggaccaaaaagcaaaaggcttggcgtctagcagtggcggacctagcccagccggtagcccgccacaacccatgcaaagtacagcagggtttatgaacgcccttcattctatgacacctagttatgaatctccgtctcccccagcattcgggaaagcgcaccagaacgcctacgccttaccatccaactatcaaccaccactgaaagggtgcggggcaccacagaagtacccacccacaccggctccagagtatgaacctcacgtgctgcaggcaaatggtggggcttacggtacacctaccatgcagggctcccccgtctacgtgggaggcggtgggtacgcagacccattgccgcctccggcagggccaagtctgtatggcctcaaccacctcagtcaccaccctagcggcaatctggattataatggagcccctccaatggcgcctagtcaacaccatggaccctgcgagccacatccaacttacacggatctgagtagccaccacgccccaccacctcaagggaggatacaggaggcacctaagctcacacacctgtag

SEQ ID NO: 317526 - DNA, 1077 bp, Artificial Sequence
  derived and/or modified sequence
atgaggcctgggctggcgcctgagccactcagtgctccccctggctcacctcctcccagcgccgcacctacttccgccacttctaactcaagcaacggaggtgggccttccaagtcagggcctcctaaatgtgggcctggaactaattctacactcacaaaacagattttcccatggatgaaggagtctcggcagaccagcaagcttaaaaacaattcacctggcacagccgaggggtgcggaggcggaggcggagggggagggggaggaggcagcggcggatctggaggtggtgggggaggaggcggtggcggtgacaaatctccacccggatccgccgcatctaaacgggcacgaaccgcctacaccagtgcacagctggttgaactggagaaggaattccacttcaaccgctatctttgcaggccgaggcgagtggaaatggccaatctcttgaatctgtcagaaaggcaaattaagatctggttccagaataggcgtatgaaatacaaaaaagatcagaaagctaaagggcttgcctcatcatccggtggaccaagtcctgccggaagtccccctcagcctatgcagagcaccgcaggcttcatgaacgcactccattccatgactccttcctacgaaagtccctccccaccagctttcggaaaggcccaccagaacgcttatgccttacccagcaactaccaaccacccctaaagggctgcggggctcctcaaaagtatcccccaacgcctgctcctgaatatgagcctcacgtactccaggctaacggaggtgcctatgggactcctaccatgcagggaagcccagtgtatgtggggggagggggatacgccgatcccctgcctccacctgctgggccatcactgtatggtctgaatcatttgtcgcatcacccttctgggaacctggattacaacggagccccaccgatggccccttcccaacaccacggtccatgcgaaccgcacccaacatatacagacctgtcctcccatcatgctccaccacctcagggacgtatacaggaagcccctaagctcacccatctgtag

SEQ ID NO: 317527 - DNA, 1077 bp, Artificial Sequence
  derived and/or modified sequence
atgagacccggcctggcccccgagcccctgagcgccccccccggcagccccccccccagcgccgcccccaccagcgccaccagcaacagcagcaacggcggcggccccagcaagagcggcccccccaagtgcggccccggcaccaacagcaccctgaccaagcagatcttcccctggatgaaggagagcagacagaccagcaagctgaagaacaacagccccggcaccgccgagggctgcggcggcggcggcggcggcggcggcggcggcggcagcggcggcagcggcggcggcggcggcggcggcggcggcggcgacaagagcccccccggcagcgccgccagcaagagagccagaaccgcctacaccagcgcccagctggtggagctggagaaggagttccacttcaacagatacctgtgcagacccagaagagtggagatggccaacctgctgaacctgagcgagagacagatcaagatctggttccagaacagaagaatgaagtacaagaaggaccagaaggccaagggcctggccagcagcagcggcggccccagccccgccggcagccccccccagcccatgcagagcaccgccggcttcatgaacgccctgcacagcatgacccccagctacgagagccccagcccccccgccttcggcaaggcccaccagaacgcctacgccctgcccagcaactaccagccccccctgaagggctgcggcgccccccagaagtacccccccacccccgcccccgagtacgagccccacgtgctgcaggccaacggcggcgcctacggcacccccaccatgcagggcagccccgtgtacgtgggcggcggcggctacgccgaccccctgcccccccccgccggccccagcctgtacggcctgaaccacctgagccaccaccccagcggcaacctggactacaacggcgccccccccatggcccccagccagcaccacggcccctgcgagccccaccccacctacaccgacctgagcagccaccacgccccccccccccagggcagaatccaggaggcccccaagctgacccacctgtag

SEQ ID NO: 317528 - protein, 224 aa, Artificial Sequence
  derived and/or modified sequence
MSSYFVNSTFPVTLASGQESFLGQLPLYSSGYADPLRHYPAPYGPGPGQDKGFATSSYYPPAGGGYGRAAPCDYGPAPAFYREKESACALSGADEQPPFHPEPRKSDCAQDKSVFGETEEQKCSTPVYPWMQRMNSCNSSSFGPSGRRGRQTYTRYQTLELEKEFHYNRYLTRRRRIEIAHALCLTERQIKIWFQNRRMKWKKESKLLSASQLSAEEEEEKQAE

SEQ ID NO: 317529 - DNA, 444 bp, Artificial Sequence
  derived and/or modified sequence
atgattgtgagtcgttatggcctggtgggatgtgatgctggtcaggtgcgcccaaaagtggaactttctttacccgcctttctagctctcccaaagaaggaatttaaggacaagccagaggttgaagaaaacaacctaatagaggaggccgtctggcagacttccttaaagatacctctgccccaagcccaggtccgcgagcgcgggggaggttccgcagggatctccgcagcacacccttctcagttgtgtacagccggagtccgcccttctagcgctctgagagcttcaagacctggttggagcctgcagactgcagctctccaggaaccaaccggtgccgattcctttttgccacgttcacataagacagctgttgacctgcatagcgcgagaatccccctgtacattcacacaaaatgcctccttatggagagcgtatag

SEQ ID NO: 317530 - DNA, 1660 bp, Artificial Sequence
  derived and/or modified sequence
caccacacctaggtcggagcactgtcgtccttcagggctccagcctcttgatatttttgtacttcagtatcagctcgatagagcaaaagagagagaggacgagagagggggtcagagaaggggaagcaacggctctcacgttgggacaatattatctggaagctgaagaagaaactgaatactccttccttcctccccacccattcctttaaatccggagggggaaaaaatcccaaggtctgcaaaggcgcggcgctcggactataaaacacaacaaatcataaacccggcggagcagcagcggccgcgcgcgcctcccctcccaatgagttcctatttcgtgaactccaccttccccgtcactctggccagcgggcaggagtccttcctgggccagctaccgctctattcgtcgggctatgcggacccgctgagacattaccccgcgccctacgggccagggccgggccaggacaagggctttgccacttcctcctattacccgccggcgggcggtggctacggccgagcggcgccctgcgactacgggccggcgccggccttctaccgcgagaaagagtcggcctgcgcactctccggcgccgacgagcagcccccgttccaccccgagccgcggaagtcggactgcgcgcaggacaagagcgtgttcggcgagacagaagagcagaagtgctccactccggtctacccgtggatgcagcggatgaattcgtgcaacagttcctcctttgggcccagcggccggcgaggccgccagacatacacacgttaccagacgctggagctggagaaggagtttcactacaatcgctacctgacgcggcggcggcgcatcgagatcgcgcacgccctgtgcctgacggagaggcagatcaagatatggttccagaaccgacgcatgaagtggaaaaaggagagcaaactgctcagcgcgtctcagctcagtgccgaggaggaggaagaaaaacaggccgagtgaaggtgctggaaagggagggaggacgcgaggggaaaggcctgtggggagccgagggcgtcagagagacccgggaaggaaggctctcgggtgggggagccaggagacctgctctccggcgcagacaggcggggcccagcgctctcctggacgcccccgcccgcacagctcccggcgggtgctctgaggcctcactactcgagcccacccagcatcccgcgcgcccttccttcccgaggaactcgcctcagcctgatcaggcttcctggtgagaactgaggagcggactcacttgatgtttcctggaagcagagcaaaatgctcttgtccctgtcgcgtctcattttgtccatgtcccccgtgcacggttcaatggtagattcgctgtcccctcagcgggggccttgaagactccctgatcccagacctgtcgtctctcccaccccctccccaaagccactggaaggagcacatactacctagaagtaagaagaggagcctcagaagaaaacaaagttctattttattaattttctatgtgttgtgtttgtagtcttgtcttagctctggacgtgaaatacttcgatgatgatgatgatgatgatgatgataataataataataataacaacaacaacaacaataataaagatgtgaaaactc

SEQ ID NO: 317531 - DNA, 3434 bp, Artificial Sequence
  derived and/or modified sequence
taatgcagcattcttttggacaccacacctaggtcggagcactgtcgtccttcagggctccagcctcttgatatttttgtacttcagtatcagctcgatagagcaaaagagagagaggacgagagaggggggtgaggagaaaagagagagagcgcgagagggagagggagagaaggaggggtgggaattacacaaagagagaaccaaaaataattttgattcctaagttaatttgctcactgatctgggattttagtcaccatggagggtaaatggacaatctgcccaggactgcagcccgatactatttttcaaagccagaacttactccattttctatgcaaatgtcagaaaaatgaaacaccctctctcccaagtcagagaaggggaagcaacggctctcacgttgggacaatattatctggaagctgaagaagaaactgaatactccttccttcctccccacccattcctttaaatccggagggggaaaaaatcccaaggtctgcaaagctaaaacccaatctcggatatactactaataggcgcggcgctcggactataaaacacaacaaatcataaacccggcggagcagcagcggccgcgcgcgcctcccctcccaatgagttcctatttcgtgaactccaccttccccgtcactctggccagcgggcaggagtccttcctgggccagctaccgctctattcgtcgggctatgcggacccgctgagacattaccccgcgccctacgggccagggccgggccaggacaagggctttgccacttcctcctattacccgccggcgggcggtggctacggccgagcggcgccctgcgactacgggccggcgccggccttctaccgcgagaaagagtcggcctgcgcactctccggcgccgacgagcagcccccgttccaccccgagccgcggaagtcggactgcgcgcaggacaagagcgtgttcggcgagacagaagagcagaagtgctccactccggtctacccgtggatgcagcggatgaattcgtgcaacagttcctcctttgggcccagcggccggcgaggccgccagacatacacacgttaccagacgctggagctggagaaggagtttcactacaatcgctacctgacgcggcggcggcgcatcgagatcgcgcacgccctgtgcctgacggagaggcagatcaagatatggttccagaaccgacgcatgaagtggaaaaaggagagcaaactgctcagcgcgtctcagctcagtgccgaggaggaggaagaaaaacaggccgagtgaaggtgctggaaagggagggaggacgcgaggggaaaggcctgtggggagccgagggcgtcagagagacccgggaaggaaggctctcgggtgggggagccaggagacctgctctccggcgcagacaggcggggcccagcgctctcctggacgcccccgcccgcacagctcccggcgggtgctctgaggcctcactactcgagcccacccagcatcccgcgcgcccttccttcccgaggaactcgcctcagcctgatcaggcttcctggtgagaactgaggagcggactcacttgatgtttcctggaagcagagcaaaatgctcttgtccctgtcgcgtctcattttgtccatgtcccccgtgcacggttcaatggtagattcgctgtcccctcagcgggggccttgaagactccctgatcccagacctgtcgtctctcccaccccctccccaaagccactggaaggagcacatactacctagaagtaagaagaggagcctcagaagaaaacaaagttctattttattaattttctatgtgttgtgtttgtagtcttgtcttagctctggacgtgaaatacttcgatgatgatgatgatgatgatgatgataataataataataataacaacaacaacaacaataataaagatgtgaaaactcgacgctcggtcacctccaatcctcccctgccattttttcctctctcctcaacccccagcctctccatctttcctgagccagaattcttcagcaaaggcgagagccctggcccgccgaagcgagccctgttcgactgggaagttacagctgagataaaggctggagcgatcagtcctgcccaggccccagcgctgcgtttccctggtgctgaggctcacagccgcttctccccgtgcagacttgggggatggagaggtgctgtgtccctctcattctctagcctttcctcgtgtatacacagcactaagggagccactgaggcccctaaagctctctggcggagacggagccatagtctgggggcctctgcagcgcttttctgtcctcaccttcgcagcgacccctggtctttggcccgtccacatggccaggttttttcgccagccttggccctccgctcctggcctgtggctctggagactgaaaaatggggccactgggtatctctcaccctgcagctgaaggctccaggtgccccttcccacctcaagtagcagatcagcctcaagtaggagatcagcctcaagtaggggaatgtaaagccaccagccaggcacaggccgaaggccacaactttcccttgctccttggagaccccagggcaggaggccaggtgatggggcttttagtgtcatcctctcaacccagaatggctcattctctctctgcttgcaccggcacccagaaggcaagctgcggtcactgttttcctttattcctccgccctctcgcttcctttcttatttttaaagaaaatagtcccctcctaataggagaccagctgcggcggtctctggccgcccagcgtgctcagcaaagcatgcgggtccttggaaccccttttccgggaaggcggctgccaccaggcaaattctcaaactgcctagctgcgagtgagggacctgtagtggggcctccgaatgcaatagccgaggaggaggggaagggatcccgctttacaaactctcagacacatgttactactcaaactaagcagcagacgcggtggccgctgcagtcttttcggcaactaggccgcttagccccagctgtgctcggtttctggggtccctgtcctgctctgtcactccccacgcctgggctaaggaccaccaaggaggtccggaaggggatttcgaacttccaagtggcccaggagaagtgaacgcttctccttctttttcaagcctcccgcccagccctgccggctcggcctgggcgctgtggaccggtaacagcagttccaccaggatgcaggccggactaagctcctggggaaaacccgttgcaataattgtttttcacacacaacttccaacccttcccccatttccgcctccaattcggagacttgcaaagcccaagaaagggaaaagcaactctatctttgatcttctcatccaaagttaaaataat

SEQ ID NO: 317532 - DNA, 387 bp, Artificial Sequence
  derived and/or modified sequence
atgtctatttccggcactctgtctagctattacgtcgacagcataatatcccacgagtccgaggatgcccccccggctaagttcccgtctgggcagtacgcctctagtcggcaaccaggtcacgccgagcatctcgagttcccatcttgtagcttccagcctaaggcgcccgtgtttggtgcatcctgggcgcccctgagtcctcatgccagtggctccctcccttctgtctatcacccgtatatccagcctcagggagttcctccagctgagtcaagatacctgcggacatggctggagccggcgccccgcggaggggcagctcaaacaggccacgcccgagttcaatttggtaatttcggcggacaggggggccgcgcagtatag

SEQ ID NO: 317533 - DNA, 387 bp, Artificial Sequence
  derived and/or modified sequence
atgagcatcagcggcaccctgagcagctactacgtggacagcatcatcagccatgaaagtgaagatgcccccccagccaagttccccagcggccagtatgccagcagccggcagcccggccacgccgagcacctggagttccccagctgcagcttccagcccaaggcccctgtgtttggagcctcctgggcccccctgagcccccacgccagcggcagcctgcccagcgtgtaccacccctacatccagccccagggcgtgcccccagctgagagccgctacctgcggacctggctggagcccgccccccggggcggggccgcccagacaggccacgcccgggtgcagtttggaaactttggaggccagggcggccgggctgtgtag

SEQ ID NO: 317534 - DNA, 387 bp, Artificial Sequence
  derived and/or modified sequence
atgagcatcagcggcaccctgagcagctactacgtggacagcatcatatcacatgagagtgaagacgcaccaccggctaagttccctagtggacagtatgccagctcccgacagcctggccacgccgaacatctggaatttccttcttgttcgtttcagcctaaagcccccgtctttggagcttcttgggcccctctgtccccgcatgcttcgggatcccttccatcagtgtatcacccctatatccagccgcagggcgtgccacctgccgaatcccgctacctgcggacttggctcgagccggctcctaggggtggcgcggctcagactggtcatgcaagagttcagttcggaaacttcggaggtcagggtggcagggcagtgtag

SEQ ID NO: 317535 - DNA, 387 bp, Artificial Sequence
  derived and/or modified sequence
atgtcgatttctgggactctgagctcatactacgttgattccatcatttcacacgaaagcgaggatgccccacctgctaagtttcctagtggccaatatgctagcagtagacagcctggtcacgctgagcatctggaattcccatcatgctcatttcaaccgaaggcccctgttttcggagctagctgggcaccgttgagcccccacgcatctgggtcactgccatccgtgtatcacccctacatacagccccaaggtgttccgccagcagagtcacgctacctaaggacctggttggagccagccccacgagggggagctgcgcagacaggtcatgccagagtgcagtttggtaatttcggaggacagggaggacgcgctgtatag

SEQ ID NO: 317536 - DNA, 387 bp, Artificial Sequence
  derived and/or modified sequence
atgagcatcagcggcaccctgagcagctactacgtggacagcatcatcagccacgagagcgaggacgccccccccgccaagttccccagcggccagtacgccagcagcagacagcccggccacgccgagcacctggagttccccagctgcagcttccagcccaaggcccccgtgttcggcgccagctgggcccccctgagcccccacgccagcggcagcctgcccagcgtgtaccacccctacatccagccccagggcgtgccccccgccgagagcagatacctgagaacctggctggagcccgcccccagaggcggcgccgcccagaccggccacgccagagtgcagttcggcaacttcggcggccagggcggcagagccgtgtag

SEQ ID NO: 317537 - DNA, 231 bp, Artificial Sequence
  derived and/or modified sequence
atgatcgccggcgagcacagactggaccccgccaccatcagcctgggcgtggaccagaccgacgaccaccagcagcccacccacagcagaatcagaaagaagagagtgagccccaccagcgtgtggttccagccctacttctgcatcctgaagaccctgtgcaccaccctggacaccgtgcaggacgacgccaccagcagctggatgctgatctgccacgtggacttctag

SEQ ID NO: 317538 - DNA, 575 bp, Artificial Sequence
  derived and/or modified sequence
agagaaggggaccgggctgggactgtacactgggcctcagtccctcaaatccgggaccgggcgtccgcagctcggctggccgggactcccttcgggacgctgaggaggaaggggaaggtgtgggccctgctccttcgggacgccccaggctggccagcagctcacacatccgcattgcgccctctgatcccagcgttggggcggatagctagcgttgggcctgcccctgttttggggcagtcgcccaaacgacgccgcacgcctagtggcgagctgaacccagactaggacacccgaagaccaaatggatagagtgagaaggaaatgggggttagcaacctgaattgagatggcaggattttcataatatatgtagtatgagttccacatcttggcctcttacccagcttcagcagtctcagctccaccagttagagaataaatgggatttgcatgaactccactctgagctgaaatacagactgcggtgttaatatccttttcttctgattgttattaacaggtccttatgtcgtcagaagatcgagaagctcaggaggatgaattgctggccc

SEQ ID NO: 317539 - protein, 149 aa, Artificial Sequence
  derived and/or modified sequence
MARTVVLITGCSSGIGLHLAVRLASDPSQSFKVYATLRDLKTQGRLWEAARALACPPGSLETLQLDVRDSKSVAAARERVTEGRVDVLVCNAGLGLLGPLEALGEDAVASVLDVNVVGTVRMLQAFLPDMKRRGSGRVLVTGSVGGLMA

SEQ ID NO: 317540 - protein, 148 aa, Artificial Sequence
  derived and/or modified sequence
MACTVVLITGCSSGIGLHLAIHLALDPSQSFKVYATLRDLKTQGRLWEAARALACPQGSLERLQLDVRNSSSLAAARERVTEGRVDVLVCDTGLGLLGPLGEDAVASVLDVNVVGTVRVLQDFLPDMKRPGSGRVLVTGSMGGLMGEW

SEQ ID NO: 317541 - DNA, 1220 bp, Artificial Sequence
  derived and/or modified sequence
acagtctcaccatggcccgcaccgtggtgctcatcaccggctgttcctcgggcatcggcctgcacttggccgtacgtctggcttcagatccatcccagagcttcaaagtgtatgccacgttgagggacctgaaaacacagggccggctgtgggaggcggcccgggccctggcatgccctccgggatccctggagacgttgcagctggacgtaagggactcaaaatccgtggccgctgcccgggaacgcgtgactgagggccgcgtggacgtgctggtgtgtaacgcaggcctgggcctgctggggccgctggaggcgctgggggaggacgccgtggcctctgtgctggacgtgaatgtagtagggactgtgcggatgctgcaggccttcctgccagacatgaagaggcgcggttcgggacgcgtgttggtgaccgggagcgtgggaggattgatggcttgagcctgatcgagtgcggcccagtgcacaccgccttcatggagaaggtgttgggcagcccagaggaggtgctggaccgcacggacatccacaccttccaccgcttctaccaatacctcgcccacagcaagcaagtctttcgcgaggcggcgcagaaccctgaggaggtggcggaggtcttcctcaccgctttgcgcgccccgaagccgaccctgcgctacttcaccaccgagcgcttcctgcccctgctgcggatgcgcctggacgaccccagcggctccaactacgtcaccgccatgcaccgggaagtgttcggcgacgttccggcaaaggccgaggctggggccgaggctgggggcggggccgggcctggggcagaggacgaggccgggcgcggtgcggtgggggaccctgagctcggcgatcctccggccgccccgcagtaaaggcttcctcagccgctgtctcccgcgcccttctttgtcccctgggtctgtgtggtccctggggatggggcggcggtagcagctgtgggtggctaattaagatagatcgcgttagccagttttaccagcgcagctaggcgcgatggctgtcgcctcagcctcccaagtagctgggataccggctaattttgtatgttcggtagagacggggtttctccatgttggtcaggctggtctcaaactctcgaccttaggtgatccgcccgcctcggcctctcagattgctgggcatacaggcatgagccaccgcgaccgg

SEQ ID NO: 317542 - DNA, 321 bp, Artificial Sequence
  derived and/or modified sequence
atgagacccaagaccctgagaaacagcgccgccagaagcagaaaggagcccggcttcctgaaccaccacatggagggcagctgcctgcagctgggcgagctgagcagcgtgggctactggtggcccttcggccaccccggccccgcccagggccacctgcccgtggccgtgtgggccagctgggtggtggccggcatcagcatcgccctgtacctgcccccccaccccgagggcagatacgagggccccttcaagagacacaccaagaccttcagaagcgcccagtgcgccgactgcctgacctgcgccctggagccctag

SEQ ID NO: 317543 - protein, 1005 aa, Artificial Sequence
  derived and/or modified sequence
MARALCPLQALWLLEWVLLLLGPCAAPPAWALNLDPVQLTFYAGPNGSQFGFSLDFHKDSHGRVAIVVGAPRTLGPSQEETGGVFLCPWRAEGGQCPSLLFDLRDETRNVGSQTLQTFKARQGLGASVVSWSDVIVACAPWQHWNVLEKTEEAEKTPVGSCFLAQPESGRRAEYSPCRGNTLSRIYVENDFSWDKRYCEAGFSSVVTQAGELVLGAPGGYYFLGLLAQAPVADIFSSYRPGILLWHVSSQSLSFDSSNPEYFDGYWGYSVAVGEFDGDLNTTEYVVGAPTWSWTLGAVEILDSYYQRLHRLRGEQMASYFGHSVAVTDVNGDGRHDLLVGAPLYMESRADRKLAEVGRVYLFLQPRGPHALGAPSLLLTGTQLYGRFGSAIAPLGDLDRDGYNDIAVAAPYGGPSGRGQVLVFLGQSEGLRSRPSQVLDSPFPTGSAFGFSLRGAVDIDDNGYPDLIVGAYGANQVAVYRAQPVVKASVQLLVQDSLNPAVKSCVLPQTKTPVSCFNIQMCVGATGHNIPQKLSLNAELQLDRQKPRQGRRVLLLGSQQAGTTLNLDLGGKHSPICHTTMAFLRDEADFRDKLSPIVLSLNVSLPPTEAGMAPAVVLHGDTHVQEQTRIVLDCGEDDVCVPQLQLTASVTGSPLLVGADNVLELQMDAANEGEGAYEAELAVHLPQGAHYMRALSNVEGFERLICNQKKENETRVVLCELGNPMKKNAQIGIAMLVSVGNLEEAGESVSFQLQIRSKNSQNPNSKIVLLDVPVRAEAQVELRGNSFPASLVVAAEEGEREQNSLDSWGPKVEHTYELHNNGPGTVNGLHLSIHLPGQSQPSDLLYILDIQPQGGLQCFPQPPVNPLKVDWGLPIPSPSPIHPAHHKRDRRQIFLPEPEQPSRLQDPVLVSCDSAPCTVVQCDLQEMARGQRAMVTVLAFLWLPSLYQVWTQLLRALEERAIPIWWVLVGVLGGLLLLTILVLAMWKVGFFKRNRPPLEEDDEEGE

SEQ ID NO: 317544 - protein, 219 aa, Artificial Sequence
  derived and/or modified sequence
MASYFGHSVAVTDVNGDGRHDLLVGAPLYMESRADRKLAEVGRVYLFLQPRGPHALGAPSLLLTGTQLYGRFGSAIAPLGDLDRDGYNDIAVAAPYGGPSGRGQVLVFLGQSEGLRSRPSQVLDSPFPTGSAFGFSLRGAVDIDDNGYPGALDCLQLEMPKKGPWTFAGSAKRHGQGLMPGLVSHYGLPEGLGETSSGGGGVGNPWEDEMRIPCPNRQF

SEQ ID NO: 317545 - DNA, 3018 bp, Artificial Sequence
  derived and/or modified sequence
atggctcgggccttgtgtcctcttcaggcgctttggttgctcgagtgggttctattattgctcggcccctgcgcagcgccacccgcttgggctttgaatctggatcccgtgcagctgacattttacgccggacctaatggctcacaattcggatttagtcttgactttcacaaagattcacatggtagggttgctatcgttgtcggggcccctagaaccctggggccttctcaggaagagacgggtggcgtgtttctttgtccctggcgggccgagggcggtcagtgtccctctctcctctttgacctgcgggacgagacccgtaatgtgggatcccagacccttcagacttttaaggcaagacagggcctgggggcctccgtcgtctcatggagcgacgtgattgtggcctgtgccccatggcagcactggaacgtgttagaaaagaccgaggaggccgagaagactcctgtggggtcatgctttctagctcaacccgagagcggacgtagggcagagtatagtccctgtcgtggcaataccttatctaggatctacgttgaaaacgatttctcatgggacaagcgttattgtgaggcaggttttagctccgtggtgacgcaggcaggcgagctcgtcctgggagcccccggaggctattatttcctcgggctgctagctcaagccccagtggccgatatcttcagttcatataggcctgggattctattatggcacgttagctcacagtctctttcatttgattcatccaatcctgagtacttcgacggatattgggggtactcggtggccgttggagagtttgacggggacctcaataccactgaatacgtcgtgggcgccccaacttggagctggactctaggggctgtggagatactggatagttactatcagagactccaccgtttgcgcggggaacaaatggcttcatacttcggtcacagtgtcgccgtcacagacgtcaatggtgacggacgccacgatctacttgtgggggcacctctatacatggaatcacgagctgatagaaagcttgcagaagtgggcagggtttaccttttccttcagcctagagggcctcacgccctaggtgctccctcccttctgctgactggtacccagctgtacggccgtttcgggtctgccatagccccattgggtgacttagaccgcgatggctataacgatattgcagtggccgcaccatatggtggtccctctgggcgtggccaagttttagtctttctgggccagtccgagggtttgaggtcaagacctagccaggtgctagattctccattcccaaccggaagtgcctttggatttagcctgcgcggggccgttgacatcgatgataacggctaccctgacctgatagtcggggcttacggtgccaatcaggtcgcggtctatcgagcccagcctgtggtcaaggcgtctgtgcagctgcttgtccaggactcactaaaccctgctgtgaagagctgtgtcctcccccaaacaaagacacccgtcagttgctttaatatccagatgtgtgtgggcgctactggccataacatcccccagaagttgtctctgaatgctgaactgcagcttgacaggcagaagcctcgccagggtcgacgagtactcctgctgggcagccagcaggcgggtactaccctgaatctggatttgggcggcaagcattcccccatttgccatactaccatggcttttttgcgagatgaagcggacttcagagataaactgagtccaattgtgctgtccctcaatgtgagtttacctcctaccgaggctggaatggccccggctgtggtattgcacggcgacacacatgtacaggagcagacacggatcgtcctggactgtggggaagacgatgtgtgcgtgcctcaactgcagctcaccgctagcgtcaccggctcacccctgctcgtcggggcggacaacgtgctggagctccagatggatgctgccaacgagggggagggcgcatacgaagccgaactggccgtgcacttgccacagggcgctcactacatgcgcgcgctttccaacgtggaaggatttgagcgtttaatatgcaaccagaagaaggagaatgagaccagggtcgtcctgtgcgagctgggaaacccaatgaagaaaaatgcccagatcgggatcgcaatgctcgtgtcagtgggcaacctcgaagaagccggcgaaagtgtgtccttccagctacagattcgctcaaaaaattcccagaacccaaatagtaaaattgtcctgctcgatgtgcctgtcagagccgaggcacaggtggagctcagaggcaattcattccccgccagcttggtggtagctgccgaagagggcgagcgggagcagaacagtctggactcctggggacccaaagtggaacatacctacgagctacacaacaatggtccgggcactgtgaatggattgcatctctcgatccacctaccgggtcagtcgcagccgagcgatcttctatatatccttgacattcagccccagggcgggcttcagtgctttccgcagccacctgtgaaccccttaaaggtggattggggcctgcccatcccatccccatcacccattcatcccgcgcaccataaaagagataggagacagattttcctgcccgaacctgagcaaccatctagactccaggacccagtgttggtttcttgtgacagcgccccctgcactgtcgttcagtgtgatttacaggaaatggctcggggccagagggccatggtaaccgtcttggcattcttatggctgccaagcttgtaccaggtttggactcagctgttaagggcactggaagaaagggccatacctatatggtgggtccttgttggagtgctgggcggactgctgctcctcaccattctagtgcttgcaatgtggaaagtgggtttcttcaaaaggaatcgaccacctctcgaggaagacgatgaagagggcgaatag

SEQ ID NO: 317546 - DNA, 3232 bp, Artificial Sequence
  derived and/or modified sequence
attcctgcctgggaggttgtggaagaaggaagatggccagagctttgtgtccactgcaagccctctggcttctggagtgggtgctgctgctcttgggaccttgtgctgcccctccagcctgggccttgaacctggacccagtgcagctcaccttctatgcaggccccaatggcagccagtttggattttcactggacttccacaaggacagccatgggagagtggccatcgtggtgggcgccccgcggaccctgggccccagccaggaggagacgggcggcgtgttcctgtgcccctggagggccgagggcggccagtgcccctcgctgctctttgacctccgtgatgagacccgaaatgtaggctcccaaactttacaaaccttcaaggcccgccaaggactgggggcgtcggtcgtcagctggagcgacgtcattgtggcctgcgccccctggcagcactggaacgtcctagaaaagactgaggaggctgagaagacgcccgtaggtagctgctttttggctcagccagagagcggccgccgcgccgagtactccccctgtcgcgggaacaccctgagccgcatttacgtggaaaatgattttagctgggacaagcgttactgtgaagcgggcttcagctccgtggtcactcaggccggagagctggtgcttggggctcctggcggctattatttcttaggtctcctggcccaggctccagttgcggatattttctcgagttaccgcccaggcatccttttgtggcacgtgtcctcccagagcctctcctttgactccagcaacccagagtacttcgacggctactgggggtactcggtggccgtgggcgagttcgacggggatctcaacactacagaatatgtcgtcggtgcccccacttggagctggaccctgggagcggtggaaattttggattcctactaccagaggctgcatcggctgcgcggagagcagatggcgtcgtattttgggcattcagtggctgtcactgacgtcaacggggatgggaggcatgatctgctggtgggcgctccactgtatatggagagccgggcagaccgaaaactggccgaagtggggcgtgtgtatttgttcctgcagccgcgaggcccccacgcgctgggtgcccccagcctcctgctgactggcacacagctctatgggcgattcggctctgccatcgcacccctgggcgacctcgaccgggatggctacaatgacattgcagtggctgccccctacgggggtcccagtggccggggccaagtgctggtgttcctgggtcagagtgaggggctgaggtcacgtccctcccaggtcctggacagccccttccccacaggctctgcctttggcttctcccttcgaggtgccgtagacatcgatgacaacggatacccagacctgatcgtgggagcttacggggccaaccaggtggctgtgtacagagctcagccagtggtgaaggcctctgtccagctactggtgcaagattcactgaatcctgctgtgaagagctgtgtcctacctcagaccaagacacccgtgagctgcttcaacatccagatgtgtgttggagccactgggcacaacattcctcagaagctatccctaaatgccgagctgcagctggaccggcagaagccccgccagggccggcgggtgctgctgctgggctctcaacaggcaggcaccaccctgaacctggatctgggcggaaagcacagccccatctgccacaccaccatggccttccttcgagatgaggcagacttccgggacaagctgagccccattgtgctcagcctcaatgtgtccctaccgcccacggaggctggaatggcccctgctgtcgtgctgcatggagacacccatgtgcaggagcagacacgaatcgtcctggactgtggggaagatgacgtatgtgtgccccagcttcagctcactgccagcgtgacgggctccccgctcctagttggggcagataatgtcctggagctgcagatggacgcagccaacgagggcgagggggcctatgaagcagagctggccgtgcacctgccccagggcgcccactacatgcgggccctaagcaatgtcgagggctttgagagactcatctgtaatcagaagaaggagaatgagaccagggtggtgctgtgtgagctgggcaaccccatgaagaagaacgcccagataggaatcgcgatgttggtgagcgtggggaatctggaagaggctggggagtctgtgtccttccagctgcagatacggagcaagaacagccagaatccaaacagcaagattgtgctgctggacgtgccggtccgggcagaggcccaagtggagctgcgagggaactcctttccagcctccctggtggtggcagcagaagaaggtgagagggagcagaacagcttggacagctggggacccaaagtggagcacacctatgagctccacaacaatggccctgggactgtgaatggtcttcacctcagcatccaccttccgggacagtcccagccctccgacctgctctacatcctggatatacagccccaggggggccttcagtgcttcccacagcctcctgtcaaccctctcaaggtggactgggggctgcccatccccagcccctcccccattcacccggcccatcacaagcgggatcgcagacagatcttcctgccagagcccgagcagccctcgaggcttcaggatccagttctcgtaagctgcgactcggcgccctgtactgtggtgcagtgtgacctgcaggagatggcgcgcgggcagcgggccatggtcacggtgctggccttcctgtggctgcccagcctctaccaggtgtggacacagctgctccgggccttggaggagagggccattccaatctggtgggtgctggtgggtgtgctgggtggcctgctgctgctcaccatcctggtcctggccatgtggaaggtcggcttcttcaagcggaaccggccacccctggaagaagatgatgaagagggggagtgatggtgcagcctacactattctagcaggagggttgggcgtgctacctgcaccgccccttctccaacaagttgcctccaagctttgggttggagctgttccattgggtcctcttggtgtcgtttccctcccaacagagctgggctaccccccctcctgctgcctaataaagagactgagccctg

SEQ ID NO: 317547 - DNA, 3018 bp, Artificial Sequence
  derived and/or modified sequence
atggcccgggccctgtgccccctgcaggccctgtggctgctggagtgggtgctgctgctgctgggcccctgtgccgcccccccagcctgggccctgaacctggaccctgtgcagctgaccttctacgccggccccaacggcagccagtttggcttcagcctggacttccacaaggacagccacggccgggtggccatcgtggtgggcgcccccaggaccctgggccccagccaggaggagactggaggagtcttcctgtgcccctggagggctgagggcggccagtgccccagcctgctgtttgacctgagagatgagaccagaaatgtgggcagccagaccctgcagaccttcaaggcccggcagggcctgggcgcctctgtggtgtcctggagcgatgtgattgtggcctgtgccccctggcagcactggaatgtgctggagaagacagaggaggccgagaagacccctgtgggcagctgcttcctggcccagcctgagagcggccggcgggcagagtacagcccctgccggggcaacaccctgagccgcatctacgtggagaatgacttctcctgggacaagcgctactgtgaggccggcttcagctctgtggtgacccaggccggggagctggtgctgggcgcccctgggggctactacttcctgggcctgctggcccaggcccctgtggccgacatcttcagcagctaccggcccggcatcctgctgtggcacgtgagcagccagagcctgagctttgacagcagcaaccctgagtactttgatggctactggggctacagcgtggccgtgggggagtttgatggagacctgaacaccacagaatatgtggtgggcgcccccacctggagctggaccctgggcgctgtggagatcctggacagctactaccagaggctgcaccggctgcggggggagcagatggccagctacttcggccacagcgtggccgtgacagatgtgaatggagatggaagacatgacctgctggtgggcgcccccctgtacatggagagcagagctgacaggaagctggccgaggtgggccgggtgtacctgttcctgcagccccggggcccccacgccctgggcgcccccagcctgctgctgaccggcacccagctgtatggccgctttggaagtgccatcgcccccctgggggacctggacagagatggctacaatgacattgctgtggccgccccctatggaggccccagcggccggggccaggtgctggtgttcctgggccagagcgagggcctgcggagccggcccagccaggtgctggacagccccttccccaccggcagcgccttcggcttcagcctgcggggagctgtggacattgatgacaatggctacccagacctgattgtgggcgcctatggagccaaccaggtggccgtgtaccgggcccagcctgtggtgaaggcctctgtgcagctgctggtgcaggacagcctgaacccagctgtgaagagctgtgtgctgccccagaccaagacccctgtgtcctgcttcaacatccagatgtgtgtgggcgccaccggccacaacatcccccagaagctgagcctgaatgctgagctgcagctggaccggcagaagccccggcagggccggcgggtgctgctgctgggcagccagcaggccggcaccaccctgaacctggacctgggcggcaagcacagccccatctgccacaccaccatggccttcctgagagatgaagctgacttccgggacaagctgagccccatcgtgctgagcctgaatgtgtccctgcccccaacagaagctggcatggccccagctgtggtgctgcacggggacacccacgtgcaggagcagaccagaattgtgctggactgtggagaagatgatgtgtgtgtgccccagctgcagctgacagcctctgtgacaggcagccccctgctggtgggcgctgacaacgtgctggagctgcagatggatgctgccaatgaaggagagggcgcctatgaggccgagctggccgtgcacctgccccagggcgcccactacatgagggccctgagcaatgtggagggctttgagcggctcatctgcaaccagaagaaggaaaatgagaccagggtggtgctgtgtgagctgggcaaccccatgaagaagaatgcccagatcggcatcgccatgctggtgtctgtgggcaacctggaggaggccggggagagcgtgtccttccagctgcagatccgcagcaagaacagccagaaccccaacagcaagatcgtgctgctggatgtgcctgtgcgggcagaggcccaggtggagctgcggggcaacagcttccctgccagcctggtggtggccgctgaggagggggagcgggagcagaacagcctggacagctggggccccaaggtggagcacacctatgagctgcacaacaacggccctggcaccgtgaatggcctgcacctgagcatccacctgcccggccagagccagcccagcgacctgctgtacatcctggacatccagccccagggcggcctgcagtgcttcccccagccccctgtgaaccccctgaaggtggactggggcctgcccatccccagccccagccccatccacccagcccaccacaagagggaccggcggcagatcttcctgcctgagcctgagcagcccagccggctgcaggaccctgtgctggtgtcctgtgacagcgccccctgcaccgtggtgcagtgtgacctgcaggagatggcccggggccagagggccatggtgacagtgctggccttcctgtggctgcccagcctgtaccaggtgtggacccagctgctgcgggccctggaggagcgggccatccccatctggtgggtgctggtgggcgtgctgggcggcctgctgctgctgaccatcctggtgctggccatgtggaaggtgggcttcttcaagaggaacagaccacccctggaggaggatgatgaggagggggagtag

SEQ ID NO: 317548 - DNA, 3018 bp, Artificial Sequence
  derived and/or modified sequence
atggcccgggccctgtgccccctgcaggccctgtggctgctggagtgggtgctgctgctgctggggccttgtgcggccccaccggcatgggccttaaatttagatcctgttcagcttaccttctatgccgggccaaatggatcgcagttcggcttctccctcgatttccataaagattcccacggtcgggtcgccattgtcgtcggcgctcctcgtacactcggaccatctcaggaggaaacaggcggcgtgtttctgtgcccctggagagccgagggggggcagtgccctagcctgctgttcgatcttcgcgacgagactagaaatgttgggtcacaaaccttgcaaacttttaaggcccggcaaggacttggagcatcagtcgtctcatggagcgatgtgattgtggcgtgtgcaccatggcagcactggaatgtcttggagaagactgaggaagcagaaaaaacccctgtcggtagctgctttctggctcagccagagagtggaaggagagccgaatattccccttgtcgtggtaatacactcagtcgaatttatgtggaaaatgacttttcatgggacaaacggtactgcgaggctggcttcagcagcgtagtgacacaggccggagagctggtcctcggtgccccaggtgggtattacttcctgggactgttagcacaggcacccgtagccgacatcttctcctcttacagacccgggattttgctgtggcatgtgtcgtcccagtccctttcctttgacagctccaatcccgagtatttcgatggctactggggatactctgttgccgtgggtgagttcgacggagatcttaatactacggaatatgtggtgggagctccaacctggtcttggactctgggagccgttgagatcctggatagttattatcagaggttacatcggctacgcggggagcagatggcatcgtactttgggcatagcgtcgctgtgacggacgtcaatggcgacggccggcacgacctcctcgtgggggcccctctgtatatggagagtcgtgccgatagaaagctcgctgaagtagggcgggtgtacctttttctgcagcctcgaggcccacacgctctgggtgccccaagcctcctgctgacaggaacccagctttacggacgcttcgggagcgctatagcacccctcggtgatctagaccgggacggatataatgacatagctgtagcagcaccatacggaggcccgagcggtcgagggcaggtcctcgtcttccttgggcaaagtgagggactgcggtcccggccctcgcaggtccttgactcacctttcccaaccggatctgctttcggtttcagtctgcgtggggccgtcgatattgacgacaatggatacccggatttaattgtgggggcctacggcgccaaccaagtcgcagtatatagggctcagccagttgtcaaagcctctgtgcagctcctggtccaagactcactgaatcccgccgtgaagtcatgtgttcttccccagactaaaactccagtgagttgcttcaatattcaaatgtgtgtgggcgctacaggccacaatattccacagaagctgtcattgaatgcagagttacagctggacaggcaaaaaccacgccagggacgcagagtgttactactcggatcccaacaggcagggactacacttaacctggatcttgggggcaagcattctcctatttgccacaccactatggctttccttcgagatgaagctgacttccgggacaaactgtccccaattgtgctgagcctcaacgtttcactgcccccaaccgaagccggcatggccccggccgtagtcctccacggcgacactcacgtccaggagcagactagaatagtactggactgcggcgaggatgatgtgtgcgttcctcagcttcagctgaccgcttccgttacgggatcgcctttgttagtgggcgcagataatgtgctggagctgcagatggatgctgcgaacgaaggagagggcgcctacgaagcagagctcgccgtccatctgcctcagggcgcccattatatgagagctctgagcaacgtcgagggctttgagcggctcatttgcaatcaaaaaaaggaaaacgagaccagagtcgtcctctgtgagctagggaatcccatgaagaagaacgcacagataggaattgcgatgttagtctctgtgggaaacctggaagaagccggggagtccgtaagctttcaactccagattcgatctaaaaacagccagaatcccaactcaaaaatcgtactgctggatgtgcctgttcgcgctgaggctcaggtcgagttgaggggcaacagcttccctgcaagcttggtggtggcggccgaagagggcgaacgcgagcagaatagcctggacagttggggccccaaagtggaacatacctacgaactccataacaacgggcctggcactgtgaacggcctacacctgagtatccatttgccaggccaaagtcagccgtcggacttactttatatcctagacatacagcctcagggaggcctgcagtgcttcccgcagcccccagtgaatcccctgaaggtggactggggtttgcctattccatctccaagtccgattcacccagcgcaccataagcgggatagacgacagatcttcttgcccgaacccgagcaacccagtcgactgcaggaccccgtgctggtgagttgcgattcagcgccttgcacagttgtgcaatgcgacttgcaggaaatggcacggggacagcgcgcgatggtaaccgtgcttgcattcctgtggctaccgtcgctctaccaggtgtggacacagttgctgagggccctggaagaacgggcgatccccatatggtgggttctcgtgggcgtcctgggcgggctgctccttttgactatcctcgtactcgccatgtggaaggtcggatttttcaagcgaaatcgtcctcctctggaggaggacgatgaggagggagaatag

SEQ ID NO: 317549 - DNA, 3018 bp, Artificial Sequence
  derived and/or modified sequence
atggcaagggcattgtgcccacttcaggcgctgtggctactcgaatgggtactgttactcctgggaccgtgcgcggctccgcctgcgtgggctttgaatctggatcctgtccagttgacattttatgctggaccaaatggctctcagtttgggttctctttagacttccacaaggactcccacggtagagtggcgatcgtggtcggcgctccacggaccttaggcccaagtcaggaggaaactggcggtgtttttttgtgcccctggcgcgcagaggggggacagtgccctagcctgctgttcgacctgcgcgatgagaccagaaacgtgggttcccagacactacaaaccttcaaagcaagacagggcctgggggcatccgtcgtttcttggagtgacgtgatcgttgcctgcgccccatggcagcactggaacgtgttggaaaagacagaggaggctgagaaaacacccgtcgggagttgctttctggcgcaacctgagtcagggaggcgggctgagtactcaccctgccgcggaaacacgttgtccaggatctacgtggagaacgacttcagttgggacaaaaggtactgtgaagccggtttcagctctgtggttacgcaagctggagagctcgtcctgggcgctcccggtggttactacttcctgggattgttggcacaagcgcctgtggctgacatcttttccagctacagacccggtattctgttgtggcacgtgtcttcacagtcattatctttcgactcatccaatcccgagtactttgatggttactggggatactcagtagccgtcggagaatttgatggcgacctcaacacaaccgaatacgtggtgggagccccaacgtggagctggactctgggtgctgtagagatccttgactcatactatcagagactccacagactaagaggggagcagatggcatcctactttggccatagcgtggctgtgacagatgtcaacggcgatgggaggcatgatctcctggtgggtgccccattgtacatggagtctcgcgctgaccgtaagttggccgaagtggggagagtgtacctcttcctgcagcctagagggcctcacgctctgggcgcacctagcctgctcctcaccggcacacagctgtatggtcggttcggctcagctattgccccactaggcgacctggaccgcgatggctacaatgacatcgccgtggccgctccctacgggggacccagtgggcgtggtcaggtacttgtgtttctgggccagtccgagggcctccgctctcggccaagtcaggtactggattctcccttccccactggcagcgccttcgggttctcccttcgcggagcagtggatatcgatgacaacggataccccgatttgatagtgggcgcatatggcgctaatcaggttgccgtgtacagagcgcagcccgtggtgaaggcctcagtgcaactcttggtgcaggattctctgaaccccgcagtcaaaagctgcgtgctgccacagaccaagaccccagtgtcctgctttaacatccagatgtgcgtcggggcaaccgggcacaacatcccacaaaagttgagcctgaatgccgaactccagttggatcgccagaagccacgccaaggtcggcgtgtgctgctcttgggatcccagcaggccggaaccactcttaacttagatttggggggtaagcactcaccgatttgtcatactacaatggcctttctgagggatgaagcggactttagggataagttgtcaccaatcgttctgtccttgaatgtgagccttccgccaactgaagccggtatggcccctgccgtggttcttcatggtgacactcacgtacaggagcagacccggattgtgctggattgtggagaagatgacgtgtgtgtgccacagcttcagttgaccgctagcgtgaccggtagcccgttgttggtgggggctgataacgtacttgagctgcagatggacgcggcaaatgaaggcgagggcgcatacgaggccgagctggccgtccacctacctcagggtgcgcactacatgcgggctctgtccaacgtcgaaggattcgagcgtctgatttgtaaccagaagaaagaaaacgagacgagagttgtgctgtgcgaactcggaaacccaatgaagaaaaatgcacagattgggattgccatgctggtcagtgtgggaaacctggaagaagcgggagaatccgtttccttccagcttcagatcaggagcaagaactctcagaaccctaactctaagatagtgttgcttgacgtgccagtgagggccgaagctcaagtggaactcagaggtaactctttccccgctagtctggtcgtggccgctgaggaaggggagcgcgaacagaatagccttgactcctggggaccgaaggtggagcatacctacgaactccacaacaacggaccagggactgtgaacggactgcacctgtcaatccacctgccagggcaaagccagccgtccgacctactgtacatactggatatccagccacagggcggtctgcagtgctttcctcagccaccagtaaaccctctcaaggttgactggggattgcccatcccatctccatcccccattcatccagcccaccacaaaagggaccgcaggcagatctttcttcctgaaccggaacaaccatcaaggttacaggaccccgtgctggtgtcctgcgactccgccccttgtactgtggttcagtgtgacctgcaggaaatggctagaggtcagcgcgcaatggtgacagtcttagccttcttgtggctgccatctttatatcaggtgtggacacagctcttaagggcactggaggagcgagcgattccaatatggtgggtgctggtgggagtgttaggtggcttgctcctcctcactatcctggttctggcaatgtggaaggttggcttttttaaacggaataggccaccgctggaggaggatgatgaggaaggggaatag

SEQ ID NO: 317550 - DNA, 3018 bp, Artificial Sequence
  derived and/or modified sequence
atggccagagccctgtgccccctgcaggccctgtggctgctggagtgggtgctgctgctgctgggcccctgcgccgccccccccgcctgggccctgaacctggaccccgtgcagctgaccttctacgccggccccaacggcagccagttcggcttcagcctggacttccacaaggacagccacggcagagtggccatcgtggtgggcgcccccagaaccctgggccccagccaggaggagaccggcggcgtgttcctgtgcccctggagagccgagggcggccagtgccccagcctgctgttcgacctgagagacgagaccagaaacgtgggcagccagaccctgcagaccttcaaggccagacagggcctgggcgccagcgtggtgagctggagcgacgtgatcgtggcctgcgccccctggcagcactggaacgtgctggagaagaccgaggaggccgagaagacccccgtgggcagctgcttcctggcccagcccgagagcggcagaagagccgagtacagcccctgcagaggcaacaccctgagcagaatctacgtggagaacgacttcagctgggacaagagatactgcgaggccggcttcagcagcgtggtgacccaggccggcgagctggtgctgggcgcccccggcggctactacttcctgggcctgctggcccaggcccccgtggccgacatcttcagcagctacagacccggcatcctgctgtggcacgtgagcagccagagcctgagcttcgacagcagcaaccccgagtacttcgacggctactggggctacagcgtggccgtgggcgagttcgacggcgacctgaacaccaccgagtacgtggtgggcgcccccacctggagctggaccctgggcgccgtggagatcctggacagctactaccagagactgcacagactgagaggcgagcagatggccagctacttcggccacagcgtggccgtgaccgacgtgaacggcgacggcagacacgacctgctggtgggcgcccccctgtacatggagagcagagccgacagaaagctggccgaggtgggcagagtgtacctgttcctgcagcccagaggcccccacgccctgggcgcccccagcctgctgctgaccggcacccagctgtacggcagattcggcagcgccatcgcccccctgggcgacctggacagagacggctacaacgacatcgccgtggccgccccctacggcggccccagcggcagaggccaggtgctggtgttcctgggccagagcgagggcctgagaagcagacccagccaggtgctggacagccccttccccaccggcagcgccttcggcttcagcctgagaggcgccgtggacatcgacgacaacggctaccccgacctgatcgtgggcgcctacggcgccaaccaggtggccgtgtacagagcccagcccgtggtgaaggccagcgtgcagctgctggtgcaggacagcctgaaccccgccgtgaagagctgcgtgctgccccagaccaagacccccgtgagctgcttcaacatccagatgtgcgtgggcgccaccggccacaacatcccccagaagctgagcctgaacgccgagctgcagctggacagacagaagcccagacagggcagaagagtgctgctgctgggcagccagcaggccggcaccaccctgaacctggacctgggcggcaagcacagccccatctgccacaccaccatggccttcctgagagacgaggccgacttcagagacaagctgagccccatcgtgctgagcctgaacgtgagcctgccccccaccgaggccggcatggcccccgccgtggtgctgcacggcgacacccacgtgcaggagcagaccagaatcgtgctggactgcggcgaggacgacgtgtgcgtgccccagctgcagctgaccgccagcgtgaccggcagccccctgctggtgggcgccgacaacgtgctggagctgcagatggacgccgccaacgagggcgagggcgcctacgaggccgagctggccgtgcacctgccccagggcgcccactacatgagagccctgagcaacgtggagggcttcgagagactgatctgcaaccagaagaaggagaacgagaccagagtggtgctgtgcgagctgggcaaccccatgaagaagaacgcccagatcggcatcgccatgctggtgagcgtgggcaacctggaggaggccggcgagagcgtgagcttccagctgcagatcagaagcaagaacagccagaaccccaacagcaagatcgtgctgctggacgtgcccgtgagagccgaggcccaggtggagctgagaggcaacagcttccccgccagcctggtggtggccgccgaggagggcgagagagagcagaacagcctggacagctggggccccaaggtggagcacacctacgagctgcacaacaacggccccggcaccgtgaacggcctgcacctgagcatccacctgcccggccagagccagcccagcgacctgctgtacatcctggacatccagccccagggcggcctgcagtgcttcccccagccccccgtgaaccccctgaaggtggactggggcctgcccatccccagccccagccccatccaccccgcccaccacaagagagacagaagacagatcttcctgcccgagcccgagcagcccagcagactgcaggaccccgtgctggtgagctgcgacagcgccccctgcaccgtggtgcagtgcgacctgcaggagatggccagaggccagagagccatggtgaccgtgctggccttcctgtggctgcccagcctgtaccaggtgtggacccagctgctgagagccctggaggagagagccatccccatctggtgggtgctggtgggcgtgctgggcggcctgctgctgctgaccatcctggtgctggccatgtggaaggtgggcttcttcaagagaaacagaccccccctggaggaggacgacgaggagggcgagtag

SEQ ID NO: 317551 - DNA, 660 bp, Artificial Sequence
  derived and/or modified sequence
atggcatcttacttcggccacagcgtagctgtgacagacgtaaatggcgatgggaggcacgaccttttagtcggcgccccactttacatggaatctagagctgacagaaagctcgccgaggtcggaagggtttatctgttcctccagcccaggggacctcacgctctcggcgcccctagccttttactaactgggacccaactgtatggaaggttcgggagcgccattgccccccttggagacctcgacagggatggctataacgacatagctgtggccgccccatacgggggcccatcaggtcgcggacaagtccttgtgttccttggtcagtcggagggtctcaggtctagaccatcccaggtgctggacagtcctttcccgactggaagcgcttttggattcagcctgaggggagccgtggacattgatgataacggatatccgggcgccctggactgcctgcaacttgagatgcccaagaagggcccttggacttttgctggctccgccaagcggcacggtcaaggtctcatgccagggctggtctcgcactacggcctgcctgaggggctcggggagacttcttctggcggtggtggtgtgggcaatccttgggaagatgaaatgaggatcccctgcccgaaccggcaattctag

SEQ ID NO: 317552 - DNA, 1212 bp, Artificial Sequence
  derived and/or modified sequence
actgtgaagcgggcttcagctccgtggtcactcaggccggagagctggtgcttggggctcctggcggctattatttcttagggtactcggtggccgtgggcgagttcgacggggatctcaacactacagaatatgtcgtcggtgcccccacttggagctggaccctgggagcggtggaaattttggattcctactaccagaggctgcatcggctgcgcggagagcagatggcgtcgtattttgggcattcagtggctgtcactgacgtcaacggggatgggaggcatgatctgctggtgggcgctccactgtatatggagagccgggcagaccgaaaactggccgaagtggggcgtgtgtatttgttcctgcagccgcgaggcccccacgcgctgggtgcccccagcctcctgctgactggcacacagctctatgggcgattcggctctgccatcgcacccctgggcgacctcgaccgggatggctacaatgacattgcagtggctgccccctacgggggtcccagtggccggggccaagtgctggtgttcctgggtcagagtgaggggctgaggtcacgtccctcccaggtcctggacagccccttccccacaggctctgcctttggcttctcccttcgaggtgccgtagacatcgatgacaacggatacccaggtgccctggactgcctccagctagaaatgcccaagaaaggcccttggacattcgctggaagtgccaagagacacggccaggggctcatgcctggcctggtgtcccactatggactgccagaggggctgggtgaaacctccagtgggggaggtggtgtggggaacccctgggaagatgagatgaggatcccatgccctaatcgccaattctgacccattcctcgatgtctatagacctgatcgtgggagcttacggggccaaccaggtggctgtgtacagagctcagccagtggtgaaggcctctgtccagctactggtgcaagattcactgaatcctgctgtgaagagctgtgtcctacctcagaccaagacacccgtgagctgcttcaacatccagatgtgtgttggagccactgggcacaacattcctcagaagctatccctaaatgccgagctgcagctggaccggcagaagccccgccagggccggcgggtgctgctgctgggctctcaacaggcaggcaccaccctgaacct

SEQ ID NO: 317553 - DNA, 660 bp, Artificial Sequence
  derived and/or modified sequence
atggccagctacttcggccacagcgtggccgtgacagatgtgaatggagatggaagacatgacctgctggtgggcgcccccctgtacatggagagcagagctgacaggaagctggccgaggtgggccgggtgtacctgttcctgcagccccggggcccccacgccctgggcgcccccagcctgctgctgaccggcacccagctgtatggccgcttcggcagcgccatcgcccccctgggggacctggacagagatggctacaatgacattgctgtggccgccccctacggcggccccagcggccggggccaggtgctggtgttcctgggccagagcgagggcctgcggagccggcccagccaggtgctggacagccccttccccactggaagtgccttcggcttcagcctgcggggagctgtggacattgatgacaatggctacccaggggccctggactgcctgcagctggagatgcccaagaagggcccctggacctttgctggcagcgccaagagacatggccagggcctgatgcctggcctggtgagccactacggcctgcctgagggcctgggggagaccagcagcggcggcggcggcgtgggcaacccctgggaggatgagatgaggatcccctgccccaaccggcagttctag

SEQ ID NO: 317554 - DNA, 660 bp, Artificial Sequence
  derived and/or modified sequence
atggccagctacttcggccacagcgtggccgtgaccgacgtgaacggggacgggcgtcacgatctcttggtcggcgctccgctgtacatggaatcccgagccgaccgaaagctcgccgaagtgggaagggtttatctgttcctacagccacgcggcccccacgccctgggtgccccgtccctactgttgacaggcactcagctttatggaaggttcggctctgcaattgcacctctgggcgatcttgaccgggacggctacaacgatatagccgtggctgcaccctatggggggccctctgggcgcgggcaggtactggtttttctaggacaatccgaaggcctccgatctaggcctagccaggtgttagactccccctttcctaccgggtccgcattcgggttttccctacgcggcgcggtcgacatcgatgacaatggatatcctggtgcactcgattgtctacaactggagatgccgaaaaaaggaccatggactttcgcaggttcagccaaacggcacggtcagggcctgatgcctggacttgtcagtcactacggcctcccggaggggttgggtgaaaccagctccggtggtggaggtgttggcaacccttgggaggacgagatgagaataccttgtcctaaccgacagttctag

SEQ ID NO: 317555 - DNA, 660 bp, Artificial Sequence
  derived and/or modified sequence
atggcgagctatttcggacatagcgtcgctgtgaccgatgtgaatggagatgggcgtcatgatcttctagttggggctcccttatacatggagagcagggcagacagaaagctggccgaagtcggacgagtctaccttttcctacagccaagaggaccacacgcgttgggcgctcctagtctcctcctaacaggtacccagttatacgggaggtttggatctgctatcgccccactgggcgacctggaccgtgatggttacaacgacattgccgttgctgccccatatgggggaccctctgggagaggtcaggtgctggtgtttctggggcagtcagaaggtctgcggtcccgcccttctcaggtcctggactctccattccccactggttcagccttcggcttcagcctgaggggtgccgttgacatcgatgataatgggtatcccggtgccttggactgtctccagctggaaatgcccaaaaaggggccatggactttcgctggctcagcaaaaaggcacggacagggactgatgcccggactggtatctcactacggcctcccagaaggtctgggtgagacatcctccggaggaggcggagtgggtaatccttgggaggatgagatgaggataccctgtcccaaccggcagttctag

SEQ ID NO: 317556 - DNA, 660 bp, Artificial Sequence
  derived and/or modified sequence
atggccagctacttcggccacagcgtggccgtgaccgacgtgaacggcgacggcagacacgacctgctggtgggcgcccccctgtacatggagagcagagccgacagaaagctggccgaggtgggcagagtgtacctgttcctgcagcccagaggcccccacgccctgggcgcccccagcctgctgctgaccggcacccagctgtacggcagattcggcagcgccatcgcccccctgggcgacctggacagagacggctacaacgacatcgccgtggccgccccctacggcggccccagcggcagaggccaggtgctggtgttcctgggccagagcgagggcctgagaagcagacccagccaggtgctggacagccccttccccaccggcagcgccttcggcttcagcctgagaggcgccgtggacatcgacgacaacggctaccccggcgccctggactgcctgcagctggagatgcccaagaagggcccctggaccttcgccggcagcgccaagagacacggccagggcctgatgcccggcctggtgagccactacggcctgcccgagggcctgggcgagaccagcagcggcggcggcggcgtgggcaacccctgggaggacgagatgagaatcccctgccccaacagacagttctag

SEQ ID NO: 317557 - protein, 427 aa, Artificial Sequence
  derived and/or modified sequence
MGSVRTNRYSIVSSEEDGMKLATMAVANGFGNGKSKVHTRQQCRSRFVKKDGHCNVQFINVGEKGQRYLADIFTTCVDIRWRWMLVIFCLAFVLSWLFFGCVFWLIALLHGDLDASKEGKACVSEVNSFTAAFLFSIETQTTIGYGFRCVTDECPIAVFMVVFQSIVGCIIDAFIIGAVMAKMAKPKKRNETLVFSHNAVIAMRDGKLCLMWRVGNLRKSHLVEAHVRAQLLKSRITSEGEYIPLDQIDINVGFDSGIDRIFLVSPITIVHEIDEDSPLYDLSKQDIDNADFEIVVILEGMVEATAMTTQCRSSYLANEILWGHRYEPVLFEEKHYYKVDYSRFHKTYEVPNTPLCSARDLAEKKYILSNANSFCYENEVALTSKEEDDSENGVPESTSTDTPPDIDLHNQASVPLEPRPLRRESEI

SEQ ID NO: 317558 - DNA, 5397 bp, Artificial Sequence
  derived and/or modified sequence
gcgcactggagccctggccagcgcgcagccttcccggcgccggcgggctgggtcttgggaattctggtttgctttggctcactcgctttttacaaaccactggatcttacatgcctctgtaccccccacttccactccatgtccccatgctcctgcgccagcaacaggacatgttctctggatgtcagctgagtcattaaagtaactctgcatgtcagtagacagaccttggtagaaccacaaggctcccagagacacccatctctcctcatttttttggtgtgtgtgtcttcaccgaacattcaaaactgtttctccaaagcgttttgcaaaaactcagactgttttccaaagcagaagcactggagtccccagcagaagcgatgggcagtgtgcgaaccaaccgctacagcatcgtctcttcagaagaagacggtatgaagttggccaccatggcagttgcaaatggctttgggaacgggaagagtaaagtccacacccgacaacagtgcaggagccgctttgtgaagaaagatggccactgtaatgttcagttcatcaatgtgggtgagaaggggcaacggtacctcgcagacatcttcaccacgtgtgtggacattcgctggcggtggatgctggttatcttctgcctggctttcgtcctgtcatggctgttttttggctgtgtgttttggttgatagctctgctccatggggacctggatgcatccaaagagggcaaagcttgtgtgtccgaggtcaacagcttcacggctgccttcctcttctccattgagacccagacaaccataggctatggtttcagatgtgtcacggatgaatgcccaattgctgttttcatggtggtgttccagtcaatcgtgggctgcatcatcgatgctttcatcattggcgcagtcatggccaagatggcaaagccaaagaagagaaacgagactcttgtcttcagtcacaatgccgtgattgccatgagagacggcaagctgtgtttgatgtggcgagtgggcaatcttcggaaaagccacttggtggaagctcatgttcgagcacagctcctcaaatccagaattacttctgaaggggagtatatccctctggatcaaatagacatcaatgttgggtttgacagtggaatcgatcgtatatttctggtgtccccaatcactatagtccatgaaatagatgaagacagtcctttatatgatttgagtaaacaggacattgacaacgcagactttgaaatcgtggtcatactggaaggcatggtggaagccactgccatgacgacacagtgccgtagctcttatctagcaaatgaaatcctgtggggccaccgctatgagcctgtgctctttgaagagaagcactactacaaagtggactattccaggttccacaaaacttacgaagtccccaacactcccctttgtagtgccagagacttagcagaaaagaaatatatcctctcaaatgcaaattcattttgctatgaaaatgaagttgccctcacaagcaaagaggaagacgacagtgaaaatggagttccagaaagcactagtacggacacgccccctgacatagaccttcacaaccaggcaagtgtacctctagagcccaggcccttacggcgagagtcggagatatgactgactgattccttctctggaatagttactttacaacacggtctgttggtcagaggcccaaaacagttatacagatgacggtactggtcaagatgggtcaagcaagcggccacaagggactgaggcaagcacaatggtttcaaagaaagactgtaagctccatgattagcataaagcactaaccatgtctccatgtgacccgatggcacatagatgttgtagaataagttatgggtttttatgttttgttttgtgtttttccaaaacttgaacttgcaggcaagccttggttgggtatttgatttatccagaatgcttctctttagggaacaaggatgtttttaatggcataacaaaggcaagactctgccttaatttttgaaaagctgctaactacatgaacacaaatgtgtatttttgttgcagtgtagttttccttttgtgtaattttaaagtcagtgttgaattttattgaaagctcatgatgcgcttcaaagtggcaagtatttggctattaactgccaaaacaagagcctgattttttgaggccagtaattcgtttgctagaattgattttttttctctctctctttgttacataagggcattatgtaacactagccgaatggtagcctctgggttgttgtttttttcttttcctccatgatgttaatgggttatctcaaattttaagttaaactacctaaaataaataccaaagataatgcatatttttgcacagtggagcttacacttaaaagaaaacaaagccccatgggctgccttgaaatcaagagacaataactttgaacctcagcaagaccttgaaccgccggttcattttgcaccttattcagaaaatagagcatcatactcaccgagtctagtcagtgtagtgcttttaaaaattttgtcctttcatgtaacttttttattttaagaggaagaagaagaaaggggcacacacacacaataccgacgtctatcctttcctgctaggcagtgctggccaggctcatgtgtagtgtgcgagatggtgatgtactcttatatttttctgggcttttccttttgcacattccaaaattcatttcataagacaagatcttcataggacctccttggcatcctggcattctcaaaactgagccatccagcatgaaagataaatgggtttaaacccttgctgctgaatttattgcctggactgtcaggacatcaccagcccaccttcaccttagggaagatgccacacctggcctccacacttgctcttctgatcagtctgtctggattgagtcctacagtgtcagatagggcggcaaatgccaaagcagggaaacagggaggtgtggacaagccagtttgatgcagcacttcagatcaagtgcttaggaaggagaggaaacttgccttttttatggcagaggatagtaatgaaaatgtctcagtattttagggtcaatgagagccataaaaatataacataatcacaagtaaaggagataatggtctaaaacagctatttcccttttctgtgtgcatacttatgactgaatgtgagctaagcattttctcctgtggagccctagagcaggttactaaggaaggacacattgttttccagaagcctcccctgcctggctgactgccttgctagaaacataattttttttttctcactgaagctcaataatggaactctttttttttttttttttaatttaaagttccctatttgtgaattctgggattactgacttttctttttaattggagtctcaaaatcaactctcttatggtattatatctctgtatgccattaaaaaacagcttgttctagaatcatgtattttgtaaactgatgtttgtgatggtctctggttcttgaacagccatatctgaatgccgtgcctgcaaaactatgacaatttttgctgttttcagccttcagatttgatggcttgggaaactgaggtgttattttcaatgaaacaaagaaagagatgttaagcaagtggttgttttagatccaaatgtaaaggcaggtttgggaaggtgtttaaagagttggaggaattggggattgagttgtaaagaaaacttacagaagaggcaacaatttggttcttgacagtgagaggatattgagggcttcagctgctgctattatgatgttttgcaaaggaaaataatcaaaccaaagagtattcagtgatatgtaaattaaatgaagatacagtggagaatgggggtgaccacaaaagaggctccccctaaacacacagtgctgccacttaaaaagacttgagaaatttgaaagggggtgggtatggggggggcaagaaagagggagggaaatctttcaacttatttctgaaaaagagaaaaaaatataaaatttctggtgcacaggtttgttttttcaagaaaattttgcagaagctatgtttttaaagtgtacattttataaagtttatcagatattttcatatttaaagccaaatgtaaatagaggtctgtaaagaaaaataattgccatagaaagtataatttcagtgcagtaatttctgagagctagtacctatatgctaccggttagcatggttttagcaaatatataccagccttataaggttcgtattgctatgttcttctgttatttatttcagcatggactgttcatttgaaacctttttctagttattagcgttttaacagttacaagctttaaatggcaattttttttttttttttttttttttttttttttttgtcaagagccaagacacaggtaatgcacgacattgattgctgcattttaccttcaaaatatttgtccttattgactgggtctccttaattaatgtacacatgtcattagaatgcagacggaggggactcaccatgaatatctggggttgattcccagatgtgtgttgcttctctattgcaagcagattccctgttggatttacttcggatttattcccttttaaagaatttttgcccatatctggaagggcactatatttttgggaggagccatagattcctggttatcctatttttaaacaaaatgtagacaaagtgaactctattttgattattgagaaaggagtagttttctatccctctaagagtatacttgaatcagacattttaaggatgtcactatggcactgttgtcatttccaaattcctagaaaagtttgttttactttgtttttattctgttaatgcattctttcttctctttacttcctttcttaccagtacactcctatctcaactctgtttatttgatgagttctgtcccgtaaatcatatttcccttacaattaataaatgtcacttcatattttataataaaccactcagtaaaagcaaaagcttgtcctgagaagtagagtgagttctttttcactctgtgtctaataatgttaaggtgggaaaaaaaaaagtgtggcatagctacctgcccatccccaaccctcagcaaagtagaatctcttttctggtaattttgggtttccgctctgggctctggcaagttgaacaatcctagccattgacaatcgtgatagttattattttcccatttgctgtctttttgtatctaaagtcttcctattgtactgcacaaaccatggattgtacatatttttatatattatgtcttattttattatttctaaataaaaaaattaaaaattgaaaaaaaaaaaaa

SEQ ID NO: 317559 - DNA, 1284 bp, Artificial Sequence
  derived and/or modified sequence
atgggtagtgtcaggaccaacaggtacagcatcgtttcaagtgaggaggacggaatgaagcttgctactatggctgttgccaacgggttcggcaacgggaagagtaaggtacacacacggcagcaatgcagaagcagatttgttaagaaggacgggcactgcaacgtgcagttcatcaatgtgggagagaaggggcagcgataccttgcggacatttttactacttgcgtggatatccgatggaggtggatgctggtgatattttgcctcgcatttgtcctctcttggctgtttttcggatgcgtgttttggctgattgcattgctgcacggcgacctggatgcatcaaaagagggaaaagcctgcgtttccgaggtaaattcattcaccgccgccttcctctttagcatagagacacagacgactattggatacggctttagatgtgtgacggacgagtgtccgatagccgtgttcatggtggtgttccaaagtatcgtgggttgtattatcgacgctttcatcatcggagccgtgatggcgaaaatggcaaaaccgaagaaaaggaacgagactctcgtgttcagccacaatgcagtgattgctatgagggatggaaagttatgcctgatgtggcgcgtgggaaatctacgcaaatctcacttggtggaggcccacgtcagagcccagttattaaaatcgcgcataacgagcgagggcgagtacatccctcttgatcagattgacatcaatgtcggattcgactccggtatcgatcgaatattcttagtgtcacccatcacgattgtgcacgaaattgacgaggatagccctctttatgacctcagcaaacaggacattgacaacgctgactttgaaatagttgtcatcctggaggggatggtggaggccaccgccatgaccacccagtgtaggtcttcctacctggctaatgaaatactctggggacacagatatgagcctgtgctgtttgaagaaaagcactattacaaagtggactattctcggtttcataaaacctatgaggtccccaacactcccctgtgcagtgcaagagatttggccgaaaaaaagtacattctgtcaaatgctaacagcttctgttatgagaacgaggtcgcattgacatcaaaagaggaagacgattcagaaaatggggtgcctgagtccaccagcactgatacccctcctgatatagacttgcacaaccaggcttccgtgcctctggagcctagacctctaaggagagaaagcgagatttag

SEQ ID NO: 317560 - DNA, 1284 bp, Artificial Sequence
  derived and/or modified sequence
atgggatcagtgagaaccaaccggtactccatcgtgtcatccgaggaggacggcatgaagctggctacgatggcagtagccaacggtttcggaaacggcaaatccaaagtgcatacacggcaacaatgccgatctcggtttgtgaagaaagatggtcattgtaatgtgcagttcataaatgtcggcgaaaaaggacaaaggtacctggcggatatttttacaacgtgcgtggacatccgatggcgttggatgctggtgatcttctgtttagccttcgtgctctcttggctcttcttcggttgtgtattttggttaatcgccctgctgcacggcgatttggacgctagcaaagaagggaaggcctgtgtgagtgaggtgaacagtttcaccgcggcctttcttttctcaatcgaaacgcagaccacaatcgggtatggtttccgttgtgtgaccgatgagtgtcctatcgccgtcttcatggtggtattccagtcaatcgtcggctgcatcatcgacgcctttatcatcggagcggtgatggccaagatggctaaaccaaaaaaacgaaatgagacgctcgtgttttcccacaatgccgtcattgcaatgcgcgacggcaaactttgcctgatgtggcgggtgggcaacttgagaaaatcgcatctggtggaggcccacgtacgggctcagctgctaaagagtagaattacctcagaaggcgagtacatccctcttgatcagatagacatcaatgtgggctttgatagcggcattgacaggatatttcttgtatctccgatcactattgtccacgaaatcgacgaggactcccctctgtacgacctcagtaaacaggacattgacaatgcagactttgaaatagtagtcattctggaaggaatggtcgaggccacagccatgactacccagtgccgctctagctacctagcgaacgaaattctgtggggacatcggtacgagccagtcctcttcgaggaaaaacattactacaaggtggactactcaagattccataaaacctacgaggttccaaatacacctctgtgcagcgcccgcgacctagctgagaagaaatatatactcagtaacgccaactccttttgctacgagaacgaagtggcactgacctccaaagaagaagatgacagcgagaatggcgttccagaaagcacctctactgatacaccacctgacattgatcttcacaaccaggctagcgtcccactggagccccgccctttgagacgagaaagcgagatatag

SEQ ID NO: 317561 - DNA, 1284 bp, Artificial Sequence
  derived and/or modified sequence
atgggctctgtgaggaccaaccgctacagcatcgtgagcagcgaggaggatggcatgaagctggccaccatggctgtggccaacggctttggaaatggcaagagcaaggtgcacacccggcagcagtgccgcagcagatttgtgaagaaggatggccactgcaatgtgcagttcatcaacgtgggggagaagggccagcgctacctggccgacatcttcaccacctgtgtggacatccgctggcgctggatgctggtgatcttctgcctggcctttgtgctgtcctggctgttcttcggctgtgtgttctggctgattgccctgctgcacggggacctggatgccagcaaggagggcaaggcctgtgtgtctgaggtgaacagcttcaccgctgccttcctgttcagcattgagacccagaccaccatcggctacggcttccgctgtgtgacagatgaatgtcccatcgctgtgttcatggtggtgttccagagcatcgtgggctgcatcattgatgccttcatcatcggggctgtgatggccaagatggccaagcccaagaagagaaatgagaccctggtgttcagccacaatgctgtgattgccatgagagatggcaagctgtgcctgatgtggagggtgggcaacctgaggaagagccacctggtggaggcccacgtgcgggcccagctgctgaagagccgcatcaccagcgagggggagtacatccccctggaccagattgacatcaacgtgggctttgacagcggcatcgaccgcatcttcctggtgagccccatcaccatcgtgcatgaaattgatgaggacagccccctgtatgacctgagcaagcaggacatcgacaatgctgactttgagatcgtggtgatcctggagggcatggtggaggccacagccatgaccacccagtgccgcagcagctacctggccaatgagatcctgtggggccacagatatgagcctgtgctgtttgaggagaagcactactacaaggtggactacagccgcttccacaagacctatgaggtgcccaacacccccctgtgcagcgcccgggacctggccgagaagaagtacatcctgagcaatgccaacagcttctgctatgaaaatgaggtggccctgaccagcaaggaggaggatgacagtgaaaatggagtgcctgagagcaccagcacagacaccccaccagacatcgacctgcacaaccaggcctctgtgcccctggagccccggcccctgcggcgggagagcgagatctag

SEQ ID NO: 317562 - DNA, 1284 bp, Artificial Sequence
  derived and/or modified sequence
atgggcagcgtgcggaccaaccggtacagcatcgtgagcagcgaggaagatgggatgaaactggccacaatggcagtggctaacggatttggtaatggcaagtctaaagtgcacactcgtcagcagtgcagaagtagattcgtgaagaaagacggtcattgtaacgtacagtttataaacgtgggagaaaaggggcagcgctacctcgcagatatcttcactacctgtgtcgacatacgctggaggtggatgctggtgattttctgtctagccttcgtacttagctggctgtttttcggatgcgtgttctggctgattgcattactgcatggagacctggatgcctcaaaggaaggtaaagcatgcgtttcggaggtgaatagcttcacagccgcttttctgtttagcatcgagacgcagaccacgattggctatggcttccgatgcgtaacagatgagtgtccgattgccgtgtttatggtagtatttcaatctatcgtgggctgcatcatcgacgcatttataatcggagccgtgatggcaaagatggcaaagcccaagaagcgtaacgaaactttggtttttagccacaatgctgtgattgccatgagagacggaaaactgtgcctgatgtggagggtaggaaacctccgaaagtcccacctagtcgaagctcacgttagggcccagttgctgaaaagtcggatcacatctgaaggcgagtacattccacttgaccaaatcgatattaatgtgggcttcgatagtggaatcgaccggattttcttagtgtcccccattactatcgttcacgaaatagatgaggattcacccctgtacgatctgagcaagcaagatatagacaacgcagatttcgagattgtggtaatactcgaggggatggtggaagccactgccatgaccacacagtgtagatcctcatatctggccaacgagattctttgggggcaccgctacgagcctgtcttattcgaggaaaagcattactataaggtggactacagccgtttccacaagacctatgaagtgcctaatacgcccttgtgttccgcacgggatctggccgagaagaagtacatcctaagtaatgctaatagcttttgttatgagaacgaggtcgccttgacttccaaggaagaggacgactctgagaatggtgtgcccgaatccacctcaaccgacactcctccggacattgacctgcataatcaagcaagtgtgcctttggagcctcgccccctgcgccgggagagcgaaatttag

SEQ ID NO: 317563 - DNA, 1284 bp, Artificial Sequence
  derived and/or modified sequence
atgggcagcgtgcggaccaaccggtacagcatcgtgagcagcgaggaggacggaatgaagctcgccacaatggcagttgccaatgggttcggtaatggaaagtcgaaggtgcatactcgccaacagtgtcgttcaaggttcgtgaaaaaggatggtcactgtaacgtgcagttcataaacgtcggggagaaaggccagagatacttggctgacattttcacaacatgcgtcgatatacgctggcgatggatgttagtcatattttgtctcgcctttgtactgtcatggttgttcttcggctgtgtgttttggctgatagcactgctccatggcgacctcgacgcctcaaaagagggcaaggcttgtgtatctgaggtcaattcttttacagcggcgttcctcttctctatagagacacaaactaccatcgggtatgggttccggtgtgtaactgatgaatgcccaatagctgtcttcatggtcgtgtttcaatcaatcgtcggatgtatcatagacgcattcatcatcggcgcagtgatggcaaagatggccaagcctaagaagcggaatgagacccttgtgttctcccacaacgcagtgatagcaatgagagatggcaagctctgtttgatgtggagagtgggaaacttgcgtaaaagtcatctggtcgaggcgcatgtaagagctcagttgctaaaatcccgtatcacatctgagggggagtacattcccttggaccagattgacatcaacgtgggtttcgattccggcatagacaggatttttcttgtgtcccccatcacaatagtgcacgaaatcgacgaggactcgcctctctatgatctcagcaaacaggacatagataacgccgattttgaaatcgtcgttatcctcgaaggcatggtggaagcaactgctatgaccactcagtgccgctcctcttatctagccaacgaaattctctggggccacagatatgagccagtgctgttcgaagaaaaacattattacaaagtcgactatagccggttccataaaacctacgaggtgcccaatactcctctgtgtagtgcccgtgatctggcggagaagaagtacatattgagcaacgccaatagcttctgctatgagaacgaggttgcccttacttccaaggaggaagatgacagcgaaaatggggtgcccgagagtaccagtaccgatacaccccctgacatcgacctacataaccaagcaagcgtgccattggagcctcgaccattaagacgggaatccgagatttag

SEQ ID NO: 317564 - DNA, 5363 bp, Artificial Sequence
  derived and/or modified sequence
gcgcactggagccctggccagcgcgcagccttcccggcgccggcgggctgggtcttgggaattctggtttgctttggctcactcgctttttacaaaccactggatcttacatgcctctgtaccccccacttccactccatgtccccatgctcctgcgccagcaacaggacatgttctctggatgtcagctgagtcattaaagtaactctgcatgtcagtagacagaccttggtagaaccacaaggctcccagagacacccatctctcctcatttttttggtgtgtgtgtcttcaccgaacattcaaaactgtttctccaaagcgttttgcaaaaactcagactgttttccaaagcagaagcactggagtccccagcagaagcgatgggcagtgtgcgaaccaaccgctacagcatcgtctcttcagaagaagacggtatgaagttggccaccatggcagttgcaaatggctttgggaacgggaagagtaaagtccacacccgacaacagtgcaggagccgctttgtgaagaaagatggccactgtaatgttcagttcatcaatgtgggtgagaaggggcaacggtacctcgcagacatcttcaccacgtgtgtggacattcgctggcggtggatgctggttatcttctgcctggctttcgtcctgtcatggctgttttttggctgtgtgttttggttgatagctctgctccatggggacctggatgcatccaaagagggcaaagcttgtgtgtccgaggtcaacagcttcacggctgccttcctcttctccattgagacccagacaaccataggctatggtttcagatgtgtcacggatgaatgcccaattgctgttttcatggtggtgttccagtcaatcgtgggctgcatcatcgatgctttcatcattggcgcagtcatggccaagatggcaaagccaaagaagagaaacgagactcttgtcttcagtcacaatgccgtgattgccatgagagacggcaagctgtgtttgatgtggcgagtgggcaatcttcggaaaagccacttggtggaagctcatgttcgagcacagctcctcaaatccagaattacttctgaaggggagtatatccctctggatcaaatagacatcaatgttgggtttgacagtggaatcgatcgtatatttctggtgtccccaatcactatagtccatgaaatagatgaagacagtcctttatatgatttgagtaaacaggacattgacaacgcagactttgaaatcgtggtcatactggaaggcatggtggaagccactgccatgacgacacagtgccgtagctcttatctagcaaatgaaatcctgtggggccaccgctatgagcctgtgctctttgaagagaagcactactacaaagtggactattccaggttccacaaaacttacgaagtccccaacactcccctttgtagtgccagagacttagcagaaaagaaatatatcctctcaaatgcaaattcattttgctatgaaaatgaagttgccctcacaagcaaagaggaagacgacagtgaaaatggagttccagaaagcactagtacggacacgccccctgacatagaccttcacaaccaggcaagtgtacctctagagcccaggcccttacggcgagagtcggagatatgactgactgattccttctctggaatagttactttacaacacggtctgttggtcagaggcccaaaacagttatacagatgacggtactggtcaagatgggtcaagcaagcggccacaagggactgaggcaagcacaatggtttcaaagaaagactgtaagctccatgattagcataaagcactaaccatgtctccatgtgacccgatggcacatagatgttgtagaataagttatgggtttttatgttttgttttgtgtttttccaaaacttgaacttgcaggcaagccttggttgggtatttgatttatccagaatgcttctctttagggaacaaggatgtttttaatggcataacaaaggcaagactctgccttaatttttgaaaagctgctaactacatgaacacaaatgtgtatttttgttgcagtgtagttttccttttgtgtaattttaaagtcagtgttgaattttattgaaagctcatgatgcgcttcaaagtggcaagtatttggctattaactgccaaaacaagagcctgattttttgaggccagtaattcgtttgctagaattgattttttttctctctctctttgttacataagggcattatgtaacactagccgaatggtagcctctgggttgttgtttttttcttttcctccatgatgttaatgggttatctcaaattttaagttaaactacctaaaataaataccaaagataatgcatatttttgcacagtggagcttacacttaaaagaaaacaaagccccatgggctgccttgaaatcaagagacaataactttgaacctcagcaagaccttgaaccgccggttcattttgcaccttattcagaaaatagagcatcatactcaccgagtctagtcagtgtagtgcttttaaaaattttgtcctttcatgtaacttttttattttaagaggaagaagaagaaaggggcacacacacacaataccgacgtctatcctttcctgctaggcagtgctggccaggctcatgtgtagtgtgcgagatggtgatgtactcttatatttttctgggcttttccttttgcacattccaaaattcatttcataagacaagatcttcataggacctccttggcatcctggcattctcaaaactgagccatccagcatgaaagataaatgggtttaaacccttgctgctgaatttattgcctggactgtcaggacatcaccagcccaccttcaccttagggaagatgccacacctggcctccacacttgctcttctgatcagtctgtctggattgagtcctacagtgtcagatagggcggcaaatgccaaagcagggaaacagggaggtgtggacaagccagtttgatgcagcacttcagatcaagtgcttaggaaggagaggaaacttgccttttttatggcagaggatagtaatgaaaatgtctcagtattttagggtcaatgagagccataaaaatataacataatcacaagtaaaggagataatggtctaaaacagctatttcccttttctgtgtgcatacttatgactgaatgtgagctaagcattttctcctgtggagccctagagcaggttactaaggaaggacacattgttttccagaagcctcccctgcctggctgactgccttgctagaaacataattttttttttctcactgaagctcaataatggaactctttttttttttttttttaatttaaagttccctatttgtgaattctgggattactgacttttctttttaattggagtctcaaaatcaactctcttatggtattatatctctgtatgccattaaaaaacagcttgttctagaatcatgtattttgtaaactgatgtttgtgatggtctctggttcttgaacagccatatctgaatgccgtgcctgcaaaactatgacaatttttgctgttttcagccttcagatttgatggcttgggaaactgaggtgttattttcaatgaaacaaagaaagagatgttaagcaagtggttgttttagatccaaatgtaaaggcaggtttgggaaggtgtttaaagagttggaggaattggggattgagttgtaaagaaaacttacagaagaggcaacaatttggttcttgacagtgagaggatattgagggcttcagctgctgctattatgatgttttgcaaaggaaaataatcaaaccaaagagtattcagtgatatgtaaattaaatgaagatacagtggagaatgggggtgaccacaaaagaggctccccctaaacacacagtgctgccacttaaaaagacttgagaaatttgaaagggggtgggtatggggggggcaagaaagagggagggaaatctttcaacttatttctgaaaaagagaaaaaaatataaaatttctggtgcacaggtttgttttttcaagaaaattttgcagaagctatgtttttaaagtgtacattttataaagtttatcagatattttcatatttaaagccaaatgtaaatagaggtctgtaaagaaaaataattgccatagaaagtataatttcagtgcagtaatttctgagagctagtacctatatgctaccggttagcatggttttagcaaatatataccagccttataaggttcgtattgctatgttcttctgttatttatttcagcatggactgttcatttgaaacctttttctagttattagcgttttaacagttacaagctttaaatggcaattttttttttttttttttttttttttttttttttgtcaagagccaagacacaggtaatgcacgacattgattgctgcattttaccttcaaaatatttgtccttattgactgggtctccttaattaatgtacacatgtcattagaatgcagacggaggggactcaccatgaatatctggggttgattcccagatgtgtgttgcttctctattgcaagcagattccctgttggatttacttcggatttattcccttttaaagaatttttgcccatatctggaagggcactatatttttgggaggagccatagattcctggttatcctatttttaaacaaaatgtagacaaagtgaactctattttgattattgagaaaggagtagttttctatccctctaagagtatacttgaatcagacattttaaggatgtcactatggcactgttgtcatttccaaattcctagaaaagtttgttttactttgtttttattctgttaatgcattctttcttctctttacttcctttcttaccagtacactcctatctcaactctgtttatttgatgagttctgtcccgtaaatcatatttcccttacaattaataaatgtcacttcatattttataataaaccactcagtaaaagcaaaagcttgtcctgagaagtagagtgagttctttttcactctgtgtctaataatgttaaggtgggaaaaaaaaaagtgtggcatagctacctgcccatccccaaccctcagcaaagtagaatctcttttctggtaattttgggtttccgctctgggctctggcaagttgaacaatcctagccattgacaatcgtgatagttattattttcccatttgctgtctttttgtatctaaagtcttcctattgtactgcacaaaccatggattgtacatatttttatatattatgtcttattttattatttct

SEQ ID NO: 317565 - DNA, 1685 bp, Artificial Sequence
  derived and/or modified sequence
tgggaggcgctgaagcgagggcagatctgagtgtctgtaggagttgctattccaaaaaaaatcattactctctaattgttctgattttagatcagcaaagcgtgccgggcggtggtggagagactgagggcggacaaggcgagagggaacgagccgtccacccttcggagaagcctaggcgccttgacatgttctctggatgtcagctgagtcattaaagtaactctgcatgtcagtagacagaccttggtagaaccacaaggctcccagagacacccatctctcctcatttttttggtgtgtgtgtcttcaccgaacattcaaaactgtttctccaaagcgttttgcaaaaactcagactgttttccaaagcagaagcactggagtccccagcagaagcgatgggcagtgtgcgaaccaaccgctacagcatcgtctcttcagaagaagacggtatgaagttggccaccatggcagttgcaaatggctttgggaacgggaagagtaaagtccacacccgacaacagtgcaggagccgctttgtgaagaaagatggccactgtaatgttcagttcatcaatgtgggtgagaaggggcaacggtacctcgcagacatcttcaccacgtgtgtggacattcgctggcggtggatgctggttatcttctgcctggctttcgtcctgtcatggctgttttttggctgtgtgttttggttgatagctctgctccatggggacctggatgcatccaaagagggcaaagcttgtgtgtccgaggtcaacagcttcacggctgccttcctcttctccattgagacccagacaaccataggctatggtttcagatgtgtcacggatgaatgcccaattgctgttttcatggtggtgttccagtcaatcgtgggctgcatcatcgatgctttcatcattggcgcagtcatggccaagatggcaaagccaaagaagagaaacgagactcttgtcttcagtcacaatgccgtgattgccatgagagacggcaagctgtgtttgatgtggcgagtgggcaatcttcggaaaagccacttggtggaagctcatgttcgagcacagctcctcaaatccagaattacttctgaaggggagtatatccctctggatcaaatagacatcaatgttgggtttgacagtggaatcgatcgtatatttctggtgtccccaatcactatagtccatgaaatagatgaagacagtcctttatatgatttgagtaaacaggacattgacaacgcagactttgaaatcgtggtcatactggaaggcatggtggaagccactgccatgacgacacagtgccgtagctcttatctagcaaatgaaatcctgtggggccaccgctatgagcctgtgctctttgaagagaagcactactacaaagtggactattccaggttccacaaaacttacgaagtccccaacactcccctttgtagtgccagagacttagcagaaaagaaatatatcctctcaaatgcaaattcattttgctatgaaaatgaagttgccctcacaagcaaagaggaagacgacagtgaaaatggagttccagaaagcactagtacggacacgccccctgacatagaccttcacaaccaggcaagtgtacctctagagcccaggcccttacggcgagagtcggagatatga

SEQ ID NO: 317566 - DNA, 1284 bp, Artificial Sequence
  derived and/or modified sequence
atgggctctgtgcggaccaatcgctatagcatcgtgtcgtccgaggaggacggcatgaaattagctaccatggcggttgccaacggtttcggcaacggaaaatctaaggtacacaccagacagcagtgccggagtagattcgtcaaaaaggatggccattgcaatgttcagtttattaacgtcggcgaaaaaggtcagaggtatctcgcggatatatttacaacctgtgttgatatccggtggagatggatgctcgttatattctgcctcgcgtttgtcctctcatggctctttttcgggtgcgtgttctggttaatcgccctactccatggcgatctggacgcatccaaggagggaaaggcctgtgtatctgaagtcaacagttttacagctgcattcttgtttagcatcgagacccagaccaccatagggtatggttttcgatgcgtaacagatgaatgtcccatcgccgtatttatggtggtgttccagtcaatcgtcggatgtatcatcgatgccttcataatcggcgctgtaatggccaagatggccaaacccaaaaagcgaaatgaaaccctcgtgtttagccacaatgctgtgatagcaatgcgggacgggaagctctgcctgatgtggcgcgtgggcaacctgcgtaagtcacatcttgtggaggctcacgtgcgagcccagttactgaagtcccggatcacttcagaaggggaatacatccctctcgaccagattgatataaacgtcggcttcgatagtggcattgatagaatctttctggtgtcgcctataacaatagtccacgagattgacgaagactctccactctacgacctcagcaaacaggacatagacaatgcagatttcgagatcgtggtaatacttgagggtatggtagaggctacagctatgacaacacagtgccggtcctcgtacttggctaatgagattttatgggggcatcggtacgaacccgtgctgttcgaggagaagcattattataaagtggattattcgcgattccacaagacctatgaagtgcctaacacccctttatgttctgccagagatctggcggagaaaaaatatattctctctaacgccaactctttctgttacgaaaatgaagttgctctcacttcaaaagaggaggatgattctgagaacggcgttcctgaatccactagtaccgacactccgccagacattgatctacacaatcaagccagtgtccctcttgagccacgcccattgaggagagaaagcgagatctag

SEQ ID NO: 317567 - DNA, 1284 bp, Artificial Sequence
  derived and/or modified sequence
atgggctccgtgcggactaatcgttatagcatcgtatcttcagaagaggacgggatgaagcttgccaccatggctgtcgccaacggctttggcaacggaaaaagcaaggtgcatacccggcagcagtgtagatctcggtttgtgaagaaagacgggcactgcaatgtccagtttatcaatgtcggggagaaagggcaaaggtacctggccgacatttttaccacctgcgtcgatattcgctggagatggatgctggtcatcttctgtttagcgtttgtcctgagttggttattctttgggtgtgttttttggctcatcgccctgctgcatggagacttggacgccagcaaggagggaaaggcttgcgtgtctgaagtcaacagttttacagccgcattccttttttcaatagagacccagacaaccattgggtacggattcaggtgtgttacagatgaatgcccaattgccgtctttatggttgtgtttcagtcaattgtgggttgcattatcgatgcttttatcatcggcgctgtcatggcaaagatggcaaagccaaagaagagaaatgaaaccctggtgttttcacacaacgccgttattgccatgcgcgatgggaaactgtgcctcatgtggcgcgtgggcaatcttcgcaaatcccatctagtagaggcccacgtcagagcccaacttcttaaatcacgcataactagcgaaggagagtatattccactggatcagatcgacatcaatgttggattcgacagcggcatcgacaggatttttttggtttcccccatcaccatcgtgcacgaaatcgatgaagactctccgttgtatgacctgtccaagcaagacatcgataacgcagactttgagattgttgtaatcctggaaggaatggtcgaagcaacagctatgacaacccagtgtcgcagttcctacctcgcaaatgagatactgtgggggcatagatacgagccagtcctgtttgaggagaagcattattacaaagttgattatagccggtttcataagacttacgaagttcctaatactcccttgtgttctgccagagatctggctgagaaaaagtatatactgagtaatgctaattccttctgctatgaaaacgaggttgccttaacttccaaagaagaggatgatagcgaaaatggcgttcctgaatccacgtccaccgatactccgccagatattgacttacacaatcaggcatcagtccctctggaaccaagacccctgagaagggaaagcgagatctag

SEQ ID NO: 317568 - DNA, 1284 bp, Artificial Sequence
  derived and/or modified sequence
atgggcagcgtgagaaccaacagatacagcatcgtgagcagcgaggaggacggcatgaagctggccaccatggccgtggccaacggcttcggcaacggcaagagcaaggtgcacaccagacagcagtgcagaagcagattcgtgaagaaggacggccactgcaacgtgcagttcatcaacgtgggcgagaagggccagagatacctggccgacatcttcaccacctgcgtggacatcagatggagatggatgctggtgatcttctgcctggccttcgtgctgagctggctgttcttcggctgcgtgttctggctgatcgccctgctgcacggcgacctggacgccagcaaggagggcaaggcctgcgtgagcgaggtgaacagcttcaccgccgccttcctgttcagcatcgagacccagaccaccatcggctacggcttcagatgcgtgaccgacgagtgccccatcgccgtgttcatggtggtgttccagagcatcgtgggctgcatcatcgacgccttcatcatcggcgccgtgatggccaagatggccaagcccaagaagagaaacgagaccctggtgttcagccacaacgccgtgatcgccatgagagacggcaagctgtgcctgatgtggagagtgggcaacctgagaaagagccacctggtggaggcccacgtgagagcccagctgctgaagagcagaatcaccagcgagggcgagtacatccccctggaccagatcgacatcaacgtgggcttcgacagcggcatcgacagaatcttcctggtgagccccatcaccatcgtgcacgagatcgacgaggacagccccctgtacgacctgagcaagcaggacatcgacaacgccgacttcgagatcgtggtgatcctggagggcatggtggaggccaccgccatgaccacccagtgcagaagcagctacctggccaacgagatcctgtggggccacagatacgagcccgtgctgttcgaggagaagcactactacaaggtggactacagcagattccacaagacctacgaggtgcccaacacccccctgtgcagcgccagagacctggccgagaagaagtacatcctgagcaacgccaacagcttctgctacgagaacgaggtggccctgaccagcaaggaggaggacgacagcgagaacggcgtgcccgagagcaccagcaccgacaccccccccgacatcgacctgcacaaccaggccagcgtgcccctggagcccagacccctgagaagagagagcgagatctag

SEQ ID NO: 317569 - DNA, 1257 bp, Artificial Sequence
  derived and/or modified sequence
atgtcctattacgggtctagctatcatatcatcaatgctgatgctaagtatccaggctacccacccgagcatatcattgcagagaaaaggagagcccgacgcaggcttttgcacaaggacggatcctgtaacgtgtatttcaagcatatttttggagagtggggtagctatgtagtggatatttttaccaccctcgtcgatacaaagtggagacatatgttcgtgatcttttctctgagctatatcctgtcttggctcatctttggatcggtgttctggctaatcgcattccatcatggagacctgctgaacgacccagacattacgccctgtgttgacaacgtccattccttcactggagcattcctgttttccctggagactcagaccactataggctatggctacaggtgcgtaaccgaagagtgcagtgtggccgtccttatggttattcttcaatctatcctgtcgtgtataattaacaccttcatcattggagcggcccttgccaagatggctaccgctcgcaaacgggctcaaaccatccgcttcagttactttgcgctgattggcatgagggatggcaaactgtgtctcatgtggcgcattggagatttcagacctaaccatgtggtggaaggtaccgtccgagcccagttattaagatataccgaggactccgaggggagaatgacaatggcttttaaggatttgaaactggtaaacgaccagattattcttgtgacccccgtcactatcgtccatgaaatcgaccacgagagccctctgtatgctctggatagaaaagctgtggccaaggacaacttcgagattttagtgacatttatatataccggcgactcaactggcacatcacatcagagccgctcaagttatgtcccaagggaaatcctatgggggcacagatttaacgatgtgcttgaagtgaagagaaaatactacaaagtcaactgcctacagtttgagggttcagttgaagtctatgcacctttttgttccgccaagcagttagactggaaggatcagcagttgcacattgaaaaagctccgccagtgcgtgaatcttgtaccagtgacaccaaggcccggagacgaagcttctctgcagtcgctatcgtatcttcatgcgaaaatccagaggagactaccactagcgccacacatgagtaccgggagaccccttaccagaaggcattactgaccctgaatagaattagcgtcgagagccagatgtag

SEQ ID NO: 317570 - DNA, 1257 bp, Artificial Sequence
  derived and/or modified sequence
atgagctactatggcagcagttaccacatcatcaatgcagacgctaagtatcctgggtaccccccggaacacattattgccgaaaagagacgggccaggcgccgcttgctacataaagatggttcttgcaacgtgtactttaagcatatctttggcgaatgggggagttacgtagtggatattttcaccactcttgtggacacgaaatggcggcatatgttcgtgatcttttctctatcctatatcctttcatggctcatatttgggtcggtgttttggctaatcgccttccatcacggcgaccttttgaacgatcccgacattaccccatgtgtggataacgttcattcatttaccggcgccttcctgttttcgctggaaacacagacgactatcgggtacggatatagatgtgttactgaggagtgcagtgtggctgtactcatggtaattcttcagtctatcctgtcctgcattatcaacacttttatcatcggagccgcattggcaaagatggctactgcaagaaagagagcccagactattcggtttagctatttcgcactcatcggaatgcgcgacggtaagttgtgcctgatgtggaggattggggacttcaggccaaatcacgtggtggagggcactgtgcgagctcaattgctcaggtacacggaagattctgaaggcaggatgacaatggctttcaaagatttaaagctggtaaacgatcagattattttggtgaccccggtaactattgtccatgagatagatcatgaaagtccgctgtacgctcttgaccgcaaagctgtggcaaaggataatttcgaaattctcgtcaccttcatttacactggcgactcaacaggcacgtcacaccagtctcggtcttcttacgtacctagagaaatcctgtggggacatcggtttaatgacgtcttggaggtaaagcggaagtactacaaggtgaattgcctacagtttgaggggtccgtcgaggtgtatgcgccattttgctctgctaaacagcttgattggaaggaccagcagctacacatcgagaaagccccacctgtgcgcgagagctgtacaagcgatactaaagctcgcagaaggtccttctccgctgtcgcaattgtgtcctcatgcgaaaatccagaagaaactaccacctcggccactcatgagtaccgggagactccttaccaaaaggcgttgctcacgctcaataggattagtgtggagtctcagatgtag

SEQ ID NO: 317571 - DNA, 1257 bp, Artificial Sequence
  derived and/or modified sequence
atgtcatactacggctcttcttaccacataatcaacgctgatgcaaaatatcccggctacccccccgaacatatcatcgcggagaaacgccgcgccagacggaggttattgcataaagacgggtcctgcaacgtgtattttaagcatatctttggcgagtggggctcttacgtcgtcgacatcttcaccacacttgtcgacacaaagtggcgacacatgtttgtcattttcagcctgtcctacatcctctcctggctgatcttcggctccgtattttggctgatcgcctttcaccatggcgaccttctcaacgaccccgatataacaccttgcgttgacaacgtgcactcctttactggagcattcctattctctctggagactcagactactattggctatggatatagatgcgtgacagaagaatgctctgtcgcagtgttgatggtgattttgcagtcaattctgagctgcatcatcaatacattcataatcggagccgccctcgctaagatggccactgctcgcaaacgggcccaaacaatccgcttttcatatttcgctctcattggcatgcgtgacgggaagctttgcctcatgtggcggattggtgatttcagaccaaaccacgtcgtagaagggacagtcagagcccagctgctgcggtataccgaggacagcgagggtaggatgacaatggcgttcaaggaccttaaattggttaatgaccaaattattctcgttacacccgtgacaattgtccacgagattgaccacgagtcaccactgtatgccctggatagaaaggccgtggccaaagacaacttcgagatccttgtgaccttcatttacaccggggattcgacggggacatctcaccagagcagatcttcctatgtgccacgagagatattgtggggacacagattcaatgatgtgcttgaagttaaaagaaaatactataaggtcaactgtcttcagttcgaaggcagtgtggaagtatacgctccattttgctccgccaagcagctggattggaaggatcaacagctccatatcgagaaggctcctcctgtccgagagagttgtacttcggatacaaaggcgagacgcagatcgttctccgccgtagctatcgtgtctagctgtgagaatcctgaggaaaccacaactagtgcaacacatgagtatagggaaactccttaccaaaaggcgctcctgacactgaataggatatcagttgagagtcaaatgtag

SEQ ID NO: 317572 - DNA, 1257 bp, Artificial Sequence
  derived and/or modified sequence
atgtcttattacggttcctcttatcatatcatcaacgccgacgccaagtatcccggctatccaccggaacatattatcgcagagaagcgcagggcgcggcgccgcttgctgcacaaagacggtagctgcaatgtgtatttcaagcatatctttggcgagtggggcagttacgtggtggatatcttcaccacactcgtggacacaaagtggcggcacatgtttgtgatcttcagtctgagctacattttgtcctggctaatcttcggcagtgtcttctggctgatagctttccatcacggcgacctcctcaacgaccctgatatcacaccatgcgtggacaacgtgcattcgttcacaggcgcttttctgttcagcctagagacccaaacaaccataggctacgggtaccgctgtgtgactgaagaatgcagcgtggcagtcctcatggtgatccttcagtctatattaagctgtattattaacacctttatcattggcgccgccctagcaaagatggccaccgcccgcaagagggcccagacaattcggttttcttatttcgctttgattggcatgcgagatgggaagctttgtctgatgtggcgcataggcgatttccgtccaaaccacgtggttgaaggcacggttcgagcccagcttctccggtacactgaggactctgaaggcagaatgaccatggccttcaaggacctaaagctggtcaatgatcaaattatcctcgtgactcctgtgacgattgttcatgaaatcgatcacgagtccccactgtacgccctggatcggaaggcagtcgctaaagataatttcgagatcctggtgacctttatctacaccggtgactccaccggcactagtcatcaatcaaggtcttcttatgtgcccagggagattctgtggggacatcgcttcaatgatgtcctggaggtgaaacgcaaatactataaagtgaactgcctgcaatttgaaggatctgtcgaggtgtacgcacccttttgtagcgcgaagcagctagattggaaagatcagcagctccacatcgaaaaagcgcctccagttcgagaaagttgcacctctgatacaaaggctagacggcgctctttctcagccgtcgctatagttagtagctgcgagaaccccgaagaaactacaacttcagcgacacatgaatatcgcgagacaccctaccaaaaagcacttctgacactgaatcggataagtgtcgagagccaaatgtag

SEQ ID NO: 317573 - DNA, 1257 bp, Artificial Sequence
  derived and/or modified sequence
atgagctactacggcagcagctaccacatcatcaatgctgatgccaagtacccaggctacccacctgagcacatcatcgccgagaagaggcgggcccggcggcggctgctgcacaaggatggcagctgcaatgtgtacttcaagcacatctttggagagtggggcagctatgtggtggacatcttcaccaccctggtggacaccaagtggaggcacatgtttgtgatcttcagcctgagctacatcctgtcctggctgatcttcggcagcgtcttctggctgattgccttccaccacggggacctgctgaatgaccctgacatcaccccctgtgtggacaacgtgcacagcttcaccggggccttcctgttcagcctggagacccagaccaccatcggctacggctaccgctgtgtgacagaggagtgcagcgtggccgtgctgatggtgatcctgcagagcatcctgagctgcatcatcaacaccttcatcattggagctgccctggccaagatggccacagccaggaagagggcccagaccatccgcttctcctactttgccctgattggcatgagagatggcaagctgtgcctgatgtggagaattggagacttccggcccaaccacgtggtggagggcaccgtgcgggcccagctgctgcgctacacagaagattctgagggccgcatgaccatggccttcaaggacctgaagctggtgaatgaccagatcatcctggtgacccctgtgaccatcgtgcatgaaattgaccacgagagccccctgtatgccctggacaggaaggctgtggccaaggacaactttgagatcctggtgaccttcatctacacaggagacagcacaggcaccagccaccagagccgcagcagctatgtgccccgggagatcctgtggggccaccgcttcaatgatgtgctggaggtgaagaggaagtactacaaggtgaactgcctgcagtttgagggctctgtggaggtgtatgcccccttctgcagcgccaagcagctggactggaaggaccagcagctgcacatcgagaaggcccctcctgtgcgggagagctgcaccagtgacaccaaggccaggagaagaagcttctctgctgtggccatcgtgagcagctgtgagaaccctgaggagaccaccaccagcgccacccatgagtaccgggagaccccctaccagaaggccctgctgaccctgaaccgcatctctgtggagagccagatgtag

SEQ ID NO: 317574 - DNA, 1257 bp, Artificial Sequence
  derived and/or modified sequence
atgagctactacggcagcagctaccacatcatcaacgccgacgccaagtatcctggataccccccagagcatattattgcggagaaaaggagggcccggcggagactactccataaggacggcagttgcaacgtgtattttaagcacatttttggggaatgggggtcatatgtcgtggatatttttaccacccttgtggataccaaatggcgccacatgtttgtcatctttagcttaagttacattctgtcctggctcatcttcggcagcgtattttggctcatagcctttcaccacggtgacttgctcaatgatcctgatataactccttgtgtggacaacgtacactcatttacaggtgcatttttgtttagccttgagacccagacaacaattgggtatggctaccgctgcgtgaccgaagaatgtagcgtagcagtccttatggttattttacaaagcatcttgagctgtattatcaatacctttattatcggcgctgcactggccaagatggcgaccgcacgcaagcgcgcccaaactattcggttcagctattttgccttaatcggcatgagagatggaaagctatgtttgatgtggcgaattggcgactttaggccaaatcacgtagttgagggcacagtcagagcccaactcctgcgctatactgaagacagcgaaggccgtatgaccatggcattcaaggacctcaaattggtgaacgaccaaatcatcctggtgactccggtgaccattgtgcacgaaatcgaccacgaaagtccactctacgccttagatcgcaaagctgtcgccaaggataacttcgaaatcctagtgacattcatctacaccggtgacagcacagggacatcgcatcagtcccgctcaagttatgtgcctagagagatactgtgggggcacaggttcaatgacgtgcttgaagtgaagaggaagtattacaaggtgaactgcctgcagttcgagggctctgtcgaagtctacgcgcctttctgctccgctaagcagctcgattggaaggaccagcagctacacatcgagaaagcaccccctgtgcgcgaaagttgtacatccgataccaaggctaggcggcgcagctttagcgctgtcgccattgttagcagttgtgaaaatcctgaagaaacaaccactagcgcaacccatgaatatagggaaaccccttaccagaaagcgctattgactctcaatcggatctctgtcgagtcacagatgtag

SEQ ID NO: 317575 - DNA, 1257 bp, Artificial Sequence
  derived and/or modified sequence
atgagctactacggcagcagctaccacatcatcaacgccgacgccaaataccctggttatccaccagaacatattatcgcggaaaagcgcagggcaagaagaaggttattgcataaggacgggtcctgtaacgtatacttcaaacacatatttggggagtggggcagctacgtcgtggacatttttacaaccttagtcgatactaaatggcggcacatgttcgtgatattcagtctgtcttatatcttgtcttggctgattttcggatctgttttctggctcattgcatttcaccatggggatcttctgaacgacccggatatcaccccttgcgtggataacgtgcattcgttcacaggagctttcctgtttagcctcgagacgcagaccaccataggctatgggtacagatgtgtgactgaagagtgctctgtggctgtgctcatggtgattttgcaatccatcttatcttgtattattaatacatttattattggggcagccctcgccaagatggcgaccgccagaaaacgcgcccagactattaggttcagctattttgccctgatcggtatgagagacggcaagctctgtctgatgtggagaataggcgattttagaccaaaccatgttgtcgaaggcactgtgcgtgcacagctgttgcggtatacggaggactctgaaggcaggatgaccatggcttttaaggacctcaagctcgtcaacgaccaaattatccttgtaacccccgtgactatcgtccacgagatcgatcatgaatccccactttatgccctggatcgcaaagcagtggcaaaggacaacttcgaaatcctggtgactttcatctacactggtgattctaccggtacatcccatcagtcaagatcgagttatgtacctagagagatcctgtggggccaccggttcaacgacgtgctggaggttaaaagaaagtattataaagtaaactgtttgcagtttgaaggatcagtggaagtgtacgcccctttctgttctgcgaaacagcttgactggaaggaccaacagctacatatcgaaaaagctccccccgtgcgcgagtcgtgcaccagtgatactaaggccaggcgcaggagcttttccgccgtcgctatcgtaagttcctgcgaaaatccagaagagaccaccaccagtgctacgcatgaatatcgggagaccccctatcaaaaggctctgctcaccctcaaccggattagcgtcgaaagccaaatgtag

SEQ ID NO: 317576 - DNA, 1257 bp, Artificial Sequence
  derived and/or modified sequence
atgagctactacggcagcagctaccacatcatcaacgccgacgccaagtatcctgggtatcccccagaacatatcatcgccgagaaaagacgtgcaaggcggcggttactgcataaagacggatcttgcaacgtctactttaagcacatctttggcgagtggggtagctacgttgttgacatcttcacaaccttggtggacacgaagtggcggcatatgttcgtcatattttctctcagttacatcctgtcctggctcatttttggttccgtcttttggctgattgcattccaccacggggatctgcttaacgacccagatatcaccccatgcgtcgataacgtgcacagtttcactggcgctttcctgttttcccttgagacccagactactataggatatgggtatagatgtgtcaccgaagagtgttctgtcgctgttctgatggtgattcttcagtcaattctgtcttgcattatcaatactttcataattggtgcggcactcgctaagatggccacagccaggaaaagggcccagaccatccggtttagctacttcgccctgataggaatgagggatgggaaactctgtctgatgtggcgcattggtgacttcaggcctaaccacgtggttgagggcacggtgcgtgctcagctgctcagatataccgaggactcggaggggcggatgacaatggcatttaaggatttgaaactggtgaatgaccagatcattttggtgactccagttactattgtgcacgagattgatcatgagtcacccctgtacgccctggacaggaaggcagtcgccaaagacaatttcgagatcctcgttaccttcatctataccggggattccaccggcacctcccaccagtctcggagctcttatgttccccgcgaaatcctctggggacaccgattcaatgatgtgttggaagtcaagagaaagtactataaagtcaattgcctccagtttgagggcagtgtcgaagtatatgcccccttctgcagtgccaagcaactggattggaaggatcagcagctgcatatcgagaaagctccacccgttcgtgaatcttgcacaagcgatacaaaggccaggcggcgctcattttccgccgtcgccatcgtcagcagctgtgagaaccccgaggagactacaacctcggctacacatgagtaccgagagaccccgtaccagaaggctctccttactctcaaccgaatcagcgtagagtcgcagatgtag

SEQ ID NO: 317577 - DNA, 1257 bp, Artificial Sequence
  derived and/or modified sequence
atgagctactacggcagcagctaccacatcatcaacgccgacgccaaatatccgggctacccgcccgaacacatcatcgcggagaaacggagggccagacgcagacttctacataaagacgggtcttgcaacgtttactttaaacatatcttcggagaatggggttcatatgtcgtggatatctttacaactctggtcgataccaagtggagacatatgttcgtaatcttttccttgtcctacatactgtcatggctgatcttcgggtcagtgttctggttgatcgctttccaccatggggacttgctaaatgaccccgatattacaccttgcgtggataacgttcatagcttcacaggggcattcctgttttccctggaaacgcaaacaacaataggttatggctaccgctgtgtgacagaggaatgttctgtagccgtacttatggtaattctccagagtatcttgagttgtatcatcaataccttcatcatcggggctgcgctggccaagatggcgacggcgcggaagagagctcagacaatccgattctcttacttcgcgctgattggtatgcgcgacggcaagctatgtttgatgtggaggatcggtgactttcgtccaaaccatgtggttgaggggaccgtgcgcgcccaattgctgaggtacaccgaagattcagagggccgaatgacaatggcttttaaggacttgaagctagtgaatgaccagattattctggtgactccggtgaccatagtgcacgaaattgaccacgagtcccccctctatgcgctggatagaaaggccgttgccaaggacaacttcgaaattcttgtgacatttatctataccggcgacagtaccggcacctctcatcagtcccggagctcttacgtgccccgtgaaattctgtggggccatcgctttaatgacgttttagaagtgaaacggaagtactacaaagttaattgcctgcagtttgagggttcagtggaggtatacgccccattttgcagcgctaaacagttagattggaaagaccagcagttgcatatagagaaggcacccccagtgcgggagtcatgtacctcagatacaaaggcgcgacggagatctttctccgccgtggccatcgtctcctcttgtgagaaccccgaggagaccacaacttccgccacccatgaatatagagagacaccataccagaaagcacttctcacgctcaacagaatttcagtggagagtcagatgtag

SEQ ID NO: 317578 - DNA, 1257 bp, Artificial Sequence
  derived and/or modified sequence
atgtcatattatggctcaagttatcacattataaacgctgacgccaaatacccaggttatcctccagagcacataatcgccgagaaacggcgtgcacggaggcggttgctgcataaagacggcagctgcaatgtctacttcaagcacatatttggcgagtgggggagctacgtggtcgacatcttcactaccttagtggacactaaatggcgccatatgtttgtgattttctccctctcatacatcctcagctggttaattttcggaagcgtcttttggctgatcgcattccatcacggagacctcctcaatgatcccgacatcactccttgcgtagacaacgtccacagttttaccggagcctttctgttcagcctggagacccagaccactatcggatacggttatcgatgtgtgactgaggaatgctccgttgctgtgctcatggtaattctgcaatctatactgtcatgcatcataaacaccttcatcatcggggctgctctggccaaaatggcaaccgcaaggaagagggcacagacaattcggttttcatattttgcactcattgggatgagagacggcaaactttgcctgatgtggaggatcggggactttagacccaatcacgttgtggaaggaaccgttcgagcgcaactgctgcgatacactgaagactcggagggcagaatgactatggcctttaaagacttaaagctggttaacgaccagattatattagtgacccccgtaaccatcgtacatgagatcgatcatgagagccccttgtatgctttggatcggaaagccgtggccaaggacaatttcgagatcctggtcaccttcatctacacaggagatagcacagggactagccatcagagcagatccagctacgttcctagagagattctttggggccatcgattcaacgacgttctcgaagtgaagaggaagtattacaaggtcaactgtctccagttcgagggctcggttgaggtctacgctcccttttgttctgctaagcagctcgattggaaggaccagcagctgcatatcgaaaaagctccaccagttcgggaaagttgtacctccgacacaaaagccagaaggcgatcattctccgccgtggccatcgtgagcagttgcgagaatccggaagaaaccaccacctccgcgacccacgaatatcgcgagacaccttatcagaaagccctcctgaccctgaacaggatctccgtcgaatctcagatgtag

SEQ ID NO: 317579 - DNA, 1257 bp, Artificial Sequence
  derived and/or modified sequence
atgtcatattatggaagcagttaccacatcatcaacgccgatgctaagtaccccggttatcctccagaacacataatcgcagagaagcggagagcgagaaggcgtctcctgcataaagatgggagttgtaatgtctatttcaagcacatcttcggggaatgggggtcttatgttgtcgacattttcactaccctggtggacactaaatggcggcatatgtttgtaattttcagtttatcgtacatcctgtcttggctgatttttggctcagtgttctggctgatcgccttccatcacggggatttattaaacgatcccgacattactccctgcgttgataacgtccactccttcacaggagcttttctgttttcactcgagacacagaccacaatcggctatggatacagatgcgtgacagaagagtgctctgttgccgtgctgatggtcatcctccagagtatcttatcgtgcattatcaatacattcatcattggtgcggctctagctaaaatggctactgccagaaaacgcgctcagacaatccggttctcgtatttcgctttgattggtatgagagacggaaagttgtgtctaatgtggcggatcggcgatttcagacctaaccacgttgtggagggaacagtgagggcgcaactgctaaggtataccgaggatagcgagggaagaatgaccatggcgttcaaggacctaaagttagtaaatgaccagattattctcgtaactcccgtgaccatcgtccacgagattgatcacgagtccccactgtatgcgttggacagaaaagccgtggcaaaagataacttcgagattctcgttacattcatttatacaggggactctactggcacgagtcaccagtctcgctcaagctacgttcccagggagatcctgtggggacatcgcttcaacgatgtgcttgaagtgaaaagaaaatactacaaagtgaactgtctgcagtttgaaggttcggtggaggtgtatgcccctttctgcagcgccaagcagttggattggaaggaccaacagcttcacatcgaaaaggcccctccagtgagggagtcctgcacctcagataccaaagctcgtaggcgatcctttagtgccgtggccatagtgtctagctgtgagaaccccgaagagaccaccacttccgccactcacgaatatagggagacaccctatcagaaagcactcctgactcttaacagaatctccgtggagagccagatgtag

SEQ ID NO: 317580 - DNA, 1257 bp, Artificial Sequence
  derived and/or modified sequence
atgtcctactacggttcgagttatcatatcatcaatgctgatgcgaagtatcccggatacccacctgagcacataatcgccgagaaaaggcgcgcaaggcggaggctactacacaaagacgggtcctgtaatgtgtactttaagcacatatttggggagtggggcagctacgtagttgacatctttacaacattggtggacaccaagtggcgtcacatgttcgtgatcttctctctaagttatatccttagttggctcatcttcgggagcgtcttttggctcatagcctttcatcacggcgatcttttaaatgaccccgacatcaccccctgtgtggacaacgtgcactccttcacaggcgcttttttattttctctagaaactcagaccactatcggatacggctacaggtgcgtcactgaagagtgtagtgtcgccgtgctaatggtgattcttcaaagtattctatcctgtatcatcaacactttcatcatcggggcagcattagcgaagatggcaactgcccgaaagcgcgcacaaaccatccgattttcctatttcgcactcataggaatgcgcgacggaaaactgtgtctcatgtggcggataggagactttcgaccaaaccatgtcgtcgagggtaccgtgcgggcacagctccttcggtatactgaggacagtgagggtcggatgactatggcatttaaggaccttaagttagtaaatgaccagatcatcttagtaacaccggtgacaatagttcacgaaatcgaccatgaatcccccctttatgcactggatcgaaaggccgtggccaaggataacttcgagatcctggtaacgttcatttatacaggagacagcaccgggacttctcaccagtctcgtagttcgtatgtcccacgggagatcctctggggccacagattcaatgacgtgttggaggtgaagagaaagtattacaaggttaactgtctgcagttcgaaggtagtgttgaggtatacgctcccttctgcagcgccaaacagctcgattggaaggaccagcagcttcatatcgagaaagcaccccctgttcgagagtcctgcaccagtgatactaaggctcgcagaaggtctttttccgctgttgctattgtgtcatcttgtgagaatccagaagaaaccacaacgtcggccacacatgagtaccgcgagacgccctaccaaaaggcactgttaactctcaacagaatcagcgttgagtctcagatgtag

SEQ ID NO: 317581 - DNA, 1257 bp, Artificial Sequence
  derived and/or modified sequence
atgagttactacggcagcagctatcacatcattaatgccgatgccaagtaccccggatatccccctgaacatatcattgctgaaaagcggagagccagacgcagactgctgcacaaggatggctcttgcaatgtgtacttcaagcacattttcggggaatgggggtcatacgtggtggacatctttacaacactggttgatacaaagtggagacacatgtttgtgatattcagcctgagttatatcctgagctggctgatcttcggctctgtgttttggcttatagcatttcatcacggagatctcctcaatgacccagacattacaccgtgcgtggacaacgtgcatagctttacaggagcatttctgttcagcctcgagacccagactaccataggctacgggtaccggtgcgtaaccgaggagtgttctgtggccgtactgatggtaatattacagagcatattatcttgtatcattaacactttcattattggggctgccctcgctaaaatggctactgctcgcaaaagagcacagacaattcgattctcttatttcgccctgatcggaatgagggatggcaagctctgcttaatgtggagaattggggattttaggcccaaccatgtcgtggaaggaactgtgcgggcacagttactgagatacaccgaggactcggagggcaggatgaccatggcttttaaggacctaaaactcgtcaatgatcagatcatcctggtgacaccagtgacgatcgtgcatgagatcgaccatgagtctcctctgtacgccctggatcggaaggctgtggccaaagataatttcgagatcctggtcacatttatctacacaggcgacagcacaggcacgtctcatcagagccggagttcctacgtcccgagggaaattttgtgggggcacaggttcaacgacgtccttgaagtcaagcgcaaatattacaaagtgaattgcctccagttcgaaggaagtgtagaggtttacgccccattttgttcagccaaacagctggattggaaagatcagcagttgcacattgaaaaagcacccccagtgcgtgagtcctgtaccagtgacaccaaagcacggaggcggtctttttcggcagtcgccattgtgtcttcctgtgagaatcctgaggagacaaccacttctgcaacgcatgaatatcgggaaacaccttatcagaaggctctcctaacactgaacaggatctccgtggagtcgcagatgtag

SEQ ID NO: 317582 - DNA, 1257 bp, Artificial Sequence
  derived and/or modified sequence
atgagctactacggcagcagctaccacatcatcaacgccgacgccaagtaccccggctacccccccgagcacatcatcgccgagaagagaagagccagaagaagactgctgcacaaggacggcagctgcaacgtgtacttcaagcacatcttcggcgagtggggcagctacgtggtggacatcttcaccaccctggtggacaccaagtggagacacatgttcgtgatcttcagcctgagctacatcctgagctggctgatcttcggcagcgtgttctggctgatcgccttccaccacggcgacctgctgaacgaccccgacatcaccccctgcgtggacaacgtgcacagcttcaccggcgccttcctgttcagcctggagacccagaccaccatcggctacggctacagatgcgtgaccgaggagtgcagcgtggccgtgctgatggtgatcctgcagagcatcctgagctgcatcatcaacaccttcatcatcggcgccgccctggccaagatggccaccgccagaaagagagcccagaccatcagattcagctacttcgccctgatcggcatgagagacggcaagctgtgcctgatgtggagaatcggcgacttcagacccaaccacgtggtggagggcaccgtgagagcccagctgctgagatacaccgaggacagcgagggcagaatgaccatggccttcaaggacctgaagctggtgaacgaccagatcatcctggtgacccccgtgaccatcgtgcacgagatcgaccacgagagccccctgtacgccctggacagaaaggccgtggccaaggacaacttcgagatcctggtgaccttcatctacaccggcgacagcaccggcaccagccaccagagcagaagcagctacgtgcccagagagatcctgtggggccacagattcaacgacgtgctggaggtgaagagaaagtactacaaggtgaactgcctgcagttcgagggcagcgtggaggtgtacgcccccttctgcagcgccaagcagctggactggaaggaccagcagctgcacatcgagaaggccccccccgtgagagagagctgcaccagcgacaccaaggccagaagaagaagcttcagcgccgtggccatcgtgagcagctgcgagaaccccgaggagaccaccaccagcgccacccacgagtacagagagaccccctaccagaaggccctgctgaccctgaacagaatcagcgtggagagccagatgtag

SEQ ID NO: 317583 - protein, 529 aa, Artificial Sequence [sequence omitted]

SEQ ID NO: 317584 - protein, 163 aa, Artificial Sequence [sequence omitted]

SEQ ID NO: 317585 - DNA, 1590 bp, Artificial Sequence
  derived and/or modified sequence
atgagcaccaacgagaacgccaacacccccgccgccagactgcacagattcaagaacaagggcaaggacagcaccgagatgagaagaagaagaatcgaggtgaacgtggagctgagaaaggccaagaaggacgaccagatgctgaagagaagaaacgtgagcagcttccccgacgacgccaccagccccctgcaggagaacagaaacaaccagggcaccgtgaactggagcgtggacgacatcgtgaagggcatcaacagcagcaacgtggagaaccagctgcaggccacccaggccgccagaaagctgctgagcagagagaagcagccccccatcgacaacatcatcagagccggcctgatccccaagttcgtgagcttcctgggcagaaccgactgcagccccatccagttcgagagcgcctgggccctgaccaacatcgccagcggcaccagcgagcagaccaaggccgtggtggacggcggcgccatccccgccttcatcagcctgctggccagcccccacgcccacatcagcgagcaggccgtgtgggccctgggcaacatcgccggcgacggcagcgtgttcagagacctggtgatcaagtacggcgccgtggaccccctgctggccctgctggccgtgcccgacatgagcagcctggcctgcggctacctgagaaacctgacctggaccctgagcaacctgtgcagaaacaagaaccccgccccccccatcgacgccgtggagcagatcctgcccaccctggtgagactgctgcaccacgacgaccccgaggtgctggccgacacctgctgggccatcagctacctgaccgacggccccaacgagagaatcggcatggtggtgaagaccggcgtggtgccccagctggtgaagctgctgggcgccagcgagctgcccatcgtgacccccgccctgagagccatcggcaacatcgtgaccggcaccgacgagcagacccaggtggtgatcgacgccggcgccctggccgtgttccccagcctgctgaccaaccccaagaccaacatccagaaggaggccacctggaccatgagcaacatcaccgccggcagacaggaccagatccagcaggtggtgaaccacggcctggtgcccttcctggtgagcgtgctgagcaaggccgacttcaagacccagaaggaggccgtgtgggccgtgaccaactacaccagcggcggcaccgtggagcagatcgtgtacctggtgcactgcggcatcatcgagcccctgatgaacctgctgaccgccaaggacaccaagatcatcctggtgatcctggacgccatcagcaacatcttccaggccgccgagaagctgggcgagaccgagaagctgagcatcatgatcgaggagtgcggcggcctggacaagatcgaggccctgcagaaccacgagaacgagagcgtgtacaaggccagcctgagcctgatcgagaagtacttcagcgtggaggaggaggaggaccagaacgtggtgcccgagaccaccagcgagggctacaccttccaggtgcaggacggcgcccccggcaccttcaacttctag

SEQ ID NO: 317586 - DNA, 1590 bp, Artificial Sequence
  derived and/or modified sequence
atgagtactaacgagaacgctaataccccagccgcacgcctccacagattcaagaacaaaggcaaagactcaactgagatgcggagacggaggattgaggtgaacgtggagctccgcaaagctaaaaaggacgaccaaatgcttaagaggcgaaacgtcagctcctttccggacgacgcaactagtccgcttcaggaaaataggaacaaccagggcaccgtgaattggagcgtggacgatatcgtcaagggtataaattcatcgaatgttgaaaatcagcttcaagccacccaggctgctaggaaactgttgtcacgggagaagcagccacctatcgacaatataatcagggccggattgattcctaagtttgtctcattcctgggcagaacagactgctcccccatacagttcgagagtgcctgggcactgactaatatcgcttcgggcacctccgaacagactaaggcagtagtggatggcggtgcaatccccgcttttatctcactgttggcatcaccacacgctcacattagcgagcaggccgtgtgggcgctgggcaacatcgccggagatggaagcgtgtttcgtgatctcgtgattaaatacggtgctgtggaccccctcctcgctttactggcggtgccagatatgagctccctggcatgcgggtatcttagaaatcttacctggaccctgagcaacctatgccggaacaagaatcccgcaccacccatcgatgcggtggaacagatactcccaacccttgttcgcctgctccaccacgatgaccctgaagtcctcgcggatacctgttgggcgataagttatctgactgacggaccaaacgagcggattggtatggttgtgaagaccggtgtcgtgccccagcttgtcaaactgctcggggcctcggaactcccaatcgtcacccctgccctacgagccattggaaacatcgttacgggcacagacgagcaaacacaggtagtgatcgatgccggggccttagctgtctttccctccctgttgacaaaccccaaaaccaacatccaaaaggaggcaacatggaccatgtcaaatatcacagctgggcggcaggaccaaatccagcaggtcgttaatcacggcctggttcctttcctggtatcagttctgtctaaggccgactttaaaactcagaaagaagctgtttgggctgtcacaaactacacctctggggggacagtggaacagattgtatacctggtccactgtggcatcattgaacccctcatgaacctgctgaccgccaaagatacaaaaattatacttgtcattctggatgcgatatccaatatcttccaggcagctgagaagctgggagagactgagaagttgagcatcatgattgaagagtgcgggggactggataagatagaagctctccagaaccacgagaacgagtccgtttataaagctagtctgtcactcattgagaagtacttctctgtggaagaggaagaagatcagaacgtggtgcctgaaaccacgagtgagggttacacattccaagtacaggatggggcccctgggacgttcaacttctag

SEQ ID NO: 317587 - DNA, 1590 bp, Artificial Sequence
  derived and/or modified sequence
atgtccaccaatgaaaacgctaacacccctgccgccaggctccacagattcaaaaacaaaggcaaggacagtaccgaaatgcggagaaggaggatcgaagtgaatgtagaactgcgaaaagccaagaaggacgatcagatgctcaagcgtagaaacgtatcctcattcccagatgacgccacctccccccttcaggagaataggaataaccagggtaccgtgaattggagtgtagacgacatcgtgaaaggaattaacagctccaatgtcgaaaatcagctgcaggccacacaggctgcacgcaagctactgtcaagagagaaacagccgccaatcgataatatcatccgtgcaggcctcatcccaaagttcgtgagcttcctcggacggacagactgctcacctatccagtttgagtcagcttgggctctcaccaacattgccagcgggacatccgaacagaccaaagcggtggtggatggaggcgcaatccctgctttcatctctctactggcaagtcctcacgcccatatctccgaacaggcggtgtgggccctgggcaacatagcgggtgacggcagtgtctttcgcgatctggttatcaagtacggcgcagtggatcctctgctcgcactccttgccgtgcctgacatgagctccctcgcttgtggctacttaaggaatctaacatggaccttgagcaacctttgtaggaataaaaacccagcgccacccatcgatgcagtcgagcaaatcctccctaccctggtccggctgctgcatcacgatgaccccgaagtgttagcggacacttgttgggctattagctatttaacagacggccctaacgaaaggattggcatggttgtcaagacaggggtggttccccagctggttaaactgctcggtgcctctgagctcccaatcgtgacccctgctttgagagctatcggcaatattgtgactggcacagacgaacagactcaggtggttatcgacgctggagccctggccgtgtttccctccctgcttaccaatccaaagaccaacatccagaaggaggctacctggaccatgagcaacatcactgccggtcggcaagaccagattcagcaggtcgttaatcacggactagtcccattccttgtatcggtgctgagcaaggccgatttcaaaacccagaaggaagcagtatgggctgtgacaaactatacctctggcggtactgtggaacaaatagtctacctggtccattgcgggataatcgaacctctgatgaatttgttaacagccaaggatactaagataattcttgtgatcctcgatgcgatctcgaacatcttccaggcggctgagaagctgggagagacagaaaaattgtcaattatgattgaggaatgtggcggcctggacaaaatcgaagcgctgcagaaccacgagaatgagagcgtctataaagcatctctgtccctcatcgagaaatacttttcagtggaggaggaggaggatcagaacgtggttcctgagactacctccgaaggatatacctttcaggtccaggatggggctccaggaacctttaatttttag

SEQ ID NO: 317588 - DNA, 1590 bp, Artificial Sequence
  derived and/or modified sequence
atgagcaccaatgaaaatgccaacaccccagctgcccggctgcaccgcttcaagaacaagggcaaggacagcacagagatgagaagaagacgcatcgaggtgaatgtggagctgaggaaggccaagaaggatgaccagatgctgaagagaagaaatgtgtcctccttcccagatgatgccaccagccccctgcaggagaacagaaacaaccagggcaccgtgaactggagcgtggatgacatcgtgaagggcatcaacagcagcaatgtggagaaccagctgcaggccacccaggccgccaggaagctgctgagccgggagaagcagccccccatcgacaacatcatccgggccggcctcatccccaagtttgtgtccttcctgggccgcacagactgcagccccatccagtttgagagcgcctgggccctgaccaacatcgccagcggcaccagcgagcagaccaaggctgtggtggatggaggagccatcccagccttcatcagcctgctggccagcccccacgcccacatcagcgagcaggccgtgtgggccctgggcaacattgctggagatggcagcgtcttccgggacctggtgatcaagtatggagctgtggaccccctgctggccctgctggccgtgcctgacatgagcagcctggcctgtggctacctgaggaacctgacctggaccctgagcaacctgtgcaggaacaagaacccagccccacccattgatgctgtggagcagatcctgcccaccctggtgcggctgctgcaccatgatgatcctgaggtgctggccgacacctgctgggccatctcctacctgacagatggccccaatgaaagaattggcatggtggtgaagacaggagtggtgccccagctggtgaagctgctgggcgccagcgagctgcccatcgtgaccccagccctgcgggccatcggcaacatcgtgactggaacagatgagcagacccaggtggtgattgatgctggggccctggccgtgttccccagcctgctgaccaaccccaagaccaacatccagaaggaggccacctggaccatgagcaacatcacagctggccggcaggaccagatccagcaggtggtgaaccacggcctggtgcccttcctggtgtctgtgctgagcaaggctgacttcaagacccagaaggaggccgtgtgggccgtgaccaactacaccagcggcggcaccgtggagcagatcgtgtacctggtgcactgcggcatcatcgagcccctgatgaacctgctgacagccaaggacaccaagatcatcctggtgatcctggatgccatcagcaacatcttccaggccgctgagaagctgggggagacagagaagctgagcatcatgattgaggagtgtggcggcctggacaagattgaggccctgcagaaccatgaaaatgaatctgtgtacaaggccagcctgagcctcatcgagaagtacttctctgtggaggaggaggaggaccagaatgtggtgcctgagaccaccagcgagggctacaccttccaggtgcaggatggagcccctggcaccttcaacttctag

SEQ ID NO: 317589 - DNA, 1979 bp, Artificial Sequence
  derived and/or modified sequence
gccacacggtctttgagctgagtcgaggtggaccctttgaacgcagtcgccctacagccgctgattccccccgcatcgcctcccgtggaagcccaggcccgcttcgcagctttctccctttgtctcataaccatgtccaccaacgagaatgctaatacaccagctgcccgtcttcacagattcaagaacaagggaaaagacagtacagaaatgaggcgtcgcagaatagaggtcaatgtggagctgaggaaagctaagaaggatgaccagatgctgaagaggagaaatgtaagctcatttcctgatgatgctacttctccgctgcaggaaaaccgcaacaaccagggcactgtaaattggtctgttgatgacattgtcaaaggcataaatagcagcaatgtggaaaatcagctccaagctactcaagctgccaggaaactactttccagagaaaaacagccccccatagacaacataatccgggctggtttgattccgaaatttgtgtccttcttgggcagaactgattgtagtcccattcagtttgaatctgcttgggcactcactaacattgcttctgggacatcagaacaaaccaaggctgtggtagatggaggtgccatcccagcattcatttctctgttggcatctccccatgctcacatcagtgaacaagctgtctgggctctaggaaacattgcaggtgatggctcagtgttccgagacttggttattaagtacggtgcagttgacccactgttggctctccttgcagttcctgatatgtcatctttagcatgtggctacttacgtaatcttacctggacactttctaatctttgccgcaacaagaatcctgcacccccgatagatgctgttgagcagattcttcctaccttagttcggctcctgcatcatgatgatccagaagtattagcagatacctgctgggctatttcctaccttactgatggtccaaatgaacgaattggcatggtggtgaaaacaggagttgtgccccaacttgtgaagcttctaggagcttctgaattgccaattgtgactcctgccctaagagccatagggaatattgtcactggtacagatgaacagactcaggttgtgattgatgcaggagcactcgccgtctttcccagcctgctcaccaaccccaaaactaacattcagaaggaagctacgtggacaatgtcaaacatcacagccggccgccaggaccagatacagcaagttgtgaatcatggattagtcccattccttgtcagtgttctctctaaggcagattttaagacacaaaaggaagctgtgtgggccgtgaccaactataccagtggtggaacagttgaacagattgtgtaccttgttcactgtggcataatagaaccgttgatgaacctcttaactgcaaaagataccaagattattctggttatcctggatgccatttcaaatatctttcaggctgctgagaaactaggtgaaactgagaaacttagtataatgattgaagaatgtggaggcttagacaaaattgaagctctacaaaaccatgaaaatgagtctgtgtataaggcttcgttaagcttaattgagaagtatttctctgtagaggaagaggaagatcaaaacgttgtaccagaaactacctctgaaggctacactttccaagttcaggatggggctcctgggacctttaacttttagatcatgtagctgagacataaatttgttgtgtactacgtttggtattttgtcttattgtttctctactaagaactctttcttaaatgtggtttgttactgtagcactttttacactgaaactatacttgaacagttccaactgtacatacatactgtatgaagcttgtcctctgactaggtttctaatttctatgtggaatttcctatcttgcagcatcctgtaaataaacattcaagtccacccttttcttgacttc

SEQ ID NO: 317590 - DNA, 2197 bp, Artificial Sequence
  derived and/or modified sequence
gacacctaggccccgggggtggctctgccaccaagtcgtaggcgagcgtaatgaaagcaaagatagcaaattgtaaggagggctttgacttttgtcatcttctgaatgacgcacagctgatgtcatcctaattaagcgcattcactcctagtctctggaaatgcaaatcaaatatgcgagatgcggcactgcatttttaatgttgaccataatgtaatgatgaagcaaatttttatttaattttcgagtctgcacctattttggccaagtaaagacagtaaaatagggagagcctcctgaggatctgaatttattgccctggcacataatttttagctctttctccctttgtctcataaccatgtccaccaacgagaatgctaatacaccagctgcccgtcttcacagattcaagaacaagggaaaagacagtacagaaatgaggcgtcgcagaatagaggtcaatgtggagctgaggaaagctaagaaggatgaccagatgctgaagaggagaaatgtaagctcatttcctgatgatgctacttctccgctgcaggaaaaccgcaacaaccagggcactgtaaattggtctgttgatgacattgtcaaaggcataaatagcagcaatgtggaaaatcagctccaagctactcaagctgccaggaaactactttccagagaaaaacagccccccatagacaacataatccgggctggtttgattccgaaatttgtgtccttcttgggcagaactgattgtagtcccattcagtttgaatctgcttgggcactcactaacattgcttctgggacatcagaacaaaccaaggctgtggtagatggaggtgccatcccagcattcatttctctgttggcatctccccatgctcacatcagtgaacaagctgtctgggctctaggaaacattgcaggtgatggctcagtgttccgagacttggttattaagtacggtgcagttgacccactgttggctctccttgcagttcctgatatgtcatctttagcatgtggctacttacgtaatcttacctggacactttctaatctttgccgcaacaagaatcctgcacccccgatagatgctgttgagcagattcttcctaccttagttcggctcctgcatcatgatgatccagaagtattagcagatacctgctgggctatttcctaccttactgatggtccaaatgaacgaattggcatggtggtgaaaacaggagttgtgccccaacttgtgaagcttctaggagcttctgaattgccaattgtgactcctgccctaagagccatagggaatattgtcactggtacagatgaacagactcaggttgtgattgatgcaggagcactcgccgtctttcccagcctgctcaccaaccccaaaactaacattcagaaggaagctacgtggacaatgtcaaacatcacagccggccgccaggaccagatacagcaagttgtgaatcatggattagtcccattccttgtcagtgttctctctaaggcagattttaagacacaaaaggaagctgtgtgggccgtgaccaactataccagtggtggaacagttgaacagattgtgtaccttgttcactgtggcataatagaaccgttgatgaacctcttaactgcaaaagataccaagattattctggttatcctggatgccatttcaaatatctttcaggctgctgagaaactaggtgaaactgagaaacttagtataatgattgaagaatgtggaggcttagacaaaattgaagctctacaaaaccatgaaaatgagtctgtgtataaggcttcgttaagcttaattgagaagtatttctctgtagaggaagaggaagatcaaaacgttgtaccagaaactacctctgaaggctacactttccaagttcaggatggggctcctgggacctttaacttttagatcatgtagctgagacataaatttgttgtgtactacgtttggtattttgtcttattgtttctctactaagaactctttcttaaatgtggtttgttactgtagcactttttacactgaaactatacttgaacagttccaactgtacatacatactgtatgaagcttgtcctctgactaggtttctaatttctatgtggaatttcctatcttgcagcatcctgtaaataaacattcaagtccaccctt

SEQ ID NO: 317591 - DNA, 1590 bp, Artificial Sequence
  derived and/or modified sequence
atgagcaccaacgagaacgccaacacccccgccgcccggctgcaccgatttaaaaataaaggaaaagatagcactgagatgcggaggcggcggatcgaagtgaacgtggaactgcggaaagcgaagaaagatgaccagatgcttaaaaggcgcaacgtgtcaagttttcccgacgatgccacaagtcccctccaggagaataggaataaccagggcactgtaaattggagcgtagacgacatcgtgaagggcattaattcttccaacgtggagaaccaacttcaagctacacaggccgcacgcaaactgttaagtagggagaagcagccacctatagacaacattattcgggcaggtcttatcccgaaatttgtatctttcctgggacggaccgactgtagcccaatccaattcgaatctgcctgggccctgaccaatattgcgtctgggacctcagagcaaacaaaggccgtcgttgacgggggagcaatcccagccttcataagcctgctggctagcccgcacgctcacatcagcgagcaggctgtgtgggcactgggaaatattgccggcgacgggagcgtgtttagagatctagtcatcaaatatggcgccgtggacccacttctggccctactggcggtgccggatatgtcctcactcgcctgcggatatctgcgtaacctgacctggaccctgagcaatttgtgtcgcaataaaaaccctgccccgcctattgatgctgtggaacagatcctgcccacgctcgtgcggttattacaccatgacgatcccgaagtgctagcagatacatgttgggctattagttacctgactgacggccccaatgagcgcatcgggatggtcgtgaaaactggggtggttcctcagcttgtcaaattattgggcgccagtgagctgccgatagtgacacctgctctgcgggcaatcggcaatattgtaaccggcaccgatgaacaaacacaggttgtgatagatgccggggcccttgccgtgtttccatcacttttaaccaatcccaaaaccaatattcagaaagaggcgacttggaccatgtctaacattactgctggccgacaggaccagatacaacaagtggtcaatcatggactcgtgccctttctagtctctgttctcagcaaggcggacttcaagacgcagaaggaagccgtgtgggcagtgacaaattatacttctggtggcaccgtcgagcaaatcgtgtatctggtccactgtggcattatcgaacccctgatgaacctcctgacagccaaagacactaaaattatcctcgttatactggatgctattagcaatatcttccaggcagccgaaaagttaggagagaccgagaaactctcgattatgattgaagaatgtggggggctcgataaaattgaggccctgcagaaccacgagaatgaatccgtttacaaagcctctttgagtttgattgaaaagtacttttcagtggaggaagaggaggaccagaacgtggtgcccgagaccacttctgaggggtacacctttcaggtacaagacggggcccccgggacgtttaacttctag

SEQ ID NO: 317592 - DNA, 1590 bp, Artificial Sequence
  derived and/or modified sequence
atgagcaccaacgagaacgccaacacccccgccgcccggctgcacagatttaagaacaaaggcaaagactcaactgagatgagaaggaggaggatcgaagttaatgtggagctccggaaggcaaaaaaggacgatcaaatgttaaaacggcggaatgtctcctctttccctgacgatgccacttcgcccctacaagaaaatcgaaacaatcagggtaccgttaattggtcagtggatgatatagtcaagggtattaactctagcaacgtggagaaccagctgcaggctacgcaagctgctcggaaattactgagccgggagaaacagcctcctatcgataacattatccgggcgggcctgattccgaagttcgttagctttctgggacggactgattgcagtcccattcagttcgaatccgcgtgggctctgacaaatatagcctccggtacaagcgaacagaccaaggcagtggtcgatggaggcgcgatcccagcatttataagcctgctggctagtccccacgctcatatttccgagcaggccgtttgggctctggggaacatagcaggcgatggtagtgtattccgggacctcgtaatcaaatatggcgcagtcgatcctttgctggccctcctagcagtcccggacatgagctcccttgcatgtggctatctaaggaatctgacttggacactgtccaatctctgtcgaaacaagaatcccgcgcctccaatagatgccgtagaacagattttacccaccctagtacgtttgctccaccatgacgacccagaagtgctggctgatacatgctgggctattagctacttaactgatggacctaacgaacgcattggaatggtggtgaagactggggttgtgccacaactggttaagctcctaggagcctcagaacttccaatcgtaactccagccttaagagcgatcggtaacattgtgaccggtaccgacgaacaaactcaggtcgtgattgacgctggcgccctggccgtttttccttctctcttgaccaaccccaaaaccaatattcagaaagaagccacttggacaatgtccaacattactgccgggcgccaggatcagatacagcaggtcgttaatcacgggctcgtgccatttctggtaagtgttctatctaaggctgactttaaaacacagaaagaggccgtgtgggccgtgaccaattataccagcggtgggaccgtggagcagatcgtctacttagtgcactgcggaattatagaacctttaatgaatcttttgaccgctaaagatacaaaaattatactggtaatcctagacgcaatatccaacatctttcaggccgctgagaagctgggagagaccgaaaagttgtcgataatgatcgaggaatgcggcgggctcgacaaaatcgaggccctgcagaaccatgagaacgaaagcgtgtacaaagcctccctgagtctcatagagaagtacttttccgtcgaggaagaagaggaccagaacgtcgtgccagagacgacaagtgagggttacacatttcaagtgcaggacggggctcccggaacttttaatttctag

SEQ ID NO: 317593 - DNA, 1590 bp, Artificial Sequence
  derived and/or modified sequence
atgagcactaatgagaatgccaacactcctgccgctagacttcacagattcaagaacaaaggcaaagactctaccgaaatgcggaggaggagaatcgaagtcaatgtcgagctgaggaaagccaaaaaagacgatcagatgctcaagcggagaaatgtgagttcatttcccgatgatgctacttctccattgcaggaaaacagaaataaccagggaacagttaattggtccgtggacgacattgtaaaaggcattaactcaagtaatgtagagaatcagctgcaggcaacacaggcggcaaggaagctgctgtctcgcgagaaacagccccctattgataatatcattagggctgggcttatccccaagtttgtgagtttcctgggaagaaccgactgttctcccatccagttcgagagtgcatgggcgcttacgaacatcgccagtggaaccagcgagcagacaaaggcggtggttgacggcggagccatcccagccttcataagcctccttgccagcccccacgcccatataagtgagcaggctgtgtgggctttaggaaatattgccggtgacgggtctgttttccgtgacttagtcattaagtacggtgccgtggatcctctgctggctctcttggccgtgcccgacatgagttctctggcatgcggctacctgcggaatcttacatggacgctatccaatctctgtaggaataagaatccagctcctcccattgacgcagtggagcagatcttacccacacttgtgcgcctcctccaccacgacgatcccgaggtattggccgatacttgttgggccatttcttatctaactgatggcccaaatgagcgaattggaatggtggtgaaaactggcgtggtgccacagctggtgaaactgctgggagcatccgaactaccaatagtcactcccgcactgagagcgattggtaatatcgtgactggaactgacgagcagactcaggttgtcattgacgccggagctctggcagtgttccctagtctcctgaccaaccccaaaacaaatatccagaaagaagccacctggaccatgagcaacattactgccggacggcaagaccagatacagcaagtcgtcaatcatggcctggtaccctttttagtttccgtgctgagtaaagcagattttaagacccagaaagaggcagtgtgggctgtgacaaactacacttctgggggaacagtagaacaaatcgtgtatctggtgcattgtgggatcatcgaacccctgatgaacctcctcaccgccaaagacaccaagattattttggtgatactagacgcaatcagtaacatcttccaggccgctgaaaagctcggggagactgagaagctttccattatgatcgaagagtgtggcggactagacaaaatcgaagccttacagaatcacgaaaacgaaagcgtgtacaaagccagtctgagtctgattgaaaaatacttttctgtggaggaggaagaggaccaaaatgtggttcccgaaactacatccgaagggtacacgttccaggtgcaggacggagctcctggcacgtttaatttctag

SEQ ID NO: 317594 - DNA, 1590 bp, Artificial Sequence
  derived and/or modified sequence
atgtccacaaacgaaaacgctaatactccagcggcacgcttgcataggtttaaaaacaagggtaaggattccactgagatgagacgtaggcgaatagaagtgaacgtggagctacgcaaagcaaagaaagacgaccagatgctcaaacgaaggaacgtgtcttctttcccggacgacgcaacctctccacttcaagaaaatcgcaacaaccagggaacagtgaattggagtgtggacgacatcgtcaaaggcatcaatagttcgaacgtggagaaccaattacaggccacgcaggcggctcggaaactgctttcccgtgagaagcaaccgcctatcgacaatatcatacgcgcagggctgatccccaagtttgtgagctttttaggaaggacagattgcagccctatccaatttgagtctgcttgggccctgacaaatattgccagcggaacttctgagcagactaaagcagtcgtggacgggggagccattcccgcttttatctctctattggcttcaccacacgcccacatttctgagcaggccgtctgggctttaggaaacattgccggagacggctcagtgttccgcgacttagtaattaagtatggagccgttgatccacttctggcccttctcgcagtgccagatatgtctagccttgcctgcggttatctgcgcaacctgacctggaccctgtcaaacttgtgccgcaataagaatccagccccacctatcgatgcagtggaacaaattctcccgactttagtgaggttgttgcaccacgatgaccccgaagttctggccgacacctgctgggcaatctcatatctgacggatgggcctaatgaaagaatcggcatggtggtgaagacaggtgtggtgccacagctcgtgaagttactaggagcctctgagctccctatcgtcacaccagctctccgggcaataggcaacatagtgacggggaccgatgagcagactcaagtagtgatcgacgctggggcactggctgtattccctagcttgctgaccaatccaaaaacgaacatccagaaagaagccacatggaccatgagcaatatcacggccggtaggcaggaccagatccagcaggttgtgaaccacggcctggtgccatttctggtcagtgtgctcagcaaagccgactttaaaacccaaaaagaagcagtctgggcggtgacgaattatacgagcggcggaacagtcgagcagattgtatatctggtgcactgtggcatcattgagcctctcatgaatctcctgactgctaaagacaccaagattattcttgtcatattagatgcgatttccaacatctttcaggccgctgaaaagctaggcgagacagaaaagctgtccataatgatagaagaatgtgggggtctcgacaaaattgaggcactccagaatcacgaaaatgagtcagtgtataaggctagcctgtcattgatcgagaagtatttttccgtcgaggaggaggaagatcagaacgtcgtgccggaaaccaccagtgagggatatacttttcaagtgcaggacggggctcccggaacgttcaacttttag

SEQ ID NO: 317595 - DNA, 492 bp, Artificial Sequence
  derived and/or modified sequence
atgagcaccaacgagaacgccaacacccaggccgcccacctgcacagaagcaagaacaagggcaaggacagcaccgagaccagaagacacagaatcgaggtgaacgtggagctgagaaaggccaagaaggacgaccagatgctgaagagaagaaacgtgagcagcttccccgacgacgccaccagccccctgcaggagaactgcaacaaccagacccccgccctgagagccatcggcaacatcgtgaccggcaccgacgagcagacccaggtggtgatcgacgccggcgccctggccgtgttccccagcctgctgaccaaccccaagaccaacatccagaaggaggccacctggaccatgagcaacatcaccgccagcagacaggaccagatccagcaggtggtgaaccacggcctggtgcccttcctggtgagcgacctgagcaagatcctgagacacaagagaaagctgtacggcccctggaacagctag

SEQ ID NO: 317596 - DNA, 492 bp, Artificial Sequence
  derived and/or modified sequence
atgagcaccaacgaaaacgccaacacacaggcagcccacctgcatcgatcaaaaaacaaaggcaaggatagcaccgaaactcggcgccaccgtatagaggtaaatgtggaactcagaaaggccaaaaaagatgaccaaatgttgaagcgccgaaacgtttcctcatttcctgatgatgctacctctccgctccaggaaaactgtaacaaccagacccccgctctgcgcgctataggaaacatcgtgactgggacagacgagcagacccaggtcgttatcgatgcaggggcacttgctgtgttccctagtctgctgacaaaccctaaaactaacatccagaaagaggcaacatggaccatgagtaatatcacagctagccgccaagaccagatccagcaagtggtgaatcacggacttgttccctttctggtgagcgacttgagcaagatcttgcggcacaagcggaagttgtatgggccatggaatagctag

SEQ ID NO: 317597 - DNA, 1590 bp, Artificial Sequence
  derived and/or modified sequence
atgtccacaaacgagaatgccaatacacctgccgctcggctccatcgattcaagaataaaggtaaggacagcactgagatgaggaggcgacggattgaagtgaatgtggaacttaggaaagcaaagaaggatgatcagatgcttaaaaggagaaacgtgtcctctttccctgacgacgccacctcccctctgcaagaaaatcgcaacaaccaggggacagtcaattggagtgtcgacgacatagtcaaaggcatcaactcctccaatgttgagaaccaactgcaggccacccaagccgcccgcaagctcctctcgcgggagaaacagcctcccatagacaatatcatccgggccggactgatccccaagtttgtaagcttcctaggccgtaccgattgctctccgattcagtttgaatctgcctgggcactgaccaacatagcctcggggaccagtgaacaaacaaaggcagtcgttgatggaggggcaattccagctttcatctcacttctggcaagtccccacgctcacatctccgagcaggctgtctgggcattaggtaacatcgctggagacggcagcgtgttccgcgatttggttattaaatacggtgctgtggatcctcttctggctctgcttgccgtgcctgacatgagctccctcgcatgtgggtatctcaggaacttgacatggaccctgagtaacctttgtagaaataaaaacccagctccccccatagatgcagtagagcagattttacccactctcgtgcgcctgttgcaccacgatgaccccgaagtcttggcagatacatgttgggcaatcagctatctaacggacggtcccaacgagaggataggcatggtggtcaagaccggagtcgtccctcagcttgtaaaactgctgggcgccagtgagctgcctattgtgaccccggccctcagagccataggaaacatcgtaactggaacagacgagcagactcaggtggtgattgatgcaggggccctcgccgtgtttccgtcgctgctcactaaccccaagactaacatacagaaagaagccacatggacaatgtccaatatcacagctggtagacaggatcagattcagcaagttgtgaatcacggactcgtgcctttcctggtgtctgtcctgagtaaggctgattttaagacccagaaagaagcagtctgggctgtgacaaattatacctctggtggcacagtggaacagatcgtctacttagtgcattgtggcatcattgaacctctgatgaaccttctgaccgctaaggatactaaaattattctcgtgatcctcgatgccatatcaaacatctttcaggcggcagaaaagctgggtgaaaccgagaagctgagtattatgattgaggaatgcggcggcctggataaaattgaagctttgcaaaaccacgagaatgaaagcgtgtataaggcatccctgtccctcattgagaaatacttcagcgttgaagaagaggaggaccaaaacgtcgtgcctgagactacatctgaaggatacaccttccaggtacaggatggagcgccaggaaccttcaatttctag

SEQ ID NO: 317598 - DNA, 492 bp, Artificial Sequence
  derived and/or modified sequence
atgagcaccaatgaaaatgccaacacccaggccgcccacctgcacaggagcaagaacaagggcaaggacagcacagagacccggcggcaccgcatcgaggtgaatgtggagctgaggaaggccaagaaggatgaccagatgctgaagagaagaaatgtgtcctccttcccagatgatgccaccagccccctgcaggagaactgcaacaaccagaccccagccctgcgggccatcggcaacatcgtgactggaacagatgagcagacccaggtggtgattgatgctggggccctggccgtgttccccagcctgctgaccaaccccaagaccaacatccagaaggaggccacctggaccatgagcaacatcacagccagccggcaggaccagatccagcaggtggtgaaccacggcctggtgcccttcctggtgtctgacctgagcaagatcctgcggcacaagaggaagctgtatggcccctggaacagctag

SEQ ID NO: 317599 - DNA, 2181 bp, Artificial Sequence
  derived and/or modified sequence
gctccctcaccgcccggccgctccctcatctcgcgatgccatcctctttttttttttttctttcccccctcccactcgcccccaagccctatgactccctcccctcccaacgtgtttttcaaatccaccaatgggcacacagcttaggctcgaaccagccaatcggaatgcggagtcaccgggaaatttaaatcgcgccggccggctgcacgagccacacggtctttgagctgagtcgaggtggaccctttgaacgcagtcgccctacagccgctgattccccccgcatcgcctcccgtggaagcccaggcccgcttcgcagctttctccctttgtctcataaccatgtccaccaacgagaatgctaatacaccagctgcccgtcttcacagattcaagaacaagggaaaagacagtacagaaatgaggcgtcgcagaatagaggtcaatgtggagctgaggaaagctaagaaggatgaccagatgctgaagaggagaaatgtaagctcatttcctgatgatgctacttctccgctgcaggaaaaccgcaacaaccagggcactgtaaattggtctgttgatgacattgtcaaaggcataaatagcagcaatgtggaaaatcagctccaagctactcaagctgccaggaaactactttccagagaaaaacagccccccatagacaacataatccgggctggtttgattccgaaatttgtgtccttcttgggcagaactgattgtagtcccattcagtttgaatctgcttgggcactcactaacattgcttctgggacatcagaacaaaccaaggctgtggtagatggaggtgccatcccagcattcatttctctgttggcatctccccatgctcacatcagtgaacaagctgtctgggctctaggaaacattgcaggtgatggctcagtgttccgagacttggttattaagtacggtgcagttgacccactgttggctctccttgcagttcctgatatgtcatctttagcatgtggctacttacgtaatcttacctggacactttctaatctttgccgcaacaagaatcctgcacccccgatagatgctgttgagcagattcttcctaccttagttcggctcctgcatcatgatgatccagaagtattagcagatacctgctgggctatttcctaccttactgatggtccaaatgaacgaattggcatggtggtgaaaacaggagttgtgccccaacttgtgaagcttctaggagcttctgaattgccaattgtgactcctgccctaagagccatagggaatattgtcactggtacagatgaacagactcaggttgtgattgatgcaggagcactcgccgtctttcccagcctgctcaccaaccccaaaactaacattcagaaggaagctacgtggacaatgtcaaacatcacagccggccgccaggaccagatacagcaagttgtgaatcatggattagtcccattccttgtcagtgttctctctaaggcagattttaagacacaaaaggaagctgtgtgggccgtgaccaactataccagtggtggaacagttgaacagattgtgtaccttgttcactgtggcataatagaaccgttgatgaacctcttaactgcaaaagataccaagattattctggttatcctggatgccatttcaaatatctttcaggctgctgagaaactaggtgaaactgagaaacttagtataatgattgaagaatgtggaggcttagacaaaattgaagctctacaaaaccatgaaaatgagtctgtgtataaggcttcgttaagcttaattgagaagtatttctctgtagaggaagaggaagatcaaaacgttgtaccagaaactacctctgaaggctacactttccaagttcaggatggggctcctgggacctttaacttttagatcatgtagctgagacataaatttgttgtgtactacgtttggtattttgtcttattgtttctctactaagaactctttcttaaatgtggtttgttactgtagcactttttacactgaaactatacttgaacagttccaactgtacatacatactgtatgaagcttgtcctctgactaggtttctaatttctatgtggaatttcctatcttgcagcatcctgtaaataaacattcaagtccaccctt

SEQ ID NO: 317600 - DNA, 492 bp, Artificial Sequence
  derived and/or modified sequence
atgagcaccaacgagaacgccaacacccaggccgcccacctgcacaggagcaagaacaagggcaaggattccacagagacacggcgacatcgcatcgaggttaacgtcgaattgcgaaaggcgaaaaaggatgaccagatgttgaagcggcggaatgtctcttcttttccagatgacgctacgtcgccactacaggagaactgcaataatcagactcccgccctacgggccattgggaatattgtgactggaacagatgaacaaacccaagtcgtgatcgatgccggtgctttggctgtttttccgtcattactgaccaaccccaagacaaacattcagaaggaggccacttggacgatgtccaatatcaccgcctctaggcaggatcagatccagcaagttgtcaatcacggtctagtaccttttctcgtgagcgatttgtcaaaaatcttacggcataagcgaaagctgtatggcccttggaattcttag

SEQ ID NO: 317601 - DNA, 1590 bp, Artificial Sequence
  derived and/or modified sequence
atgagcaccaacgagaacgccaacacccccgccgcccggctgcaccgctttaaaaacaagggaaaggactccacagaaatgcgccggcgtcggatagaggtgaatgtggagttaaggaaggctaaaaaagacgaccagatgctgaagagacggaatgtcagctcatttcctgatgatgcaacatcaccattgcaggagaatagaaacaatcaaggaacagtgaattggtcagtggatgatattgttaaaggcattaattcctctaacgtcgagaaccagttgcaggcgacacaggcagctcgcaagctcctgtccagagagaaacagccgccaatagacaatattatacgggctggcctgatcccgaagtttgtatcttttctcggccggacggactgcagccccatacaattcgagtctgcgtgggcactcacaaatatcgcttcagggaccagcgaacaaactaaggcggtagttgatggcggagccataccagccttcattagcctgttggcgtcaccacatgcccacatttccgaacaggccgtgtgggcccttgggaacattgctggtgatggctctgtgttccgggacctggttatcaaatatggcgcagtggatcccctactcgccctccttgccgtgccagatatgtcctcactggcatgcggctatttacgaaacctcacatggacactgtcgaatctatgtcggaacaaaaaccccgcacctcctatagacgcagttgaacagatcttgcccaccctagttcgactgttgcatcacgacgacccagaggtgctcgcagatacctgctgggcaatttcttacctgacggatggacctaatgagcgtatcggcatggtggtcaagacaggagtcgtaccgcaactggtaaagcttcttggggcaagcgagctcccgatcgttactcccgctctccgggcaattggtaacatagttacgggtactgacgagcagacacaggtggttatcgatgccggtgcactggcagtctttccttccctgttgacgaatcctaaaacaaatatccagaaagaagccacctggacaatgtccaacatcacggcagggcgccaagaccagattcagcaggtggtgaaccacgggctggtcccctttctcgtctctgtgctgagcaaagcggattttaagacccagaaggaggccgtttgggctgttactaattacacttcaggcggcacggtggaacagatagtctacctagtccactgcggaatcatcgaaccactgatgaacctgctgaccgcaaaagacacaaagatcatcctcgtgattttggacgcgattagcaatatcttccaggccgccgagaagctgggagagacagagaaattaagcatcatgattgaagaatgtggcggattggacaagatcgaggccctgcaaaaccacgagaacgaatccgtttataaagcttccctgagccttatcgaaaagtatttctcagtagaagaagaggaagatcagaacgtggtgcccgaaactacaagcgaaggatatacttttcaggttcaggatggcgctcccggtactttcaacttttag

SEQ ID NO: 317602 - DNA, 492 bp, Artificial Sequence
  derived and/or modified sequence
atgtctaccaatgagaatgcgaatacccaagccgctcacctgcataggtctaagaataaggggaaggacagtacggagacacgcaggcaccgtattgaggtgaacgttgagctccgcaaggcaaaaaaggacgaccagatgcttaaacggaggaatgtgtccagcttccctgacgatgctacgagtccgctccaggagaactgtaacaatcaaacaccagcactccgtgccattggaaatatcgtcacagggactgatgaacagacacaggttgtgatcgatgccggagctctcgcggtgttcccttcgcttttaaccaaccccaaaaccaacatccaaaaagaggctacctggaccatgtctaatatcaccgccagccgccaggatcaaattcagcaggtcgtgaaccacggcctagtccctttcctcgtatccgacttgtcaaaaatcctcagacacaaaagaaagctctacggtccgtggaattcctag

SEQ ID NO: 317603 - DNA, 1590 bp, Artificial Sequence
  derived and/or modified sequence
atgtctacaaatgagaatgccaatacacccgctgcaaggctccaccgcttcaagaacaagggaaaggacagcaccgaaatgaggcggcgtagaatcgaagttaacgtcgaactccgaaaggccaaaaaagacgatcaaatgttgaaacggagaaacgtgagctcattccctgatgatgcaacttcaccattgcaagagaacaggaataatcagggcacagtgaattggtccgtggatgacattgtgaaaggaatcaattcttccaatgtagaaaaccaactgcaagcaacccaggcagcgagaaaactcctatcccgcgagaagcaaccacctatcgacaatataatccgggctgggctaataccaaaattcgtatctttcctggggagaaccgattgttcccctattcagtttgagagcgcatgggccttaacaaatatcgcctcagggactagtgagcagacaaaggctgtggtggacggtggggcaatacctgccttcattagcctgctagcgagtccacacgcccacatatcagagcaagcagtgtgggccctgggcaatatcgccggagatggaagcgtgttcagagatctggtgatcaaatacggcgctgtagaccctctccttgcattgctagctgttcctgatatgtctagcctggcatgcggatacctacggaacctgacctggactctgtccaatctgtgccgcaacaaaaacccagccccacccattgacgctgtagagcaaatactccctactcttgttaggctgttacaccatgacgatccggaggtgctggctgacacctgctgggcaatctcttacctcaccgatgggccaaatgagcggatcggcatggttgtaaaaaccggtgtggttccccagttggtgaagctactcggcgcaagtgaactcccgatcgtgacaccagccttgcgagcgatcggtaacatcgttaccgggacagacgagcagacccaggtagtcattgacgcaggagctctggccgtgttcccttcattgctgactaatccaaagacaaatatccaaaaggaggcaacgtggacgatgtccaatatcactgctggaagacaagatcaaatccagcaggttgttaaccacggtctggtccctttcctcgtgtctgtgttgtctaaggccgatttcaagacccagaaagaggccgtttgggcggtgacaaactacacaagcggaggcacggttgagcagatagtgtacttagtgcactgtggcataattgaacctctgatgaacctcctgacagcaaaggacaccaagattattctggtgattctcgacgccatttccaacatcttccaggcagctgaaaaacttggggagactgagaagttatctattatgatagaagaatgtggagggctggacaaaatcgaggctttgcagaaccatgagaacgaatcagtttacaaggccagcctgtccctcattgaaaaatactttagtgtcgaagaggaggaagaccagaatgtggtgccagaaactacatcggaaggatacacgttccaggtgcaggacggcgctccaggcacatttaatttctag

SEQ ID NO: 317604 - protein, 394 aa, Artificial Sequence
  derived and/or modified sequence
MSYSCCLPSLGCRTSCSSRPCVPPSCHGYTLPGACNIPANVSNCNWFCEGSFNGSEKETMQFLNDRLASYLEKVRQLERDNAELEKLIQERSQQQEPLLCPSYQSYFKTIEELQQKILCAKAENARLVVNIDNAKLASDDFRSKYQTEQSLRLLVESDINSIRRILDELTLCKSDLESQVESLREELICLKKNHEEEVNTLRSQLGDRLNVEVDTAPTVDLNQVLNETRSQYEALVEINRREVEQWFATQTEELNKQVVSSSEQLQSCQAEIIELRRTVNALEIELQAQHNLRDSLENTLTESEAHYSSQLSQVQSLITNVESQLAEIRCDLERQNQEYQVLLDVRARLECEINTYRSLLESEDCKLPCNPCATTNASGNSCGPCGTSQKGCCN

SEQ ID NO: 317605 - DNA, 1185 bp, Artificial Sequence
  derived and/or modified sequence
atgtcctattcttgttgcctgcccagccttggctgccgaaccagctgctcctcccggccttgcgtccctccgtcctgccacggatacactctgccaggcgcttgcaacatccccgctaacgttagcaactgtaattggttttgcgagggctcttttaacggcagcgaaaaagagacaatgcaattcctgaacgacaggttagctagctatctggaaaaagtcaggcagttagagagggacaacgccgagctggagaagctcattcaggaaagatcacaacagcaggaacctctgctgtgtccttcgtaccaatcttacttcaaaacaatcgaggaactgcagcagaagatactctgcgcaaaagcggagaacgcaaggctcgtggtgaacatcgacaatgctaagctagcatctgacgacttcaggtcgaaatatcagaccgagcaaagtctacggctgcttgtggaatccgacattaacagtattcggcgtatccttgacgagctgaccctgtgtaagagtgacttggaaagccaggttgagagtctgcgcgaagagctcatctgcctgaagaagaaccatgaggaagaggtaaatacactacggtcgcagctgggagaccggctcaatgtcgaagtggatactgcacctactgtggacctgaatcaggtacttaacgagacacgatctcaatacgaagcgttggtcgagattaaccgacgggaggtggagcaatggtttgctacccagaccgaagagcttaacaaacaggttgtttcttcaagtgaacagctgcagtcctgccaggccgagattattgagttgcggagaaccgtgaacgcactggagatcgagctgcaggcccagcataatctaagagattctctagagaatactctgactgagtcggaggcccattactctagtcagcttagccaggtgcagtcattgatcacaaatgtcgagagtcagctggctgagattcggtgcgacctcgaacgacagaaccaggaataccaggtgctacttgatgtgagggctagattagaatgcgagatcaatacgtaccgcagtttattagaaagtgaggattgcaaactgccctgcaatccttgcgcgacgacaaacgctagtggcaactcctgtgggccttgtgggacatctcagaaaggatgctgcaactag

SEQ ID NO: 317606 - DNA, 1185 bp, Artificial Sequence
  derived and/or modified sequence
atgagctacagctgctgcctgcccagcctgggctgcaggaccagctgcagcagccggccctgtgtgccccccagctgccacggctacaccctgcccggggcctgcaacatcccagccaacgtgagcaactgcaactggttctgtgagggcagcttcaatggaagtgagaaggagaccatgcagttcctgaatgaccggctggccagctacctggagaaggtgcggcagctggagcgggacaatgctgagctggagaagctgatccaggagaggagccagcagcaggagcccctgctgtgccccagctaccagagctacttcaagaccatcgaggagctgcagcagaagatcctgtgtgccaaggcagaaaatgcccggctggtggtgaacatcgacaatgccaagctggccagtgatgacttccgcagcaagtaccagacagagcagagcctgcggctgctggtggagagtgacatcaacagcatccgccgcatcctggatgagctgaccctgtgcaagagtgacctggagagccaggtggagagcctgcgggaggagctgatctgcctgaagaagaaccacgaggaggaggtgaacaccctgcggagccagctgggggaccggctgaatgtggaggtggacacagcccccaccgtggacctgaaccaggtgctgaatgagaccaggagccagtatgaggccctggtggagatcaacagaagagaggtggagcagtggtttgccacccagacagaggagctgaacaagcaggtggtgagcagcagcgagcagctgcagagctgccaggccgagatcatcgagctgcggaggacagtgaatgccctggagattgagctgcaggcccagcacaacctgcgggacagcctggagaacaccctgacagaaagtgaggcccactacagcagccagctgagccaggtgcagagcctcatcaccaacgtggagagccagctggccgagatccgctgtgacctggagcggcagaaccaggagtaccaggtgctgctggatgtgcgggcccggctggagtgtgagatcaacacctaccgcagcctgctggagagcgaggactgcaagctgccctgcaacccctgtgccaccaccaatgccagcggcaacagctgtggcccctgtggcaccagccagaagggctgctgcaactag

SEQ ID NO: 317607 - DNA, 1185 bp, Artificial Sequence
  derived and/or modified sequence
atgagctacagctgctgcctgcccagcctgggctgccggaccagctgctcatcaagaccatgcgttcctccctcctgccatggatacactttaccaggtgcatgcaatatcccagctaatgtgagcaactgcaattggttttgcgaaggttcttttaacggtagcgagaaggagacgatgcagtttctcaacgatagacttgcgtcctaccttgagaaagttagacaactggagcgggacaatgcagaactggagaaattgatacaagagaggagccaacagcaggaacccctgctatgtccgtcataccaatcctactttaaaactatcgaagaactccagcaaaaaatcttatgcgcaaaggctgaaaacgcccgcttggtggtcaacatcgacaacgcaaagctggcgagcgacgattttcgatctaaatatcaaactgagcaaagtctcagactcctcgtggaaagcgatatcaactctattcgccgcatcctggacgagctaacactgtgcaagagtgacctcgagagccaggtggagtccctgcgcgaagagctgatctgtcttaagaaaaaccatgaggaggaagtaaacaccttgcgctcacagctgggcgacagacttaatgtggaggtcgacactgctccaaccgtcgatctcaaccaggtcctgaacgagactcggtctcagtacgaggccctggtcgaaatcaatagacgggaggtcgagcagtggtttgcaacacaaaccgaggagttaaacaagcaagttgtgtcctccagcgagcagcttcagagctgccaagctgagatcatcgagctgaggcggacagtgaacgccctggagatcgagttacaggcgcagcacaacctgagggattccttggagaatacactcaccgagtcggaggcccactacagtagtcagttatcccaagtgcagtctctgataactaatgtggagagtcagctggcagaaatccgctgcgaccttgaacgccaaaaccaggagtatcaggtgctcttggacgtgcgcgccaggcttgagtgcgagattaacacctacagaagcttactcgagtcagaggattgcaagctcccttgcaatccgtgcgccactacaaatgcttcgggcaacagttgtggaccgtgtgggacttctcagaagggctgctgcaattag

SEQ ID NO: 317608 - DNA, 1185 bp, Artificial Sequence
  derived and/or modified sequence
atgtcatacagctgttgccttccttcactgggctgtcgaacatcatgcagttcacgaccctgcgttcctcccagctgccacgggtatacactccccggagcctgtaacatcccagccaacgtctctaattgcaattggttctgcgagggaagctttaatggaagtgaaaaggagacaatgcaattccttaatgaccgcctggcttcttacttggaaaaggtgcgccagttagaaagggacaacgccgagctggagaaactgatccaggagagatcccaacaacaagagccccttctgtgtccctcttatcagagttacttcaaaaccatcgaggaactgcagcagaaaatcctgtgcgccaaggctgaaaatgcaagactggtcgtgaacattgacaatgctaaactggcttcggacgacttccgcagcaaatatcagaccgagcaatctttgcggctgctggttgaatccgacatcaacagcatccgtcggatcctggacgagctgactctgtgtaagtcagatctggaatctcaggtagaatctctgagggaggagctgatctgcctgaaaaaaaaccatgaggaggaggtgaacacactgcgctcccagctgggcgatcgattgaatgttgaagtggatacagcccctacagttgatctcaaccaagtcctgaacgaaactcgctctcagtatgaagccctggtcgagattaaccgcagggaagttgaacagtggttcgccacacagactgaggaattaaataaacaagtggtctcatcctccgagcaactgcagtcttgtcaggctgagatcattgagttaagacgaacggtcaatgctttggaaatcgagctgcaggcgcaacacaacttgagagactcgctggaaaacactcttacagaaagcgaagcacattactcgtctcagttgtctcaggtgcaaagtttgatcactaatgttgagtctcagcttgccgaaattagatgtgacctcgagcgtcaaaaccaggagtaccaggtattacttgacgtgcgtgcccgactggagtgcgaaattaacacctaccggagtctactggagtctgaagactgtaagttaccttgcaacccatgtgccactaccaatgccagcggtaatagttgcggaccatgtggaaccagtcagaagggctgctgcaattag

SEQ ID NO: 317609 - DNA, 1185 bp, Artificial Sequence
  derived and/or modified sequence
atgagctacagctgctgcctgcccagcctgggctgcagaaccagctgcagcagcagaccctgcgtgccccccagctgccacggctacaccctgcccggcgcctgcaacatccccgccaacgtgagcaactgcaactggttctgcgagggcagcttcaacggcagcgagaaggagaccatgcagttcctgaacgacagactggccagctacctggagaaggtgagacagctggagagagacaacgccgagctggagaagctgatccaggagagaagccagcagcaggagcccctgctgtgccccagctaccagagctacttcaagaccatcgaggagctgcagcagaagatcctgtgcgccaaggccgagaacgccagactggtggtgaacatcgacaacgccaagctggccagcgacgacttcagaagcaagtaccagaccgagcagagcctgagactgctggtggagagcgacatcaacagcatcagaagaatcctggacgagctgaccctgtgcaagagcgacctggagagccaggtggagagcctgagagaggagctgatctgcctgaagaagaaccacgaggaggaggtgaacaccctgagaagccagctgggcgacagactgaacgtggaggtggacaccgcccccaccgtggacctgaaccaggtgctgaacgagaccagaagccagtacgaggccctggtggagatcaacagaagagaggtggagcagtggttcgccacccagaccgaggagctgaacaagcaggtggtgagcagcagcgagcagctgcagagctgccaggccgagatcatcgagctgagaagaaccgtgaacgccctggagatcgagctgcaggcccagcacaacctgagagacagcctggagaacaccctgaccgagagcgaggcccactacagcagccagctgagccaggtgcagagcctgatcaccaacgtggagagccagctggccgagatcagatgcgacctggagagacagaaccaggagtaccaggtgctgctggacgtgagagccagactggagtgcgagatcaacacctacagaagcctgctggagagcgaggactgcaagctgccctgcaacccctgcgccaccaccaacgccagcggcaacagctgcggcccctgcggcaccagccagaagggctgctgcaactag

SEQ ID NO: 317610 - DNA, 360 bp, Artificial Sequence
  derived and/or modified sequence
atggccttcagtgggtcgcaagcaccctacctttcaccggccgtccccttctctggtactatacaaggtggcctccaagacggcctgcagattacggttaatgggaccgttttgagcagttcagggactagattcgctgtcaacttccagaccgggtttagcggtaatgacatcgccttccatttcaatccccgttttgaggacgggggctacgtggtttgtaatacaaggcagaacggaagttggggacccgaagagcgcaaaactcatatgccattccagaaaggaatgccctttgacttatgcttcttggtccaatcttcagacttcaaagtccaccttctgcttctcctgctctag

SEQ ID NO: 317611 - DNA, 360 bp, Artificial Sequence
  derived and/or modified sequence
atggccttcagcggcagccaggccccctacctgagccctgctgtgcccttcagcggcaccatccagggcggcctgcaggacggcctgcagatcaccgtgaatggcaccgtgctgagcagcagcggcaccaggtttgctgtgaacttccagacaggcttctctggaaatgacatcgccttccacttcaaccccaggtttgaagatggcggctacgtggtgtgcaacacccggcagaatggctcctggggccctgaggagaggaagacccacatgcccttccagaagggcatgccctttgacctgtgcttcctggtgcagagcagtgacttcaaggtgcacctgctgctgctgctgctgtag

SEQ ID NO: 317612 - DNA, 449 bp, Artificial Sequence
  derived and/or modified sequence
acaaaggacttcctagtgggtgtgaaaggcagcggtggccacagaggcggcggagagatggccttcagcggttcccaggctccctacctgagtccagctgtccccttttctgggactattcaaggaggtctccaggacggacttcagatcactgtcaatgggaccgttctcagctccagtggaaccaggtttgctgtgaactttcagactggcttcagtggaaatgacattgccttccacttcaaccctcggtttgaagatggagggtacgtggtgtgcaacacgaggcagaacggaagctgggggcccgaggagaggaagacacacatgcctttccagaaggggatgccctttgacctctgcttcctggtgcagagctcagatttcaaggtgcacctgctgcttcttttactctgaaaataagaactagaggagtcatcacgttgcta

SEQ ID NO: 317613 - DNA, 360 bp, Artificial Sequence
  derived and/or modified sequence
atggccttcagcggcagccaggccccctacctgagccccgccgtgcctttctcggggactatacagggcgggttgcaggatggactgcagattaccgtcaatgggaccgtactgagctcgtctggtaccaggttcgccgtgaacttccagactgggttcagcgggaatgacatcgcatttcactttaacccacggttcgaggatggaggctacgtagtctgtaatacccgacagaatggatcctgggggccagaggaaagaaaaacccatatgccttttcagaagggaatgccatttgatctgtgtttcctggtgcagtcctccgacttcaaggtgcaccttcttctgctgttgctgtag

SEQ ID NO: 317614 - DNA, 360 bp, Artificial Sequence
  derived and/or modified sequence
atggccttttccggtagtcaggctccatacctctctcctgcagtcccattttcagggacgatacaaggcggactacaggacggactccagatcacagtaaacggaaccgtgttgtcatcgtctggtacgcgcttcgccgtcaattttcagacaggcttttcgggcaacgatatcgcttttcattttaatcctcggtttgaagatggtggatacgtcgtatgtaacacccgccagaatggctcttggggcccagaagaacgcaaaactcatatgccgttccagaagggcatgcctttcgacctgtgttttctcgtacaatcatctgacttcaaagtgcacctgcttcttctactactctag

SEQ ID NO: 317615 - DNA, 360 bp, Artificial Sequence
  derived and/or modified sequence
atggccttcagcggcagccaggccccctacctgagccccgccgtgcccttcagcggcaccatccagggcggcctgcaggacggcctgcagatcaccgtgaacggcaccgtgctgagcagcagcggcaccagattcgccgtgaacttccagaccggcttcagcggcaacgacatcgccttccacttcaaccccagattcgaggacggcggctacgtggtgtgcaacaccagacagaacggcagctggggccccgaggagagaaagacccacatgcccttccagaagggcatgcccttcgacctgtgcttcctggtgcagagcagcgacttcaaggtgcacctgctgctgctgctgctgtag

SEQ ID NO: 317616 - DNA, 95 bp, Artificial Sequence
  derived and/or modified sequence
gctcaaagaaatcagaaatgacacaagcaaatggaaaaacatgccatgttcatgaatatgaagaatcaatattgttaaaatggccatactgctca

SEQ ID NO: 317617 - DNA, 1374 bp, Artificial Sequence
  derived and/or modified sequence
tgttttcctgttcagtttcctcctaatgaccctaaggccgggactcagggcaagtgcatgcccttctttcgggctggctttgtgtgtcctacccctccttacaagtcgttggcccgcgagcaaataaatgccctgacttcattcctcgatgcaagctttgtgtattcatctgagccatcattggccagtcggcttaggaacttatcctccccactggggctcatggccgtcaaccaggaggtcagtgatcacggattgccatatctcccatacgacagcaaaaaacctagtccctgtgaatttattaatactactgccagagtgccctgttttcttgccggcgacagtagagcttccgagcatattcttttagcaacctcccataccctttttcttagagagcacaataggctggctcgggagctgaagcggttgaatccccagtgggacggcgagaagctataccaagaggctcgaaagattctaggggcctttgtccagatcataacttttcgcgactacctacccatcctgctgggagaccacatgcaaaaatggatacctccgtaccaagggtattccgagtctgtcgatccccgcatctcgaacgtgttcactttcgcttttaggtttggtcacttagaggtacctagcagcatgttccggttggatgagaactaccagccatggggccccgaacctgagctgcccctgcatactctgtttttcaacacctggaggatggtaaaggatggtgggattgacccacttgtgagaggactgttggccaagaaatctaaacttatgaagcaaaataagatgatgaccggcgaactgagaaacaagcttttccaaccaactcataggatccacggattcgacctggcggccatcaatacccaaaggtgtcgggaccacggtcagcccggatacaactcctggagagcgttctgtgatctatctcaaccacagactttagaagagctgaacaccgtcctgaagagtaagatgctggcaaaaaaactcctaggcctctacggaacccccgacaacatagacatctggattggcgccatagccgagccactggttgagcgcggccgtgtaggcccacttttggcctgcctactggggaagcagttccagcagatcagggacggcgaccgtttttggtgggaaaacccaggggtcttcacaaacgagcagaaagacagcctacagaaaatgagcttctctcgcctagtgtgtgacaacacacgcattaccaaagtccccagagatcctttctgggctaacagctatccatacgatttcgtggattgctctgcaatcgataagctggatctctcaccatgggcctccgttaaaaattag

SEQ ID NO: 317618 - DNA, 1897 bp, Artificial Sequence
  derived and/or modified sequence
tgctttcctgtccagttcccacccaatgaccccaaggcggggactcaagggaaatgcatgcctttcttccgagctgggttcgtctgccccactccaccctacaagtccctggcccgagagcagatcaacgctctgacctccttcctggatgccagctttgtgtacagctccgagccaagcctggccagccgcctccgcaacctcagcagccccctgggcctcatggctgtcaaccaggaggtctcagaccatggactaccctacctgccctatgacagcaagaagccaagcccctgtgagttcatcaacaccactgcccgtgtgccctgcttcctggcaggagattctcgagcctcagagcatattctgctggccacatcccacaccctctttctccgcgagcataaccggctggccagagaactaaagagactcaaccctcagtgggatggagagaagctctaccaggaagcccggaaaatcctgggagccttcgtgcagattatcacctttagggactacctacccattttgctaggtgaccacatgcagaagtggatacccccatatcaaggctacagtgaatctgtggatcccagaatttccaatgtcttcaccttcgccttccgctttggccacttggaggtcccctctagtatgttccgcctggatgagaattatcagccatgggggccagaaccagaactccccctccacaccctcttcttcaacacttggaggatggtcaaagatggtggaattgatcctctggtgcggggcctgctggccaagaaatccaagctgatgaaacagaataaaatgatgactggagagctgcgcaacaagcttttccagccaactcacaggatccatggctttgacctggctgccatcaacacacagcgttgccgggaccatgggcaacctgggtacaattcctggagagccttctgtgacctctcacagccgcagacactagaggagttgaacacagtgctgaagagcaagatgctggccaagaagttactgggtctctacgggacccctgacaacatcgacatctggataggggccattgctgagccgctggtggaaaggggtcgggtggggcctctcctggcctgcctcttgggcaagcagttccagcagatccgtgatggagacaggttctggtgggaaaaccctggggtcttcacgaacgagcagaaggactctctacagaaaatgtccttctcacgccttgtctgtgacaacacccgcatcaccaaggtcccacgggacccattctgggccaacagctacccctatgacttcgtggattgctcagccatcgacaagctggacctgtcaccctgggcctcagtgaagaattaggggcccgcgctgcacaggaaagttccctttggtccacagggccatttcaagcaagttcaatgacctggtcccttagagctccatatcccagtcccagcccttctttgcagctgggcctctctatacccctggatgaacagcttgctcaggccccagggtggctgcctcggccctcccagctcttacactcagctccagtggcttctcctttctgtcaagacttagccccgctgagatgcccttctgctccagcttgctggatgttacctgtcctcttccctccacaagtcttggcccttaacctttatctttcttcctgtcctctcacctagattgtaagctccctgggccaggacttcagcctgcctccgagggtcccctgtggcacctagcatggtgcacagcacattagaagtgctcaaaaacatctgatgactgactaaagatgctaggcgtgacaccgttccctccaaaagcagacctcggaatcactgccaaataagtaactagacgtttacaggcc

SEQ ID NO: 317619 - DNA, 1374 bp, Artificial Sequence
  derived and/or modified sequence
tgcttccctgtgcagtttcctccaaatgaccccaaggccggcacccagggcaagtgcatgcccttcttccgggccggctttgtgtgccccaccccaccctacaagagcctggcccgggagcagatcaatgccctgaccagcttcctggatgccagctttgtgtacagcagcgagcccagcctggccagccggctgaggaacctgagcagccccctgggcctgatggctgtgaaccaggaggtgtctgaccacggcctgccctacctgccctatgacagcaagaagcccagcccctgtgagttcatcaacaccacagcccgggtgccctgcttcctggccggggacagccgggccagcgagcacatcctgctggccaccagccacaccctcttcctgcgggagcacaaccggctggcccgggagctgaagaggctgaacccccagtgggatggagagaagctgtaccaggaggccaggaagatcctgggcgcctttgtgcagatcatcaccttccgggactacctgcccatcctgctgggggaccacatgcagaagtggatccccccctaccagggctacagcgagagcgtggacccccgcatcagcaatgtgttcacctttgccttccgcttcggccacctggaggtgcccagctccatgttccggctggatgagaactaccagccctggggccctgagcctgagctgcccctgcacaccctcttcttcaacacctggaggatggtgaaggatggcggcatcgaccccctggtgcggggcctgctggccaagaagagcaagctgatgaagcagaacaagatgatgaccggggagctgaggaacaagctgttccagcccacccaccgcatccacggctttgacctggccgccatcaacacccagcgctgccgggaccacggccagcccggctacaacagctggagggccttctgtgacctgagccagccccagaccctggaggagctgaacacagtgctgaagagcaagatgctggccaagaagctgctgggcctgtatggcaccccagacaacatcgacatctggattggagccatcgccgagcccctggtggagcggggccgggtgggccccctgctggcctgcctgctgggcaagcagttccagcagatcagagatggagaccgcttctggtgggagaaccctggggtcttcaccaatgagcagaaggacagcctgcagaagatgtccttcagccggctggtgtgtgacaacacccgcatcaccaaggtgccccgggaccccttctgggccaacagctacccctatgactttgtggactgcagcgccatcgacaagctggacctgagcccctgggcctctgtgaagaactag

SEQ ID NO: 317620 - DNA, 1374 bp, Artificial Sequence
  derived and/or modified sequence
tgcttccccgtgcagttcccccccaacgaccccaaggccggcacccaggggaaatgtatgcccttcttccgcgcagggttcgtctgtcccaccccaccatataaaagtctcgctagagagcagattaatgctttgacctcttttcttgatgctagcttcgtgtacagtagcgagcccagtttagcttcccgcctgcgaaatctgtcttcccccctcggtctgatggcagtgaatcaagaggtgtcagatcatggactcccatatctgccctacgatagtaaaaaaccaagtccttgtgagttcatcaacactaccgcgcgagtcccttgcttccttgcgggtgacagccgggcgtctgagcatatcctccttgccacatcccacacgctgttcctcagggaacacaaccgcttggctcgggaactgaagcggctgaatccccagtgggacggagaaaagctgtaccaggaggcccggaaaatccttggtgcgtttgtgcagattatcaccttcagagattacctgccaatactactaggggatcatatgcagaaatggatccctccataccagggctacagcgagtctgtggaccccaggattagcaacgtgtttacttttgccttccggtttggtcatctggaggtgccatcttcaatgttccgtcttgacgaaaattaccagccatgggggccagagccagagcttccgctgcacaccctctttttcaatacctggcgcatggtgaaggacggcggcatagacccgctcgtgagggggcttcttgctaaaaagtccaaactcatgaagcagaataagatgatgacaggcgagttacggaacaagttattccaaccgacgcatcggatacatggtttcgacctggcagctattaacacccagcgctgtcgagaccatggacaacctggctataacagctggagagccttctgcgatctcagccagcctcaaacgctggaagagttgaacaccgtcttgaaatccaaaatgctggccaaaaagctcctaggactctacggaacacccgacaatatcgacatttggattggagccattgctgaacctctcgtcgaaagaggacgggtggggccattactcgcctgcctcctcggcaaacagttccaacagatcagggacggcgaccgattctggtgggagaaccccggggtgttcaccaatgaacagaaagattcgctacagaaaatgagctttagccgcctcgtttgcgacaatactcggatcacgaaagttccaagagatcccttctgggccaactcctacccttacgacttcgtcgattgctctgcgatcgacaaactggacttaagcccctgggcatccgtgaagaactag

SEQ ID NO: 317621 - DNA, 1374 bp, Artificial Sequence
  derived and/or modified sequence
tgttttccggtacagttcccgcctaacgaccccaaagcagggactcagggcaagtgtatgcccttttttcgagccggattcgtgtgccctactcccccatacaagagtctagcgcgtgaacagatcaatgccctcacttcgtttctggatgcatcttttgtgtactcctcagaaccttccctggctagccggcttcggaatctctccagtcccctcggcttaatggccgttaaccaagaagtgtccgaccacgggttgccctatctgccttatgactcaaagaaacccagcccttgtgagtttattaacaccacagctagagtaccttgcttcctcgccggagattcacgagcaagcgaacacatcttgctagcaaccagccatactctgttcctgagagaacacaacagactggcacgcgaacttaagaggttaaacccacaatgggacggagagaaattataccaggaagcaagaaagatcctgggggctttcgtccagattataaccttcagggactatttgcccattctcctgggggatcatatgcagaagtggatcccaccctaccaaggctattccgagtccgtggaccccaggatttcaaatgtgttcaccttcgctttcagatttggtcatctggaggtgccttcatcaatgtttcgcctggacgaaaattatcagccatggggtcccgagcccgagctccccctccacacgctatttttcaacacttggaggatggtgaaagatggtggaattgatccactcgttcggggacttctggcaaagaaatcaaagttgatgaagcagaacaagatgatgaccggggaactgaggaacaagctgttccaacccacacatcggatccatggatttgacctggcagctatcaatactcagcgttgtcgggatcatggccagcccggatataacagctggagggctttttgtgatttgagtcagccacagacacttgaagagctgaacaccgtgctgaagagcaagatgctcgctaagaaactgctggggttgtacggaacccccgacaacatcgatatatggatcggcgcaattgcggagcccttagtcgagcgcggaagggtaggtccactgcttgcttgtctcttaggcaagcaattccagcagattagagacggagacaggttttggtgggagaaccctggggtgtttaccaacgaacaaaaggactctctgcagaagatgagcttctcccggctggtttgcgataatacccggatcaccaaagtgccacgcgaccccttctgggccaacagttacccttatgacttcgtggattgttccgctatcgataagctcgatctgtctccttgggcctcagttaagaattag

SEQ ID NO: 317622 - DNA, 1374 bp, Artificial Sequence
  derived and/or modified sequence
tgcttccccgtgcagttcccccccaacgaccccaaggccggcacccagggcaagtgcatgcccttcttcagagccggcttcgtgtgccccacccccccctacaagagcctggccagagagcagatcaacgccctgaccagcttcctggacgccagcttcgtgtacagcagcgagcccagcctggccagcagactgagaaacctgagcagccccctgggcctgatggccgtgaaccaggaggtgagcgaccacggcctgccctacctgccctacgacagcaagaagcccagcccctgcgagttcatcaacaccaccgccagagtgccctgcttcctggccggcgacagcagagccagcgagcacatcctgctggccaccagccacaccctgttcctgagagagcacaacagactggccagagagctgaagagactgaacccccagtgggacggcgagaagctgtaccaggaggccagaaagatcctgggcgccttcgtgcagatcatcaccttcagagactacctgcccatcctgctgggcgaccacatgcagaagtggatccccccctaccagggctacagcgagagcgtggaccccagaatcagcaacgtgttcaccttcgccttcagattcggccacctggaggtgcccagcagcatgttcagactggacgagaactaccagccctggggccccgagcccgagctgcccctgcacaccctgttcttcaacacctggagaatggtgaaggacggcggcatcgaccccctggtgagaggcctgctggccaagaagagcaagctgatgaagcagaacaagatgatgaccggcgagctgagaaacaagctgttccagcccacccacagaatccacggcttcgacctggccgccatcaacacccagagatgcagagaccacggccagcccggctacaacagctggagagccttctgcgacctgagccagccccagaccctggaggagctgaacaccgtgctgaagagcaagatgctggccaagaagctgctgggcctgtacggcacccccgacaacatcgacatctggatcggcgccatcgccgagcccctggtggagagaggcagagtgggccccctgctggcctgcctgctgggcaagcagttccagcagatcagagacggcgacagattctggtgggagaaccccggcgtgttcaccaacgagcagaaggacagcctgcagaagatgagcttcagcagactggtgtgcgacaacaccagaatcaccaaggtgcccagagaccccttctgggccaacagctacccctacgacttcgtggactgcagcgccatcgacaagctggacctgagcccctgggccagcgtgaagaactag

SEQ ID NO: 317623 - protein, 569 aa, Artificial Sequence
  derived and/or modified sequence
MQGTRLPVCCACPVGSSKPAEAEKEKVRRGHPTVHSETKYVELIVINDHQLFEQMRQSVVLTSNFAKSVVNLADVIYKEQLNTRIVLVAMETWADGDKIQVQDDLLETLARLMVYRREGLPEPSDATHLFSGRTFQSTSSGAAYVGGICSLSHGGGVNEYGNMGAMAVTLAQTLGQNLGMMWNKHRSSAGDCKCPDIWLGCIMEDTGFYLPRKFSRCSIDEYNQFLQEGGGSCLFNKPLKLLDPPECGNGFVEAGEECDCGSVQECSRAGGNCCKKCTLTHDAMCSDGLCCRRCKYEPRGVSCREAVNECDIAETCTGDSSQCPPNLHKLDGYYCDHEQGRCYGGRCKTRDRQCQVLWGHAAADRFCYEKLNVEGTERGSCGRKGSGWVQCSKQDVLCGFLLCVNISGAPRLGDLVGDISSVTFYHQGKELDCRGGHVQLADGSDLSYVEDGTACGPNMLCLDHRCLPASAFNFSTCPGSGERRICSHHGVCSNEGKCICQPDWTGKDCSIHNPLPTSPPTGETERYKGPSGTNIIIGSIAGAVLVAAIVLGGTGWGFKNIRRGRSGGA

SEQ ID NO: 317624 - DNA, 1710 bp, Artificial Sequence
  derived and/or modified sequence
atgcaagggaccaggcttcctgtatgctgcgcctgtccagtcggaagcagcaagccggcagaagccgaaaaggaaaaagttcgtagagggcacccgacagtccattctgagactaagtacgttgagctgatcgtgatcaatgatcaccagcttttcgagcagatgcgccagtccgtcgtacttaccagcaactttgccaagtccgtggtgaacttggccgacgtcatatacaaggaacagttgaacactcgtatcgtcctcgtggctatggagacttgggccgacggagacaagatccaggtgcaggacgacttactggagacgctcgcacgcctgatggtctataggagggaggggctaccagagccctccgatgcaacacacttattttcgggacgcacgttccagtctacaagttctggcgccgcctacgttggcggcatctgctcattgagccacggaggtggcgtaaacgagtacgggaatatgggggccatggccgttactttggcacagactctgggccagaatctgggtatgatgtggaataagcatcggagtagtgcaggggactgtaaatgtcctgacatctggctgggctgtatcatggaggacactggattctacctccctaggaaattttcccgttgttccatagacgagtacaaccagttcctccaggagggtggcggctcttgccttttcaacaagcctctgaaactcctcgatccacccgagtgcggcaatgggttcgttgaagctggcgaagagtgcgactgcggctcggtccaggagtgctcacgtgctgggggcaactgttgcaaaaagtgcactttaacgcatgatgctatgtgcagtgatggcctctgctgcagacgatgcaaatacgagccgaggggggtatcttgtcgggaagctgtaaacgagtgcgacatcgccgagacctgtacaggggactcatctcaatgtccaccaaacctacataaactggacggctactactgtgatcacgaacaaggcaggtgctacggggggagatgcaaaacgagggacaggcagtgtcaggtactgtggggacacgcggccgccgatcggttctgttatgagaaactgaatgttgagggtacagaacggggctcttgtggcagaaagggaagcggctgggtgcaatgctcaaaacaagacgtcttatgcggatttcttctgtgcgtgaatatcagcggcgccccaagactgggagatcttgttggcgatatttcttcagtaaccttttaccaccaaggcaaggaactagactgccgtgggggtcatgtacaacttgcagacggcagtgacttgagctacgtagaggacggtactgcctgtgggccaaacatgctctgccttgaccatcggtgccttccagcatccgcattcaatttttctacatgccccggtagcggggaaaggcggatctgttctcatcatggagtctgctctaatgaagggaagtgcatatgccagcccgactggaccgggaaggactgcagcatccataaccctctgccgaccagtccgcccaccggggagacagagcgctacaagggaccgtctggaaccaatattatcatcgggtcaattgctggggccgtgctggttgcagccattgtcctgggaggcactggttgggggtttaaaaacattcgaagaggcagaagtggcggggcgtag

SEQ ID NO: 317625 - DNA, 1710 bp, Artificial Sequence
  derived and/or modified sequence
atgcagggcacccggctgcctgtgtgctgtgcctgccctgtgggcagcagcaagccagctgaggccgagaaggagaaggtgcggcggggccaccccaccgtgcacagcgagaccaagtatgtggagctgattgtcatcaatgaccaccagctgtttgagcagatgaggcagagcgtggtgctgaccagcaactttgccaagtctgtggtgaacctggctgatgtgatctacaaggagcagctgaacaccagaattgtgctggtggccatggagacctgggcagatggagacaagatccaggtgcaggatgacctgctggagaccctggcccggctgatggtgtaccgccgggagggcctgcctgagcccagtgatgccacccacctgttcagcggccgcaccttccagagcaccagcagcggggccgcctacgtgggcggcatctgcagcctgagccatggaggcggcgtgaatgaatatggcaacatgggcgccatggctgtgaccctggcccagaccctgggccagaacctgggcatgatgtggaacaagcacaggagcagcgctggggactgcaagtgcccagacatctggctgggctgcatcatggaggacaccggcttctacctgcccaggaagttcagccgctgcagcattgatgagtacaaccagttcctgcaggagggcggcggcagctgcctcttcaacaagcccctgaagctgctggaccccccagaatgtggaaatggatttgtggaggccggggaggagtgtgactgtggctctgtgcaggagtgcagcagagctgggggcaactgctgcaagaagtgcaccctgacccatgatgccatgtgcagtgatggcctgtgctgccgccgctgcaagtatgagccccggggcgtgtcctgccgggaggccgtgaatgaatgtgacattgctgagacctgcacaggagacagcagccagtgcccccccaacctgcacaagctggatggctactactgtgaccacgagcagggccgctgctatggaggccgctgcaagacccgggaccggcagtgccaggtgctgtggggccatgctgctgctgaccgcttctgctatgagaagctgaatgtggagggcacagagcggggcagctgtggcaggaagggcagcggctgggtgcagtgcagcaagcaggatgtgctgtgtggcttcctgctgtgtgtgaacatcagcggggccccccggctgggggacctggtgggggacatcagctctgtgaccttctaccaccagggcaaggagctggactgccggggcggccacgtgcagctggctgatggcagtgacctgtcctatgtggaggatggaacagcctgtggccccaacatgctgtgcctggaccaccgctgcctgcctgccagcgccttcaacttcagcacctgccccggcagcggggagcggcgcatctgcagccaccacggcgtgtgcagcaatgaaggcaagtgcatctgccagcctgactggacaggcaaggactgcagcatccacaaccccctgcccaccagccccccaactggagaaacagagcgctacaagggccccagcggcaccaacatcatcatcggcagcattgctggagctgtgctggtggccgccatcgtgctgggcggcaccggctggggcttcaagaacatccggcggggccgcagcggcggggcctag

SEQ ID NO: 317626 - DNA, 1710 bp, Artificial Sequence
  derived and/or modified sequence
atgcagggcacccggctgcccgtgtgctgcgcctgccccgtgggcagctccaaaccagcagaggccgagaaagaaaaggtccgacgtggccaccctactgtgcacagcgagacgaagtatgtcgaactcattgtaataaatgaccatcaacttttcgagcagatgagacagagcgtggtgttgacatccaactttgctaagtccgtcgtgaaccttgcagacgtcatctacaaagagcagctgaacacccgcatagtgctggtggctatggagacttgggccgacggcgacaaaatccaggtgcaggacgatcttcttgagacactcgcacgcctgatggtctatcgtcgggaaggattgcctgagcccagtgatgcaacgcacctatttagcggcaggactttccagagtacttcatcgggcgctgcctatgtgggagggatttgcagcctgtcccatggcggcggcgtcaacgagtatggcaacatgggcgcaatggctgttactcttgcccagacacttggacagaacctgggcatgatgtggaataagcatcgctcctcggccggcgactgcaaatgtcctgacatttggctgggatgcatcatggaagacacaggcttttatctcccccgcaagtttagtaggtgctctatcgatgaatacaatcagttcctccaagagggaggaggcagttgcctgtttaacaaaccactaaagttgctggaccctccagagtgtgggaatggatttgtggaggccggtgaagagtgcgactgcgggtcggttcaggagtgtagccgtgccggcggtaattgctgcaagaagtgtacactcacacacgacgccatgtgttccgacggcttgtgttgcaggcgctgtaaatacgagccccgcggggtatcatgtcgcgaagctgtcaacgagtgtgatatcgctgagacctgtactggcgacagcagccaatgccctcccaatctgcacaagttggacggctattactgtgatcatgagcagggacggtgttacggaggacgttgcaagacccgagatcgtcaatgccaggtgctctggggacatgccgcagccgaccggttctgttatgaaaaactgaacgtcgagggcaccgagcgcggaagctgtggcagaaaaggatctggatgggttcagtgttcgaagcaagatgtgctatgtggattcctcctctgcgtaaatattagtggcgctccgagacttggcgatcttgtgggagatatctcaagcgtgaccttctaccaccaggggaaagagctggattgccgtggtggtcacgtgcaactcgcagatggaagcgacctgagctatgtggaggacggcacagcctgtgggcccaacatgctctgcttggaccaccgctgtttacccgcttcagctttcaacttcagtacatgccccgggtctggggagcgtagaatctgttcccaccacggcgtgtgttcgaacgaagggaagtgcatttgccagcccgactggaccgggaaggactgttcaatccacaaccccctccctactagtcctcctactggagaaactgagaggtacaaggggccttccgggacaaatatcattatcggaagcattgcgggagccgtgctagtcgccgctatagtgctgggaggtaccgggtgggggttcaaaaacataaggagagggcggtccggcggtgcctag

SEQ ID NO: 317627 - DNA, 1710 bp, Artificial Sequence
  derived and/or modified sequence
atgcaaggtacaaggttacccgtctgttgcgcttgccccgtggggtcttcgaagcctgctgaggctgagaaggagaaagtgcgcaggggccacccgaccgtgcactccgagaccaagtacgtagagctgatcgtgatcaatgaccatcagctgttcgagcagatgcgtcagtccgtggttctgacctcaaactttgcaaaaagcgtggtgaacctggcggatgtgatctataaggagcaactaaacactagaatcgtactagtagccatggagacatgggctgatggcgacaaaatccaggtccaagatgatctgctggagacattggctagattaatggtgtatcggagagagggtttgccagagccctccgacgccacacatctgttttctggcagaacatttcagtccacctcctccggcgctgcatacgtcgggggtatatgtagtctcagccacgggggtggggtgaacgagtacgggaatatgggcgctatggcagtgacactcgcccaaaccctgggccagaatctgggcatgatgtggaataagcaccgctcctctgccggagattgtaaatgtccagatatctggctggggtgcatcatggaggatacagggttctatcttcctcgtaagttcagtcgatgcagcatcgatgagtacaaccagtttttgcaagagggcggagggtcctgtctgttcaataagccccttaaattactggatcccccagagtgcggcaatgggtttgttgaagctggcgaagagtgtgattgtggctccgtgcaggagtgctcacgcgctggagggaactgttgcaaaaagtgcacgctgacacatgatgccatgtgtagcgatggcctgtgctgtcgacgatgcaaatacgaaccacgaggggtgtcctgcagggaagctgtgaacgagtgcgatattgcagagacctgcaccggagactcttcgcaatgcccaccgaacctgcacaaactcgatggctactactgtgaccatgaacagggaagatgttatggagggcgttgcaaaactcgcgaccgacagtgccaagtcctgtggggccacgccgctgccgacaggttctgctacgaaaagttaaacgtggaaggaaccgagcggggtagttgcgggagaaagggctctggttgggtgcaatgctctaagcaagacgtgctctgcgggttccttttatgcgtgaacataagcggtgctcccaggcttggagacctagttggagatattagttctgtgactttttaccatcaaggtaaagaactggattgccggggaggacacgtacagctcgcagacggaagtgatctgtcatacgtggaggacggaactgcgtgcgggccaaatatgctgtgtttggaccaccggtgtctacctgcatccgctttcaacttttccacctgtccaggcagtggagagcgacgcatctgttctcaccatggggtctgctccaatgagggaaagtgtatctgtcagcctgattggacaggcaaggactgcagtattcataatccactccccacatccccacctactggcgagacagagagatataagggaccctccggtacaaacataataatcggctctatcgcaggtgcggtacttgtggcggctattgtgttgggagggactggatggggattcaagaatattcgacggggacgcagtggcggagcatag

SEQ ID NO: 317628 - DNA, 1710 bp, Artificial Sequence
  derived and/or modified sequence
atgcagggcaccagactgcccgtgtgctgcgcctgccccgtgggcagcagcaagcccgccgaggccgagaaggagaaggtgagaagaggccaccccaccgtgcacagcgagaccaagtacgtggagctgatcgtgatcaacgaccaccagctgttcgagcagatgagacagagcgtggtgctgaccagcaacttcgccaagagcgtggtgaacctggccgacgtgatctacaaggagcagctgaacaccagaatcgtgctggtggccatggagacctgggccgacggcgacaagatccaggtgcaggacgacctgctggagaccctggccagactgatggtgtacagaagagagggcctgcccgagcccagcgacgccacccacctgttcagcggcagaaccttccagagcaccagcagcggcgccgcctacgtgggcggcatctgcagcctgagccacggcggcggcgtgaacgagtacggcaacatgggcgccatggccgtgaccctggcccagaccctgggccagaacctgggcatgatgtggaacaagcacagaagcagcgccggcgactgcaagtgccccgacatctggctgggctgcatcatggaggacaccggcttctacctgcccagaaagttcagcagatgcagcatcgacgagtacaaccagttcctgcaggagggcggcggcagctgcctgttcaacaagcccctgaagctgctggacccccccgagtgcggcaacggcttcgtggaggccggcgaggagtgcgactgcggcagcgtgcaggagtgcagcagagccggcggcaactgctgcaagaagtgcaccctgacccacgacgccatgtgcagcgacggcctgtgctgcagaagatgcaagtacgagcccagaggcgtgagctgcagagaggccgtgaacgagtgcgacatcgccgagacctgcaccggcgacagcagccagtgcccccccaacctgcacaagctggacggctactactgcgaccacgagcagggcagatgctacggcggcagatgcaagaccagagacagacagtgccaggtgctgtggggccacgccgccgccgacagattctgctacgagaagctgaacgtggagggcaccgagagaggcagctgcggcagaaagggcagcggctgggtgcagtgcagcaagcaggacgtgctgtgcggcttcctgctgtgcgtgaacatcagcggcgcccccagactgggcgacctggtgggcgacatcagcagcgtgaccttctaccaccagggcaaggagctggactgcagaggcggccacgtgcagctggccgacggcagcgacctgagctacgtggaggacggcaccgcctgcggccccaacatgctgtgcctggaccacagatgcctgcccgccagcgccttcaacttcagcacctgccccggcagcggcgagagaagaatctgcagccaccacggcgtgtgcagcaacgagggcaagtgcatctgccagcccgactggaccggcaaggactgcagcatccacaaccccctgcccaccagcccccccaccggcgagaccgagagatacaagggccccagcggcaccaacatcatcatcggcagcatcgccggcgccgtgctggtggccgccatcgtgctgggcggcaccggctggggcttcaagaacatcagaagaggcagaagcggcggcgcctag

SEQ ID NO: 317629 - DNA, 2529 bp, Artificial Sequence
  derived and/or modified sequence
gctgctgcagccaccttttcctgcagtgctcggggtgacagccggtccggagcgcgggagggtaggggagcgggagaggagggaaggtgcgtccacccacctgtccccagctggccgggcccaccgcgtccctgcccctgccgccgaccggccagctctgcaggtcttgggacccaaggtcctgctggagctctgcgatgggggggcttaccccagctgggaggcccaggagcccctgaggtcacggaacccagccgtctggttagggagagctccgggggagaggtccgaaagcagcagctggacacaagggtccgccaggagccaccagggggcccgcctgtccatctggcccaggtgagtttcgtcatcccagccttcaactcaaacttcaccctggacctggagctgaaccaccacctcctctcctcgcaatacgtggagcgccacttcagccgggaggggacaacccagcacagcaccggggctggagaccactgctactaccaggggaagctccgggggaacccgcactccttcgccgccctctccacctgccaggggctgcatggggtcttctctgatgggaacttgacttacatcgtggagccccaagaggtggctggaccttggggagcccctcagggaccccttccccacctcatttaccggacccctctcctcccagatcccctcggatgcagggaaccaggctgcctgtttgctgtgcctgcccagtcggctcctccaaaccggccgaggctgagaaggaaaaggtccgccggggccaccctacagtgcacagtgaaaccaagtatgtggagctaattgtgatcaacgaccaccagctgttcgagcagatgcgacagtcggtggtcctcaccagcaactttgccaagtccgtggtgaacctggccgatgtgatatacaaggagcagctcaacactcgcatcgtcctggttgccatggaaacatgggcagatggggacaagatccaggtgcaggatgacctcctggagaccctggcccggctcatggtctaccgacgggagggtctgcctgagcccagtgatgccacccacctcttctcgggcaggaccttccagagcacgagcagcggggcagcctacgtggggggcatatgctccctgtcccacggcgggggtgtgaacgagtacggcaacatgggggcgatggccgtgacccttgcccagacgctgggacagaacctgggcatgatgtggaacaaacaccggagctcggcaggggactgcaagtgtccagacatctggctgggctgcatcatggaggacactgggttctacctgccccgcaagttctcgcgctgtagcatcgacgagtacaaccagtttctgcaggagggtggtggcagctgcctcttcaacaagcccctcaagctcctggaccccccagagtgcgggaacggcttcgtggaggcaggggaggagtgcgactgcggctcggtgcaggagtgcagccgcgcaggtggcaactgctgcaagaaatgcaccctgactcacgacgccatgtgcagcgacgggctctgctgtcgccgctgcaagtacgaaccacggggtgtgtcctgccgagaggccgtgaacgagtgcgacatcgcggagacctgcaccggggactctagccagtgcccgcctaacctgcacaagctggacggttactactgtgaccatgagcagggccgctgctacggaggtcgctgcaaaacccgggaccggcagtgccaggttctttggggccatgcggctgctgatcgcttctgctacgagaagctgaatgtggaggggacggagcgtgggagctgtgggcgcaagggatctggctgggtccagtgcagtaagcaggacgtgctgtgtggcttcctcctctgtgtcaacatctctggagctcctcggctaggggacctggtgggagacatcagtagtgtcaccttctaccaccagggcaaggagctggactgcaggggaggccacgtgcagctggcggacggctctgacctgagctatgtggaggatggcacagcctgcgggcctaacatgttgtgcctggaccatcgctgcctgccagcttctgccttcaacttcagcacctgccccggcagtggggagcgccggatttgctcccaccacggggtctgcagcaatgaagggaagtgcatctgtcagccagactggacaggcaaagactgcagtatccataaccccctgcccacgtccccacccacgggggagacggagagatataaaggtcccagcggcaccaacatcatcattggctccattgctggggctgtcctggttgcagccatcgtcctgggcggcacgggctggggatttaaaaacattcgccgaggaaggtccggaggggcctaagtgccaccctcctccctccaagcctggcacccaccgtctcggccctgaaccacgaggctgcccccatccagccacggagggaggcaccatgcaaatgtcttccaggtccaaacccttcaac

SEQ ID NO: 317630 - DNA, 7500 bp, Artificial Sequence
  derived and/or modified sequence
agctcatgggagtatgaaggagatggtaggaggctgctgcgtatgttcggacgagaggggctgggccgagaacccgctggtctactgcgatgggcacgcgtgcagcgtggccgtccaccaagcttgctatggcatcgttcaggtgccaacgggaccctggttctgccggaaatgtgaatctcaggagcgagcagccagggtgaggtgtgagctgtgcccacacaaagacggggcattgaagaggactgataatggaggctgggcacacgtggtgtgtgccctctacatccccgaggtgcaatttgccaacgtgctcaccatggagcccatcgtgctgcagtacgtgcctcatgatcgcttcaacaagacctgttacatctgcgaggagcagggccgggagagcaaggcggcctcgggagcctgcatgacctgtaaccgccatggatgtcgacaagctttccacgtcacctgtgcccaaatggcaggcttgctgtgtgaggaagaagtgctggaggtggacaacgtcaagtactgcggctactgcaaataccacttcagcaagatgaagacatcccggcacagcagcgggggaggcggaggaggcgctggaggaggaggtggcagcatggggggaggtggcagtggtttcatctctgggaggagaagccggtcagcctcaccatccacgcagcaggagaagcaccccacccaccacgagaggggccagaagaagagtcgaaaggacaaagaacgccttaagcagaagcacaagaagcggcctgagtcgccccccagcatcctcaccccgcccgtggtccccactgctgacaaggtctcctcctcggcttcctcttcctcccaccacgaggccagcacgcaggagacctctgagagcagcagggagtcaaaggggaaaaagtcttccagccatagcctgagtcataaagggaagaaactgagcagtgggaaaggtgtgagcagttttacctccgcctcctcttcttcctcctcctcttcctcctcctctggggggcccttccagcctgcagtctcgtccctgcagagctcccctgacttctctgcattccccaagctggagcagccagaggaggacaagtactccaagcccacagcccccgccccttcagcccctccttctccctcagctcccgagccccccaaggctgacctttttgagcagaaggtggtcttctctggctttgggcccatcatgcgcttctccaccaccacctccagctcaggccgggcccgggcgccctcccctggggactataagtctccccacgtcacggggtctggggcctcggcaggcacccacaaacggatgcccgcactgagtgccacccctgtgcctgctgatgagacccctgagacaggcctgaaggagaagaagcacaaagccagcaagaggagccgccatgggccaggccgtcccaagggcagccggaacaaggagggcactgggggcccagctgccccatccttgcccagtgcccagctggctggctttaccgccactgctgcctcacccttctctggaggttccctggtcagctccggcctgggaggtctgtcctcccgaacctttgggccttctgggagcttgcccagcttgagcctggagtcccccttactaggggcaggcatctacaccagtaataaggaccccatctcccacagtggcgggatgctgcgggctgtctgcagcacccctctctcctccagcctcctggggcccccagggacctcggccctgccccgcctcagccgctccccgttcaccagcaccctcccctcctcttctgcttctatctccaccactcaggtgttttctctggctggctctacctttagcctcccttctacccacatctttggaacccccatgggtgccgttaatcccctcctctcccaagctgagagcagccacacagagccagacctggaggactgcagcttccggtgtcgggggacctcccctcaggagagtctgtcttccatgtcccccatcagcagcctccccgcactcttcgaccagacagcctctgcaccctgtgggggcggccagttagacccggcggccccagggacgactaacatggagcagcttctggagaagcagggcgacggggaggccggcgtcaacatcgtggagatgctgaaggcgctgcacgcgctgcagaaggagaaccagcggctgcaagagcagatcctgagcctgacggccaaaaaggagcggctgcagattctcaacgtgcagctctctgtgcccttccctgccctgcctgctgccctgcctgccgccaacggccctgtccctgggccctatggcctgcctccccaagccggcagcagcgactccttgagcaccagcaagagccctccgggaaagagcagcctcggcctggacaactcgctgtccacttcttctgaggacccacactcaggctgcccgagccgcagcagctcgtcgctgtccttccacagcacgcccccaccgctgcccctcctccagcagagccctgccactctgcccctggccctgcctggggcccctgccccactcccgccccagccgcagaacgggttgggccgggcacccggggcagcggggctgggggccatgcccatggctgaggggctgttgggggggctggcaggcagtgggggcctgcccctcaatgggctccttggggggttgaatggggccgctgcccccaaccccgcaagcttgagccaggctggcggggcccccacgctgcagctgccaggctgtctcaacagccttacagagcagcagagacatctccttcagcagcaagagcagcagctccagcaactccagcagctcctggcctccccgcagctgaccccggaacaccagactgttgtctaccagatgatccagcagatccagcagaaacgggagctgcagcgcctgcagatggctgggggctcccagctgcccatggccagcctgctggcaggaagctccaccccgctgctgtctgcgggtacccctggcctgctgcccacagcgtctgctccacccctgctgcccgctggagccctagtggctccctcgcttggcaacaacacaagtctcatggccgcagcagctgcagctgcagcagtagcagcagcaggcggacctccagtcctcactgcccagaccaaccccttcctcagcctgtcgggagcagagggcagtggcggtggccccaaaggagggaccgctgacaaaggagcctcagccaaccaggaaaaaggctaaatccacccttacccctcctgacccccccaagtggagggaacagatcctggcctgaggggtcctagcctggagcaggcgcctgcgcccagaccctggagagccttgacccagagcctgtgctgaggtccagggagtgtggagagctcctggtgtcgaggactgagactgagaggggagccccctccatctggcccccttccctttccgcactgtccgctttgtgaggctcagaggaaggacagtctgcaagcccgcctaggaggtccatccccagcaaatgttttggaggtccccccagagagcagagtgggccatggcagaagtagggggttggttggacctgtcacatgaaatggatcagcacttgaatggggagaagtggagggagaggccctgggcctgtccctgcggggaaatcttttatggaagaagggctggacccactttacctgcagtttcttcccagctcgggcagatggcagaagggaccccttggactttttctcgccatccctccccccagcgcaggggcacaagctgagcttgtaaaagcccacagatgttgggggctggagaaggggcaggagagcatcacactcagccccagcctcctcaacctcttggggccccgtgatggggaggagagggcaggtgcggggaggctctggccttccttggtgccccgccctttgtttgcactattggacttaggagtgccgagggtggggagatggagctgcccgtctcagtgtgtgagtgtgtgtgtgcgtgcatgtgtgtgtgtgtgtgtgtgtgtgtgtgtgtctgtctgcctgtctctctcctcctggacccagggcagccaagggcagggataggcgcagtggtcagatgaagcagcgccagagaggggacctcccagctcttatttgcaccctccccacctcaccaactttggtccctctctgggggcatgaatggttaacaaacaccagagcagtactccaatattggagagtcgctgggggcacagggctttgaatcagggtagtatcctgccttccctcccctgaccccacatggtctcagggcccccttagggccccctaccccactgatagcttcctccttctctggcacaaggggagccccagggcttgggggagggcgtaaggtggggggaaatgccactgcttttagcaaaagcctccctcccagaattagccagcttgcctcctgcaccccacccccaccaaccaggggagccactaagctgactaacaactgtcccctcacccaccagctatttccccagggtagagtgggcaattctcaccttcaaagagtccccgcctgcccaggcctttggcacagaggctgagtggacagtcaggagagaggcgagaggcaaggcgaagcctgtgtccctgtttcagttgcactggggttggagcccagggtaggggtttccagcttccccaggctccggccttgtcagtctctttgcatgtgtggatttttctgtgtgtgtttctgtttgggtttttgttgttgggttttttttttttttttaataaagaaaagaagatgtgtatatttttggcaacgacagaaacgtagtgcagatatatttttgcctgtgctgctcaactgttttttttttctgatactgaaaataatattaatattcctgttgataagactttgtaagatgttagggagctgataatggaggggggtgggaatccttcaaaggcaatttcttaggcacttgcaagggcttgggggagggggaggcagttgtgatgacctcagaaatactcactttttattaatgctaaatatgttagaaagaaatgatagcattcagcattttattcttcttaatctattaagctgtgtaactccctgccccaaaccactgaaaagaaaagtaaccttcaggccaggcgcggtggctcacgcctgtaatcccaacactttgggaggctgaggcgggcggatcacttaaggtcaggagttcaagaccagcctggccaacatggtgaaaccccgtctctatcaaaaattagccgggcatggtggcacgtgcctgtaatcccagctacttgggaggctgaggcacgagaattgcttgaacccaggaggctgaggctgcagtgagccaagattgtgccactgcactccagcctgtgtgagagagtgagactctgtctcaaaagagaaaaaaaaagaaaagtaaccttcagagattcttagaagagttgctcattcacacccacgcccttgcccaaggctggcccacttagagcgaaacttaacttttgtctggatgggaagagaagtaagtctaccccgaggttgccatgttgaagagtgagaggtccaagtgattctgtgcattgaaaccaagacaccccacccagaacacttcttccctccctcagcccaaaccaaaggctggggttctcatctccaagtggctgttctccaactttcccaagccgcttgcattccccagactggactactgtggcggttaggttagatttgaagacggggcccaggctgggtatgaacgggtgcagccctcttctcctcttcccccccacatctctcatgagagaggtagtggcatttccttctcagggagcttcaatgggaaaggtctcgaaagcttcaggaggagcagaataccaacgcagggggatggctgtaacgatctcaccgtctcctaacctcagtcccttttttgagagtgaatggtggagggtgggaagggacccagatttgtagatctctttgtctgggggaggggaaggatgtggtttgcagagcggaagcagagtttggaaacgcatgagagcagagcttcgtgtgttcccaccctcagtgaggaggtgtgagtgggtgagcatgtggagttgggtgttcccaccctcagtgaggaggtgtgagtgggggtgcatatagaggcagtgcctgctgtggggtcacaactggtgcatgccagcgccaaagggacctgtctttaggggtcatttcagccagctcctcccatcacagatgacagctccaagcctagaaggggctcagtgacagggccaggacaagccctcaggactgtggcctcctggcccttggttcccctgccccacaacatggtctccacatggctggctggctggctgtccctgtgtgtgtgtgacacacggtgtgagtgcagggctgtgcccggggtgggagggtgtctatgtggcactgactgtcttagctcagagctggtggatcctctccatggacaatgacactttaaggattgtcttggtttgtttttcctatttgtggggtattttccccctcaggctcctgggtctgctgctgcctcaaggtgtcctgaccttgaggctgatgaggggacccctgcctgtttcccccatactgagttctagggaggtgctcaccccagactcttaggaagggtctagagaaatgagaggagcccaagccaggggccagctccgagaaagggtaacctccacgcttctctctcccaaattggaaatgaagacaggttttcaaaggcacaggctccccctgccagcttctaggatcttccttggtgtgcaatgggccagttaggggtaggcagcttgcacccagttctcctttatctcaacttattttcctggggagaggtgcctagagggattgaggtaacttcaactgggaattccaaggaaggtgggcaagtagccttggctctctcccaccatgtccatcaggattgagagtgtgtctagctcccgaccactttgtcttgacctactgaaaagttgggaactgaggggtgccttcattcccctttgttcactttctccagctcaacttgggacttgggtggtgggactggagacctcacccctgctcccgtcccgccccctttctatcccaacctgtttccatgtagcagacccttcctagggagcagggaggggaagccacagattgcaaacccaggggctcctttttcattctttctaaaaccttgatatcctcagcccaaaggcgatgcccccctgccacctccaagcctggaattgtgcataacccggatcttgtatctttgtataacggatgttatttgtacgaagggcagttcgtaaacagcacttgttcttttaataaaagaatgttttgcaaaaaaaaaaaaaaaaatccgaaga

SEQ ID NO: 317631 - DNA, 3282 bp, Artificial Sequence
  derived and/or modified sequence
atgaaagagatggtgggcggctgctgtgtttgcagtgatgagcgcggctgggcggaaaatccccttgtgtactgtgacgggcatgcctgttccgtggtggtgcatcaggcatgctacggtatcgtacaagtccctaccgggccctggttctgccgaaagtgcgaatctcaggagcgcgccgctcgtgtccgttgcgaactgtgcccgcacaaagacggagcattgaaacgtacagacaacggagggtgggcacacgtggtgtgcgcgttgtacatccctgaggtacagttcgcaaatgtccttaccatggagcccatagtgctccaatatgtccctcatgaccggtttaataaaacgtgctatatctgtgaagaacagggccgcgagagcaaagccgcctcaggtgcttgtatgacttgcaaccggcatggatgtagacaagcgtttcacgtgacatgtgctcagatggcgggtctgctttgcgaagaagaggtcctggaagtagacaacgttaagtactgtggctactgtaagtatcatttttccaaaatgaagacttctcgtcatagttccgggggtggcggcggcggtgcaggtggaggtggtgggagtatgggaggcggtggcagcggatttatctcaggtaggcgcagccggtcagccagcccctcgacacagcaggagaaacatccaacacatcacgaacgcggacagaagaaaagccgtaaggacaaggagagactcaagcagaagcacaagaaaagaccagaatccccacctagtatactgactccgccggtcgtgcctaccgcagacaaagtgagcagctctgcctcctcgtcctcccatcatgaagctagtacacaggaaactagtgagagctcccgcgaaagcaaggggaagaagtcatccagccactcgctgtctcataagggcaaaaagttaagttccgggaagggagtgagctcgtttacctccgcgtcgagcagttccagctctagctcaagttcctcagggggccctttccagccagccgtgagttcccttcagtcctctcctgatttttctgccttcccaaaactggagcagcctgaggaagacaaatactcgaagcccaccgcccctgccccctctgccccaccatccccatccgcgcccgagcctcctaaagccgacctgtttgaacagaaagtggtgttttctggatttggaccaattatgaggttctctacgacgacttctagcagcgggagagctagggctccttctcctggcgattacaagtcgcctcatgtgacgggttccggggcgagtgccggcactcataaacgaatgccagcgttgtcagctacgcccgtgcctgcagacgaaaccccggaaaccggcttaaaggagaagaagcacaaggcaagcaaaaggagtcggcatggcccaggtcgtcctaaaggatcgaggaacaaagaagggactggcggcccggccgccccatctctgcccagcgctcaactggctggattcaccgccaccgcggcgtcaccctttagcgggggaagccttgtgtcatccggactgggcggcctcagtagtcggaccttcgggccatcaggtagtcttccatctctgtccctggagagcccattactgggtgccggtatttacacctctaacaaagatcctattagccactctggaggcatgctgagggccgtatgcagcaccccactgtcctcatctctcctcggaccccctggcactagcgcactgccccggctgagcaggagcccctttacatctactctcccatctagtagtgccagtattagtactacccaggtgttcagcttagcaggctctaccttctcgttacccagcacccacatttttggcactcctatgggcgcagtcaacccgttgctgtcacaggctgaatcctctcataccgagccagacctggaagactgctcatttcggtgtagaggaacttcgccacaggagagcctgagttcaatgtcccccattagctctcttcccgccctctttgaccagacagctagtgccccctgcgggggagggcagcttgaccctgccgcccctgggacaaccaacatggaacagctgctcgaaaaacagggggacggggaggcaggggtcaatatcgtggaaatgctcaaggcactgcacgctcttcagaaggaaaatcagcgccttcaggagcaaattttgagcctgactgcgaagaaggaacgactgcagatcctgaatgtgcagctgtcagtacccttcccagcactccccgccgctctccctgcagcaaacggacctgttccaggaccttacgggttgccacctcaggccggttccagtgattctctgagcacaagcaagtctcctcctggtaaaagttctctgggactcgacaactccttaagcacttccagcgaggacccccattccgggtgtcctagccgcagctccagcagcttaagtttccactccacacccccaccgctgccgctcttgcagcaatctcccgcgacattacccctcgctcttccgggcgctccagcccccctgcctcctcaaccacagaacggactaggtcgcgcacccggtgcggccggacttggagccatgccaatggctgaaggcctgctcggcggcctagccgggagcgggggactgcctttaaacggtctgctgggtggcttaaatggcgctgccgccccaaaccccgctagcctgtcccaggccggcggtgccccgacactgcagctccccggttgcctcaacagcctcactgaacagcagcgtcatctgctgcagcaacaggaacaacagctgcagcagctgcagcaactcctggctagcccgcagctgacaccagagcaccagaccgtcgtgtatcagatgattcaacagatccagcagaaaagagaattgcagcggctgcagatggcaggtggtagccaactgcctatggcatctctgctggccggcagtagcactcctttgctgagcgcgggcacccctggcctgctcccgaccgcgtccgctccaccactgttgcccgccggcgcattagtcgcaccctctctcggcaataataccagccttatggccgctgccgctgccgccgcagcagtggcagccgcaggtggacctcccgttctgaccgcacagactaacccgttcctttctctatcgggcgccgagggatctggcggaggcccaaaggggggaaccgcagataaaggagcatctgcaaaccaggagaagggttag

SEQ ID NO: 317632 - DNA, 3282 bp, Artificial Sequence
  derived and/or modified sequence
atgaaggagatggtgggcggctgctgcgtgtgcagtgatgagcggggctgggccgagaaccccctggtgtactgtgatggccacgcctgcagcgtggtggtgcaccaggcctgctatggaattgtgcaggtgcccaccggcccctggttctgcaggaaatgtgagagccaggagcgggccgcccgggtgcgctgtgagctgtgcccccacaaggatggagccctgaagaggacagacaatggaggctgggcccacgtggtgtgtgccctgtacatccctgaggtgcagtttgccaacgtgctgaccatggagcccatcgtgctgcagtatgtgccccatgaccgcttcaacaagacctgctacatctgtgaggagcagggccgggagagcaaggccgccagcggggcctgcatgacctgcaacagacatggctgccggcaggccttccacgtgacctgtgcccagatggccggcctgctgtgtgaggaggaggtgctggaggtggacaacgtgaagtactgcggctactgcaagtaccacttcagcaagatgaagaccagccgccacagcagcggcggcggcggcggcggggccggcggcggcggcggctccatgggcggcggcggcagcggcttcatcagcggccgccgcagccgcagcgccagccccagcacccagcaggagaagcaccccacccaccacgagcggggccagaagaagagcaggaaggacaaggagcggctgaagcagaagcacaagaagaggcctgagagccccccatccatcctgaccccacctgtggtgcccacagctgacaaggtgagcagcagcgccagcagcagcagccaccacgaggccagcacccaggagaccagcgagagcagccgggagagcaagggcaagaagagcagcagccacagcctgagccacaagggcaagaagctgagcagtggaaaaggagtgtcctccttcaccagcgccagcagcagcagcagcagcagcagcagcagcagcggcggccccttccagcctgctgtgagcagcctgcagagcagcccagacttcagcgccttccccaagctggagcagcctgaggaggacaagtacagcaagcccacagccccagcccccagcgccccacccagccccagcgcccctgagccccccaaggctgacctgtttgagcagaaggtggtgttttctggcttcggccccatcatgaggttcagcaccaccaccagcagcagcggccgggcccgggcccccagccctggggactacaagagcccccacgtgactggaagtggggccagcgctggcacccacaagaggatgcctgccctgagcgccacccctgtgcctgcagatgagaccccagagaccggcctgaaggagaagaagcacaaggccagcaagaggagccgccacggccctggccggcccaagggcagcaggaacaaggagggcaccggcggccctgctgcccccagcctgcccagcgcccagctggccggcttcaccgccacagctgccagccccttcagcggcggcagcctggtgagcagcggcctgggcggcctgagcagcaggaccttcggccccagcggcagcctgcccagcctgagcctggagagccccctgctgggcgccggcatctacaccagcaacaaggaccccatcagccacagcggcggcatgctgcgggctgtgtgcagcacccccctgagcagcagcctgctgggccccccaggcaccagcgccctgccccggctgagccgcagccccttcaccagcaccctgcccagcagcagcgccagcatcagcaccacccaggtgttcagcctggccggcagcaccttcagcctgcccagcacccacatcttcggcacccccatgggcgctgtgaaccccctgctgagccaggccgagagcagccacacagagccagacctggaggactgcagcttccgctgccggggcaccagcccccaggagagcctgagctccatgagccccatcagcagcctgcctgccctgtttgaccagacagccagcgccccctgtggcggcggccagctggaccctgctgcccctggcaccaccaacatggagcagctgctggagaagcagggagatggagaggccggcgtgaacatcgtggagatgctgaaggccctgcacgccctgcagaaggagaaccagaggctgcaggagcagatcctgagcctgacagccaagaaggagcggctgcagatcctgaatgtgcagctgtctgtgcccttccctgccctgcctgctgccctgcctgctgccaacggccctgtgcccggcccctacggcctgcccccccaggccggcagcagtgacagcctgagcaccagcaagagccccccaggcaagagcagcctgggcctggacaacagcctgagcaccagcagcgaggacccccacagcggctgccccagccgcagcagcagcagcctgtccttccacagcaccccaccacccctgcccctgctgcagcagagccctgccaccctgcccctggccctgcccggggccccagcccccctgcccccccagccccagaatggcctgggccgggcccctggagctgctggcctgggcgccatgcccatggccgagggcctgctgggcggcctggccggcagcggcggcctgcccctgaatggcctgctgggcggcctgaatggagctgctgcccccaacccagccagcctgagccaggccggcggggcccccaccctgcagctgcccggctgcctgaacagcctgacagagcagcagaggcacctgctgcagcagcaggagcagcagctgcagcagctgcagcagctgctggccagcccccagctgaccccagagcaccagacagtggtgtaccagatgatccagcagatccagcagaagcgggagctgcagaggctgcagatggccggcggcagccagctgcccatggccagcctgctggccggcagcagcacccccctgctgtctgctggcaccccaggcctgctgcccacagccagcgccccacccctgctgcctgctggggccctggtggcccccagcctgggcaacaacaccagcctgatggctgctgctgctgctgctgctgctgtggccgctgctgggggcccccctgtgctgacagcccagaccaaccccttcctgagcctgagcggggctgagggcagcggcggcggccccaagggcggcacagctgacaagggggccagcgccaaccaggagaagggctag

SEQ ID NO: 317633 - DNA, 7578 bp, Artificial Sequence
  derived and/or modified sequence
gcgcgcggccccccgctccctccctcccccctgacccccgacccccgccggccggccccccgccccagccccggagggagctcatgggagtatgaaggagatggtaggaggctgctgcgtatgttcggacgagaggggctgggccgagaacccgctggtctactgcgatgggcacgcgtgcagcgtggtcgtccaccaagcttgctatggcatcgttcaggtgccaacgggaccctggttctgccggaaatgtgaatctcaggagcgagcagccagggtgaggtgtgagctgtgcccacacaaagacggggcattgaagaggactgataatggaggctgggcacacgtggtgtgtgccctctacatccccgaggtgcaatttgccaacgtgctcaccatggagcccatcgtgctgcagtacgtgcctcatgatcgcttcaacaagacctgttacatctgcgaggagcagggccgggagagcaaggcggcctcgggagcctgcatgacctgtaaccgccatggatgtcgacaagctttccacgtcacctgtgcccaaatggcaggcttgctgtgtgaggaagaagtgctggaggtggacaacgtcaagtactgcggctactgcaaataccacttcagcaagatgaagacatcccggcacagcagcgggggaggcggaggaggcgctggaggaggaggtggcagcatggggggaggtggcagtggtttcatctctgggaggagaagccggtcagcctcaccatccacgcagcaggagaagcaccccacccaccacgagaggggccagaagaagagtcgaaaggacaaagaacgccttaagcagaagcacaagaagcggcctgagtcgccccccagcatcctcaccccgcccgtggtccccactgctgacaaggtctcctcctcggcttcctcttcctcccaccacgaggccagcacgcaggagacctctgagagcagcagggagtcaaaggggaaaaagtcttccagccatagcctgagtcataaagggaagaaactgagcagtgggaaaggtgtgagcagttttacctccgcctcctcttcttcctcctcctcttcctcctcctctggggggcccttccagcctgcagtctcgtccctgcagagctcccctgacttctctgcattccccaagctggagcagccagaggaggacaagtactccaagcccacagcccccgccccttcagcccctccttctccctcagctcccgagccccccaaggctgacctttttgagcagaaggtggtcttctctggctttgggcccatcatgcgcttctccaccaccacctccagctcaggccgggcccgggcgccctcccctggggactataagtctccccacgtcacggggtctggggcctcggcaggcacccacaaacggatgcccgcactgagtgccacccctgtgcctgctgatgagacccctgagacaggcctgaaggagaagaagcacaaagccagcaagaggagccgccatgggccaggccgtcccaagggcagccggaacaaggagggcactgggggcccagctgccccatccttgcccagtgcccagctggctggctttaccgccactgctgcctcacccttctctggaggttccctggtcagctccggcctgggaggtctgtcctcccgaacctttgggccttctgggagcttgcccagcttgagcctggagtcccccttactaggggcaggcatctacaccagtaataaggaccccatctcccacagtggcgggatgctgcgggctgtctgcagcacccctctctcctccagcctcctggggcccccagggacctcggccctgccccgcctcagccgctccccgttcaccagcaccctcccctcctcttctgcttctatctccaccactcaggtgttttctctggctggctctacctttagcctcccttctacccacatctttggaacccccatgggtgccgttaatcccctcctctcccaagctgagagcagccacacagagccagacctggaggactgcagcttccggtgtcgggggacctcccctcaggagagtctgtcttccatgtcccccatcagcagcctccccgcactcttcgaccagacagcctctgcaccctgtgggggcggccagttagacccggcggccccagggacgactaacatggagcagcttctggagaagcagggcgacggggaggccggcgtcaacatcgtggagatgctgaaggcgctgcacgcgctgcagaaggagaaccagcggctgcaagagcagatcctgagcctgacggccaaaaaggagcggctgcagattctcaacgtgcagctctctgtgcccttccctgccctgcctgctgccctgcctgccgccaacggccctgtccctgggccctatggcctgcctccccaagccggcagcagcgactccttgagcaccagcaagagccctccgggaaagagcagcctcggcctggacaactcgctgtccacttcttctgaggacccacactcaggctgcccgagccgcagcagctcgtcgctgtccttccacagcacgcccccaccgctgcccctcctccagcagagccctgccactctgcccctggccctgcctggggcccctgccccactcccgccccagccgcagaacgggttgggccgggcacccggggcagcggggctgggggccatgcccatggctgaggggctgttgggggggctggcaggcagtgggggcctgcccctcaatgggctccttggggggttgaatggggccgctgcccccaaccccgcaagcttgagccaggctggcggggcccccacgctgcagctgccaggctgtctcaacagccttacagagcagcagagacatctccttcagcagcaagagcagcagctccagcaactccagcagctcctggcctccccgcagctgaccccggaacaccagactgttgtctaccagatgatccagcagatccagcagaaacgggagctgcagcgcctgcagatggctgggggctcccagctgcccatggccagcctgctggcaggaagctccaccccgctgctgtctgcgggtacccctggcctgctgcccacagcgtctgctccacccctgctgcccgctggagccctagtggctccctcgcttggcaacaacacaagtctcatggccgcagcagctgcagctgcagcagtagcagcagcaggcggacctccagtcctcactgcccagaccaaccccttcctcagcctgtcgggagcagagggcagtggcggtggccccaaaggagggaccgctgacaaaggagcctcagccaaccaggaaaaaggctaaatccacccttacccctcctgacccccccaagtggagggaacagatcctggcctgaggggtcctagcctggagcaggcgcctgcgcccagaccctggagagccttgacccagagcctgtgctgaggtccagggagtgtggagagctcctggtgtcgaggactgagactgagaggggagccccctccatctggcccccttccctttccgcactgtccgctttgtgaggctcagaggaaggacagtctgcaagcccgcctaggaggtccatccccagcaaatgttttggaggtccccccagagagcagagtgggccatggcagaagtagggggttggttggacctgtcacatgaaatggatcagcacttgaatggggagaagtggagggagaggccctgggcctgtccctgcggggaaatcttttatggaagaagggctggacccactttacctgcagtttcttcccagctcgggcagatggcagaagggaccccttggactttttctcgccatccctccccccagcgcaggggcacaagctgagcttgtaaaagcccacagatgttgggggctggagaaggggcaggagagcatcacactcagccccagcctcctcaacctcttggggccccgtgatggggaggagagggcaggtgcggggaggctctggccttccttggtgccccgccctttgtttgcactattggacttaggagtgccgagggtggggagatggagctgcccgtctcagtgtgtgagtgtgtgtgtgcgtgcatgtgtgtgtgtgtgtgtgtgtgtgtgtgtgtctgtctgcctgtctctctcctcctggacccagggcagccaagggcagggataggcgcagtggtcagatgaagcagcgccagagaggggacctcccagctcttatttgcaccctccccacctcaccaactttggtccctctctgggggcatgaatggttaacaaacaccagagcagtactccaatattggagagtcgctgggggcacagggctttgaatcagggtagtatcctgccttccctcccctgaccccacatggtctcagggcccccttagggccccctaccccactgatagcttcctccttctctggcacaaggggagccccagggcttgggggagggcgtaaggtggggggaaatgccactgcttttagcaaaagcctccctcccagaattagccagcttgcctcctgcaccccacccccaccaaccaggggagccactaagctgactaacaactgtcccctcacccaccagctatttccccagggtagagtgggcaattctcaccttcaaagagtccccgcctgcccaggcctttggcacagaggctgagtggacagtcaggagagaggcgagaggcaaggcgaagcctgtgtccctgtttcagttgcactggggttggagcccagggtaggggtttccagcttccccaggctccggccttgtcagtctctttgcatgtgtggatttttctgtgtgtgtttctgtttgggtttttgttgttgggttttttttttttttttaataaagaaaagaagatgtgtatatttttggcaacgacagaaacgtagtgcagatatatttttgcctgtgctgctcaactgttttttttttctgatactgaaaataatattaatattcctgttgataagactttgtaagatgttagggagctgataatggaggggggtgggaatccttcaaaggcaatttcttaggcacttgcaagggcttgggggagggggaggcagttgtgatgacctcagaaatactcactttttattaatgctaaatatgttagaaagaaatgatagcattcagcattttattcttcttaatctattaagctgtgtaactccctgccccaaaccactgaaaagaaaagtaaccttcaggccaggcgcggtggctcacgcctgtaatcccaacactttgggaggctgaggcgggcggatcacttaaggtcaggagttcaagaccagcctggccaacatggtgaaaccccgtctctatcaaaaattagccgggcatggtggcacgtgcctgtaatcccagctacttgggaggctgaggcacgagaattgcttgaacccaggaggctgaggctgcagtgagccaagattgtgccactgcactccagcctgtgtgagagagtgagactctgtctcaaaagagaaaaaaaaagaaaagtaaccttcagagattcttagaagagttgctcattcacacccacgcccttgcccaaggctggcccacttagagcgaaacttaacttttgtctggatgggaagagaagtaagtctaccccgaggttgccatgttgaagagtgagaggtccaagtgattctgtgcattgaaaccaagacaccccacccagaacacttcttccctccctcagcccaaaccaaaggctggggttctcatctccaagtggctgttctccaactttcccaagccgcttgcattccccagactggactactgtggcggttaggttagatttgaagacggggcccaggctgggtatgaacgggtgcagccctcttctcctcttcccccccacatctctcatgagagaggtagtggcatttccttctcagggagcttcaatgggaaaggtctcgaaagcttcaggaggagcagaataccaacgcagggggatggctgtaacgatctcaccgtctcctaacctcagtcccttttttgagagtgaatggtggagggtgggaagggacccagatttgtagatctctttgtctgggggaggggaaggatgtggtttgcagagcggaagcagagtttggaaacgcatgagagcagagcttcgtgtgttcccaccctcagtgaggaggtgtgagtgggtgagcatgtggagttgggtgttcccaccctcagtgaggaggtgtgagtgggggtgcatatagaggcagtgcctgctgtggggtcacaactggtgcatgccagcgccaaagggacctgtctttaggggtcatttcagccagctcctcccatcacagatgacagctccaagcctagaaggggctcagtgacagggccaggacaagccctcaggactgtggcctcctggcccttggttcccctgccccacaacatggtctccacatggctggctggctggctgtccctgtgtgtgtgtgacacacggtgtgagtgcagggctgtgcccggggtgggagggtgtctatgtggcactgactgtcttagctcagagctggtggatcctctccatggacaatgacactttaaggattgtcttggtttgtttttcctatttgtggggtattttccccctcaggctcctgggtctgctgctgcctcaaggtgtcctgaccttgaggctgatgaggggacccctgcctgtttcccccatactgagttctagggaggtgctcaccccagactcttaggaagggtctagagaaatgagaggagcccaagccaggggccagctccgagaaagggtaacctccacgcttctctctcccaaattggaaatgaagacaggttttcaaaggcacaggctccccctgccagcttctaggatcttccttggtgtgcaatgggccagttaggggtaggcagcttgcacccagttctcctttatctcaacttattttcctggggagaggtgcctagagggattgaggtaacttcaactgggaattccaaggaaggtgggcaagtagccttggctctctcccaccatgtccatcaggattgagagtgtgtctagctcccgaccactttgtcttgacctactgaaaagttgggaactgaggggtgccttcattcccctttgttcactttctccagctcaacttgggacttgggtggtgggactggagacctcacccctgctcccgtcccgccccctttctatcccaacctgtttccatgtagcagacccttcctagggagcagggaggggaagccacagattgcaaacccaggggctcctttttcattctttctaaaaccttgatatcctcagcccaaaggcgatgcccccctgccacctccaagcctggaattgtgcataacccggatcttgtatctttgtataacggatgttatttgtacgaagggcagttcgtaaacagcacttgttcttttaataaaagaatgttttgcaaaaaaaaaaaaaaaaatccgaaga

SEQ ID NO: 317634 - DNA, 3282 bp, Artificial Sequence
  derived and/or modified sequence
atgaaggagatggtgggcggctgctgcgtgtgcagcgacgagcggggctgggccgagaacccgctggtgtactgtgacggtcacgcctgtagcgtggtggtgcatcaggcctgctacgggatcgtccaggtacctaccggcccttggttttgtaggaagtgtgagtcccaggagcgagccgcccgggtccgctgtgaactctgtcctcacaaggatggagcactcaaacgaacggataacggagggtgggcccatgtggtctgcgcactctacatccccgaagtgcagtttgccaatgttctgacaatggagcccattgttctccagtacgtgcctcatgatagattcaataagacatgttatatttgtgaagagcaagggagggaatccaaggcggcatctggcgcttgcatgacatgtaatcgccatggctgccgacaagctttccatgttacgtgtgcccagatggccggtctgctttgcgaggaggaggtccttgaggtcgacaacgttaagtattgtgggtattgcaaataccacttctccaagatgaaaacctcaaggcactccagcggcggaggcggggggggggctgggggggggggcggctctatgggaggtggcggctctggctttatctcagggcggaggtctcgaagtgcctcaccatctacccaacaggaaaagcaccccacacaccatgaacgggggcaaaaaaagtctcggaaagacaaagagagacttaagcaaaaacacaagaaaagacccgaatctcccccgagcatccttacccccccagtcgttcctaccgctgataaagtgtccagctccgcttccagctcatcgcaccatgaagcctcaacacaggagacctcggaatcgtcgcgggaatcaaagggaaaaaagtctagcagccattccttaagccacaagggtaagaagctgtcttcaggtaaaggcgtctcttcattcacctccgccagttcatcttccagctctagtagctcttcatcaggcgggccttttcaacctgctgtgtcgagcttacagtcatctcctgacttctcagcatttcccaagctcgagcaacctgaggaagataagtattccaagcctaccgctcctgccccgtccgcacccccttctccctctgcaccggaaccgcctaaagccgacctatttgagcagaaagtggtcttcagtggcttcggccccatcatgcggtttagcaccacaacctcatcatctggacgcgcacgggcgccctctcccggtgattataaaagccctcacgttacaggctctggtgcttctgccggaacacacaaaagaatgccagcactgtcggctacaccagtcccggctgacgagacccctgaaaccgggctgaaagaaaagaaacataaggcctctaaaagaagcagacacggccctggccggccaaagggtagccgcaacaaggaggggaccggcggcccagccgcaccctctctgccgtctgctcaactggcaggctttactgccaccgcggcctcaccattctctgggggatccttagtgtcgagtggtctgggcggcttgtcttcccgcacattcggcccatcgggttccctcccctccctttcactggagtcaccgttgctcggtgcaggcatctacacctccaacaaggatcctatcagccatagcggcggcatgttgcgcgctgtgtgcagcaccccacttagcagcagtctgcttggccctccgggaacgtctgccctgccaaggctctctaggagcccctttacatccacacttccaagcagctcagcatccattagtacaacccaggtgttcagcctggctgggtccacattctctcttcccagcacccacatatttggtacccccatgggggcggtgaatcctttgttgtcacaagcagagtccagtcataccgaaccagatcttgaagactgctctttcaggtgtcgcgggacgtctccccaggaatctcttagctccatgagccccatttcctctctgccagccctcttcgaccagaccgcctcagcaccttgcggcgggggccagctcgatccggccgccccaggtactaccaatatggaacagctgttagagaaacagggggatggcgaagcaggtgtcaatatcgtggagatgctaaaagctctgcatgcgcttcagaaagaaaaccagcggttgcaggagcagatcctgtccctgaccgcaaagaaagagcgtctgcagattcttaatgtgcagcttagcgtcccctttccggccctccctgctgccttaccagcagccaatggcccagtgcccggtccttacggtctgcccccccaggcgggcagttccgattccctgtctacatccaagtcaccgccaggcaagtccagtctggggctggataatagcttatccacaagcagcgaagatcctcattccggctgtccatctagaagctctagctctctttcctttcattctacaccaccacccctgcccctgctgcagcagtccccggccactttacctctggccctgcccggggcccctgcccccctcccgcctcaaccgcagaatgggttaggacgcgctccgggagcagccggactgggggcaatgcccatggccgaggggctgcttggcggattggccggctccggcggcctgccattaaatggtctgctgggcggtctgaatggtgccgcggcacctaatccagccagcttaagtcaggccgggggtgcccccaccctccaactaccagggtgtctaaacagtctcaccgaacagcaaagacacttgcttcagcagcaggaacagcaactccaacagctgcagcagttgctcgcatccccacagctgacaccggagcaccaaacagttgtgtaccagatgatccaacagatccagcagaaacgcgagttgcagagacttcaaatggctggcggatctcagctgccaatggcaagcctgctcgctggctcaagtactcccttactgtccgccggaaccccggggctcctgcctacggcttctgctccgccactgcttcccgctggcgccctcgtcgctccctcactcggcaacaataccagtctcatggcagctgccgctgctgcagccgctgtagctgcagcagggggcccacccgtcttgactgctcagaccaacccgtttctatcgctgtccggtgcagaaggcagcggcggcggccccaagggggggacagctgacaagggcgccagtgctaaccaggaaaaggggtag

SEQ ID NO: 317635 - DNA, 3282 bp, Artificial Sequence
  derived and/or modified sequence
atgaaggagatggtgggcggatgttgcgtttgttctgacgaacggggatgggcggagaatccgctagtgtactgcgacggccacgcttgctctgtggttgttcaccaagcgtgttatgggattgttcaggtgccaacagggccatggttctgcagaaaatgtgagagccaggagcgggctgctcgggttaggtgtgagctgtgccctcataaggatggagctctgaagaggactgacaacggtggctgggcccacgtcgtgtgtgccctgtatattcccgaggtccaattcgctaacgtcctaactatggaaccaatcgttttacaatatgtcccacacgaccggttcaacaagacttgctacatttgtgaagaacaggggagggaaagtaaagcagccagcggcgcttgcatgacttgtaacagacatggctgccgccaggcattccatgtgacgtgtgcgcagatggccggactgttgtgtgaggaggaggtccttgaggtagacaatgtgaaatactgtggatattgcaaataccattttagcaagatgaagacatctcgccactcaagcggaggtggcggtggtggggcagggggtggtggcggatcgatgggaggaggcggatccggtttcattagcgggcgaaggtctcgctctgcatccccttcaacccagcaggaaaagcacccaacacaccacgagagagggcagaagaagagccggaaggataaggaaaggttgaagcaaaagcacaagaagcggcctgaatcccctccctccattcttaccccacccgtcgtacccaccgccgataaggtgagtagttccgcatccagtagttcccaccacgaagcaagcacacaggagaccagtgagtctagtcgcgaatctaagggcaaaaagagctcttctcattccttatcacacaaaggcaagaagttgtccagcggcaagggagtatcgagctttacctctgcgtcttcctcgagttcatcctcctcttccagcagtggagggccttttcagccagccgtgagctctctgcagagttcacctgatttttctgcatttccgaaactggagcaaccagaggaggacaaatatagtaagccaaccgcccctgctcctagcgctccacccagccctagcgcacccgagcctcctaaggccgatttgttcgagcagaaggtggttttttcaggattcggtccgatcatgcgctttagtaccaccacttcctcctccggtagggcacgtgccccatccccaggagattacaaaagccctcacgtgaccggtagcggggcttcggctggcacgcataaacggatgccagcactgtcagccactcctgtccctgcggacgagactccagaaactggattaaaagaaaagaagcacaaagcctcgaagcgttctcgacatgggccaggtagacctaagggatctcggaataaagaaggaaccggcggacctgcagcgccaagcctcccctctgctcagcttgctggtttcaccgcaacagctgcctctcctttttccggtggttcgctggtgtctagtggactcggaggcctgtccagcaggacttttgggccttcaggcagtcttccgtctctgtctttggagagtcctctgttaggagccggaatttatacaagcaataaggacccaatttctcactccgggggtatgctccgcgctgtgtgcagcacacccttaagttctagcctgctcgggcctcctggtactagcgccctccctagactcagcagatccccttttacttccaccctgccctcatccagtgctagcatcagcaccacccaagtcttttctcttgccggatctacattcagcctaccttcgacacatatcttcgggacacctatgggagctgtgaaccctctgctttcacaggcagagtctagtcatacagagcctgacttggaggattgttcttttcggtgtcggggtacaagtcctcaggaatccttgtctagtatgtcacccataagtagcctccccgcactctttgaccaaacggcaagtgccccatgcgggggtggccagctggatcctgccgctcctggcactacaaacatggagcagctgctggaaaaacaaggagacggcgaagctggggtcaacatagttgagatgctgaaagcgctgcatgctctgcaaaaggaaaaccagcgactgcaagagcaaattctctccctgactgcaaagaaggagcgcctccaaatccttaacgtgcagctgtcagttccgttcccagccttgccagccgctttgcccgctgcaaacggtccagtccccggaccctacgggctcccccctcaggcaggatctagtgatagcctgtcaacctctaagtctccccctggtaagagtagcttggggctcgacaatagcctgtctacaagtagtgaagacccacattcaggatgcccttctcgaagctccagtagtctgtcctttcatagcacacctccacctcttcctctgttgcagcaatctcctgccactttgcctctagccctcccaggagccccagcaccactgcccccacagccccagaatggattaggaagagcaccaggagccgctggactgggagccatgcctatggccgaggggttgttaggcggactcgcgggtagtgggggacttccccttaacggactgctaggaggtctgaacggggctgctgcaccgaacccagcctctctgtcgcaagctggaggagctcctaccctgcagttgcctggttgcctgaacagtcttacagaacagcaaaggcacctgctgcagcagcaggagcagcagctgcagcaacttcagcaactgctcgcttccccccagcttacacccgagcaccagacggtcgtgtaccagatgatccaacagatccagcaaaagcgtgagttgcagagactgcagatggctgggggatcccagctgccgatggccagtctgctcgctggctcgtccacgccccttctgagcgccggaacacctggactgttgcccacagcttcagcacctcccctgctgccagctggggctctggttgccccttcactcggcaataatacgagtctgatggccgcagcggctgccgcagcggctgttgctgctgcgggaggccctcctgttctgaccgcccagaccaatccttttctgagtttgtctggcgctgaaggcagcggcggagggcctaaaggtggaacggcagacaagggcgcatcagctaatcaagaaaaaggatag

SEQ ID NO: 317636 - DNA, 3282 bp, Artificial Sequence
  derived and/or modified sequence
atgaaggagatggtgggcggctgctgcgtgtgcagcgacgagagaggctgggccgagaaccccctggtgtactgcgacggccacgcctgcagcgtggtggtgcaccaggcctgctacggcatcgtgcaggtgcccaccggcccctggttctgcagaaagtgcgagagccaggagagagccgccagagtgagatgcgagctgtgcccccacaaggacggcgccctgaagagaaccgacaacggcggctgggcccacgtggtgtgcgccctgtacatccccgaggtgcagttcgccaacgtgctgaccatggagcccatcgtgctgcagtacgtgccccacgacagattcaacaagacctgctacatctgcgaggagcagggcagagagagcaaggccgccagcggcgcctgcatgacctgcaacagacacggctgcagacaggccttccacgtgacctgcgcccagatggccggcctgctgtgcgaggaggaggtgctggaggtggacaacgtgaagtactgcggctactgcaagtaccacttcagcaagatgaagaccagcagacacagcagcggcggcggcggcggcggcgccggcggcggcggcggcagcatgggcggcggcggcagcggcttcatcagcggcagaagaagcagaagcgccagccccagcacccagcaggagaagcaccccacccaccacgagagaggccagaagaagagcagaaaggacaaggagagactgaagcagaagcacaagaagagacccgagagcccccccagcatcctgaccccccccgtggtgcccaccgccgacaaggtgagcagcagcgccagcagcagcagccaccacgaggccagcacccaggagaccagcgagagcagcagagagagcaagggcaagaagagcagcagccacagcctgagccacaagggcaagaagctgagcagcggcaagggcgtgagcagcttcaccagcgccagcagcagcagcagcagcagcagcagcagcagcggcggccccttccagcccgccgtgagcagcctgcagagcagccccgacttcagcgccttccccaagctggagcagcccgaggaggacaagtacagcaagcccaccgcccccgcccccagcgccccccccagccccagcgcccccgagccccccaaggccgacctgttcgagcagaaggtggtgttcagcggcttcggccccatcatgagattcagcaccaccaccagcagcagcggcagagccagagcccccagccccggcgactacaagagcccccacgtgaccggcagcggcgccagcgccggcacccacaagagaatgcccgccctgagcgccacccccgtgcccgccgacgagacccccgagaccggcctgaaggagaagaagcacaaggccagcaagagaagcagacacggccccggcagacccaagggcagcagaaacaaggagggcaccggcggccccgccgcccccagcctgcccagcgcccagctggccggcttcaccgccaccgccgccagccccttcagcggcggcagcctggtgagcagcggcctgggcggcctgagcagcagaaccttcggccccagcggcagcctgcccagcctgagcctggagagccccctgctgggcgccggcatctacaccagcaacaaggaccccatcagccacagcggcggcatgctgagagccgtgtgcagcacccccctgagcagcagcctgctgggcccccccggcaccagcgccctgcccagactgagcagaagccccttcaccagcaccctgcccagcagcagcgccagcatcagcaccacccaggtgttcagcctggccggcagcaccttcagcctgcccagcacccacatcttcggcacccccatgggcgccgtgaaccccctgctgagccaggccgagagcagccacaccgagcccgacctggaggactgcagcttcagatgcagaggcaccagcccccaggagagcctgagcagcatgagccccatcagcagcctgcccgccctgttcgaccagaccgccagcgccccctgcggcggcggccagctggaccccgccgcccccggcaccaccaacatggagcagctgctggagaagcagggcgacggcgaggccggcgtgaacatcgtggagatgctgaaggccctgcacgccctgcagaaggagaaccagagactgcaggagcagatcctgagcctgaccgccaagaaggagagactgcagatcctgaacgtgcagctgagcgtgcccttccccgccctgcccgccgccctgcccgccgccaacggccccgtgcccggcccctacggcctgcccccccaggccggcagcagcgacagcctgagcaccagcaagagcccccccggcaagagcagcctgggcctggacaacagcctgagcaccagcagcgaggacccccacagcggctgccccagcagaagcagcagcagcctgagcttccacagcacccccccccccctgcccctgctgcagcagagccccgccaccctgcccctggccctgcccggcgcccccgcccccctgcccccccagccccagaacggcctgggcagagcccccggcgccgccggcctgggcgccatgcccatggccgagggcctgctgggcggcctggccggcagcggcggcctgcccctgaacggcctgctgggcggcctgaacggcgccgccgcccccaaccccgccagcctgagccaggccggcggcgcccccaccctgcagctgcccggctgcctgaacagcctgaccgagcagcagagacacctgctgcagcagcaggagcagcagctgcagcagctgcagcagctgctggccagcccccagctgacccccgagcaccagaccgtggtgtaccagatgatccagcagatccagcagaagagagagctgcagagactgcagatggccggcggcagccagctgcccatggccagcctgctggccggcagcagcacccccctgctgagcgccggcacccccggcctgctgcccaccgccagcgccccccccctgctgcccgccggcgccctggtggcccccagcctgggcaacaacaccagcctgatggccgccgccgccgccgccgccgccgtggccgccgccggcggcccccccgtgctgaccgcccagaccaaccccttcctgagcctgagcggcgccgagggcagcggcggcggccccaagggcggcaccgccgacaagggcgccagcgccaaccaggagaagggctag

SEQ ID NO: 317637 - DNA, 96 bp, Artificial Sequence
  derived and/or modified sequence
atgcctgtcgcggccacgaattcagagacggccatgcaacaagtccttgacaatctcggatcgctcccatcagctaccggagccgcagaactgtag

SEQ ID NO: 317638 - DNA, 456 bp, Artificial Sequence
  derived and/or modified sequence
atgccggtggcggcgaccaactcagaaactgctatgcagcaggtgctagacaatctgggctctcttccttcagcaaccggcgcagccgaattagacctcatctttcttagaggtatcatggagagtcccatcgtaagatctctagcaaaggcccacgaaagattggaggaaaccaagcttgaagccgtgagggataacaacttagaactagtgcaagagatcctccgagacctggctcacgttgctgagcagtcttccaccgccgcagaactggcccacatcctgcaagagcctcattttcagagtctgcttgaaacccacgactcagtggcgtctaagacttacgaaacgccccctccctcccccgggcttgatcccaccttttctaatcaacccgtgccacctgatgctgtgcgaatggttggcatccgtaaaacagctggggagcatctgtag

SEQ ID NO: 317639 - DNA, 381 bp, Artificial Sequence
  derived and/or modified sequence
atgcccgtggctgcaactaacagcgagacagccatgcaacaagttctagataacctaggcagcctgccctcagccaccggagcagccgaactggaccttatcttcctgaggggaatcatggagtctccgattgtccggagcctcgctaaggcacacgaaagactcgaggagaccaaactggaggccgtgcgagataacaacctggagctcgtgcaggagattctgcgcgacttggcgcatgttgcggagcagagctcaaccgctgctgagttagcccatattcttcaggaacctcattttcagtcactcttagagactcacgacagcgtggcaagcaagacttacgagacgcctcccccctcgccaggccttgatccgtag

SEQ ID NO: 317640 - DNA, 222 bp, Artificial Sequence
  derived and/or modified sequence
atgccagtggcagccactaatagtgaaacggctatgcagcaggtccttgacaacctcgggtctttgccaagtgctaccggtgcagccgaactcgatctgattttccttcggggaattatggagtccccaattgtgcggtcactggctaaagcacacgaacggcttgaggagacaaaactggaggcggtgcgggacaacaacttagaactggtccaagaatag

SEQ ID NO: 317641 - DNA, 447 bp, Artificial Sequence
  derived and/or modified sequence
atgcccgtcgccgcaacaaacagcgagactgctatgcagcaagtgctcgacaacttgggttccctgccttcagctaccggcgctgcagaacttgacctcatttttcttcgaggtataatggagtctcccatagtcaggtctctcgcaaaagcacatgagagactggaagagaccaagctggaggctgttagagataacaacctggagcttgtgcaggagattctgagggacctagcacacgtggccgagcagagctcaacagcagctgaactggcccacatactccaggaaccacatttccagtccttgcttgagacacatgattcagtggcatcaaagacgtacgaaactcctccccctagccctggattggaccctacctttagtaaccaaccagtgccaccagatgctgtacggatggttggcatcaggaagactgcaggttag

SEQ ID NO: 317642 - DNA, 96 bp, Artificial Sequence
  derived and/or modified sequence
atgcctgtggccgccaccaacagcgagacagccatgcagcaggtgctggacaacctgggcagcctgcccagcgccaccggggctgctgagctgtag

SEQ ID NO: 317643 - DNA, 456 bp, Artificial Sequence
  derived and/or modified sequence
atgcctgtggccgccaccaacagcgagacagccatgcagcaggtgctggacaacctgggcagcctgcccagcgccaccggggctgctgagctggacctgatcttcctgcggggcatcatggagagccccatcgtgcgcagcctggccaaggcccacgagcggctggaggagaccaagctggaggccgtgcgggacaacaacctggagctggtgcaggagatcctgcgggacctggcccacgtggccgagcagagcagcacagctgctgagctggcccacatcctgcaggagccccacttccagagcctgctggagacccatgattctgtggccagcaagacctatgagaccccaccacccagccctggcctggaccccaccttcagcaaccagcctgtgcccccagatgctgtgaggatggtgggcatcaggaagacagctggggagcacctgtag

SEQ ID NO: 317644 - DNA, 381 bp, Artificial Sequence
  derived and/or modified sequence
atgcctgtggccgccaccaacagcgagacagccatgcagcaggtgctggacaacctgggcagcctgcccagcgccaccggggctgctgagctggacctgatcttcctgcggggcatcatggagagccccatcgtgcgcagcctggccaaggcccacgagcggctggaggagaccaagctggaggccgtgcgggacaacaacctggagctggtgcaggagatcctgcgggacctggcccacgtggccgagcagagcagcacagctgctgagctggcccacatcctgcaggagccccacttccagagcctgctggagacccatgattctgtggccagcaagacctatgagaccccaccacccagccctggcctggacccctag

SEQ ID NO: 317645 - DNA, 222 bp, Artificial Sequence
  derived and/or modified sequence
atgcctgtggccgccaccaacagcgagacagccatgcagcaggtgctggacaacctgggcagcctgcccagcgccaccggggctgctgagctggacctgatcttcctgcggggcatcatggagagccccatcgtgcgcagcctggccaaggcccacgagcggctggaggagaccaagctggaggccgtgcgggacaacaacctggagctggtgcaggagtag

SEQ ID NO: 317646 - DNA, 447 bp, Artificial Sequence
  derived and/or modified sequence
atgcctgtggccgccaccaacagcgagacagccatgcagcaggtgctggacaacctgggcagcctgcccagcgccaccggggctgctgagctggacctgatcttcctgcggggcatcatggagagccccatcgtgcgcagcctggccaaggcccacgagcggctggaggagaccaagctggaggccgtgcgggacaacaacctggagctggtgcaggagatcctgcgggacctggcccacgtggccgagcagagcagcacagctgctgagctggcccacatcctgcaggagccccacttccagagcctgctggagacccatgattctgtggccagcaagacctatgagaccccaccacccagccctggcctggaccccaccttcagcaaccagcctgtgcccccagatgctgtgaggatggtgggcatcaggaagacagctggatag

SEQ ID NO: 317647 - DNA, 545 bp, Artificial Sequence
  derived and/or modified sequence
ataaacgctgagcgcccggctgcgctggagccgcccggagctaggggcttcccggggcgcagggaaggaggacttctggagtcccttctctgaccctgtgagggagagcagcgccagccaggagaaggctccaggagagacgtttcagagcccttgcctccttcaccatgccggttgccgccaccaactctgaaactgccatgcagcaagtcctggacaacttgggatccctccccagtgccacgggggctgcagagctggacctgatcttccttcgaggcattatggaaagtcccatagtaagatccctggccaaggcccatgagaggctggaggagacgaagctggaggccgtgagagacaacaacctggagctggtgcaggagatcctgcgggacctggcgcacgtggctgagcagagcagcacagccgccgagctggcccacatcctccaggagccccacttccagtccctcctggagacgcacgactctgtggcctcaaagacctatgagacaccaccccccagccctggcctggaccct

SEQ ID NO: 317648 - DNA, 96 bp, Artificial Sequence
  derived and/or modified sequence
atgcccgtggccgccaccaacagcgagaccgccatgcagcaggtgctggacaacttgggcagccttcccagtgcaactggagccgccgagctttag

SEQ ID NO: 317649 - DNA, 456 bp, Artificial Sequence
  derived and/or modified sequence
atgcccgtggccgccaccaacagcgagaccgccatgcagcaggtgctagacaacttagggagtctcccatctgcaaccggtgcagccgagctcgatcttatcttcctgagggggatcatggaatcaccgattgtcagatccctggccaaggcacatgagcgactcgaggagaccaaattggaggctgtgagggataataacttagaactggttcaagaaattctacgagatttggctcatgtagccgaacagtccagtacagcggcagaacttgcccatatactgcaggagccccactttcagagcctgctggaaactcacgatagcgttgcctccaagacctacgagacccctcctccatcacccggactcgaccctacattttctaaccagcctgttccgccagatgctgttcggatggtcggcattcgcaagaccgcaggggaacacttgtag

SEQ ID NO: 317650 - DNA, 381 bp, Artificial Sequence
  derived and/or modified sequence
atgcccgtggccgccaccaacagcgagaccgccatgcagcaggtgctagataatcttggttcactcccgagtgccacgggagcagctgaactggatctgatttttctaagaggaatcatggagtcccctattgtccggtcattggcaaaagctcatgagaggttagaggagacaaaactggaagctgtgcgcgacaacaatttagagctggtgcaggaaattctccgcgacctggcacacgttgctgaacaatcgtctactgccgccgaactggcccacatactacaggaaccacattttcagagcttactcgagacacacgattccgtcgccagcaagacgtacgagacccccccacctagtcctggcttggacccctag

SEQ ID NO: 317651 - DNA, 222 bp, Artificial Sequence
  derived and/or modified sequence
atgcccgtggccgccaccaacagcgagaccgccatgcagcaggtgctagataacctgggttccctgccgagcgctaccggggctgctgaactcgatctcatctttctcaggggaattatggagtctccaatcgtccggagtttggcaaaggcccacgaacggctcgaggagactaaactggaggccgtgcgggataacaatttagagctcgttcaggaatag

SEQ ID NO: 317652 - DNA, 447 bp, Artificial Sequence
  derived and/or modified sequence
atgcccgtggccgccaccaacagcgagaccgccatgcagcaggtgttggacaatctcgggagtttgcctagcgcaacgggggctgcagaactagacctcatctttctgcgagggatcatggagtcgccaatcgttcgctccttggctaaagctcatgaaaggctggaagagaccaaactggaagctgtgagagacaacaatttagagctggtgcaggagatcctgagggatcttgctcacgttgctgagcagtcttccacagccgccgaactcgcgcacattcttcaggaaccacactttcagtcgctgctagagacccacgattctgtcgctagcaagacctacgagacaccgccaccgagtcccgggctggatcccacctttagtaaccagccggtgccgccggacgctgttagaatggtgggcataagaaagaccgccggatag

SEQ ID NO: 317653 - DNA, 96 bp, Artificial Sequence
  derived and/or modified sequence
atgccggtcgcggcaactaactccgagacagctatgcagcaggtgctggacaatctgggatcactcccgagtgccacgggggcagcagaactgtag

SEQ ID NO: 317654 - DNA, 456 bp, Artificial Sequence
  derived and/or modified sequence
atgcccgtggcagccaccaactctgagaccgctatgcaacaagtcctcgataatctgggaagcctccccagcgccaccggcgcagcagagttggatctgattttcctccgcggtatcatggaaagcccgatcgtgcgaagtctggcaaaagctcatgagcggctggaagagaccaaactggaggccgtgcgggacaacaatctggagcttgtgcaagagatcctgcgcgacctggcccatgttgctgagcagagttccactgcagcagaactcgcccacatactgcaggaaccacactttcagtcacttctggagactcacgacagtgtggcctcgaaaacttatgagacgccgccaccgtctccaggactcgatcccacgttctctaaccagcctgtgccaccagatgctgtgaggatggtgggtatacgcaaaaccgctggcgaacacctgtag

SEQ ID NO: 317655 - DNA, 381 bp, Artificial Sequence
  derived and/or modified sequence
atgcctgtcgccgcaactaatagcgaaacagccatgcagcaagtactggacaatctggggtccctcccatccgctaccggcgctgccgagctcgacctgatcttcctgcgcggaataatggaatcaccaattgtccgcagtctggcaaaagcacatgaaaggctcgaggagaccaagcttgaggctgtccgcgacaacaatctggaattagtccaagagatcttgcgggacttggcccacgttgccgaacagtcttctaccgccgcagaattggcccacattctgcaggaaccccattttcagtccctcctggaaactcacgacagcgtggcaagtaagacctacgagacccctccgccatccccgggactggatccgtag

SEQ ID NO: 317656 - DNA, 222 bp, Artificial Sequence
  derived and/or modified sequence
atgcctgtcgcggctaccaacagcgaaaccgccatgcagcaggtattggataaccttggtagcctacctagtgctacaggggctgcagaactggatttaatttttcttaggggcatcatggagtctcctatcgttcggtcactcgcgaaggcccatgaaagactcgaagaaaccaagctggaggctgtgagggataacaatctggaactagtgcaagagtag

SEQ ID NO: 317657 - DNA, 447 bp, Artificial Sequence
  derived and/or modified sequence
atgccagtggctgctaccaattctgaaacggcgatgcagcaggtgctggataatctgggcagtctgcctagtgctacaggtgcggcagaactggatctgatcttcctcagggggatcatggaatcccccatcgttaggtctctagctaaagctcacgaaaggttggaggaaaccaagcttgaggctgtgagagataacaacctggaacttgtccaggagatcctcagagatctggcccacgtcgccgagcagagctccaccgcggctgaactcgcccatatcctgcaggagccgcattttcagtcccttctggaaacacacgattctgtggcctccaagacgtacgagactccccctccctcgcccggactagaccccactttctcgaaccaaccagtgcctcccgatgcagtccgaatggtcggtattcgtaaaaccgcaggttag

SEQ ID NO: 317658 - DNA, 96 bp, Artificial Sequence
  derived and/or modified sequence
atgcccgtggccgccaccaacagcgagaccgccatgcagcaggtgctggacaacctgggcagcctgcccagcgccaccggcgccgccgagctgtag

SEQ ID NO: 317659 - DNA, 456 bp, Artificial Sequence
  derived and/or modified sequence
atgcccgtggccgccaccaacagcgagaccgccatgcagcaggtgctggacaacctgggcagcctgcccagcgccaccggcgccgccgagctggacctgatcttcctgagaggcatcatggagagccccatcgtgagaagcctggccaaggcccacgagagactggaggagaccaagctggaggccgtgagagacaacaacctggagctggtgcaggagatcctgagagacctggcccacgtggccgagcagagcagcaccgccgccgagctggcccacatcctgcaggagccccacttccagagcctgctggagacccacgacagcgtggccagcaagacctacgagacccccccccccagccccggcctggaccccaccttcagcaaccagcccgtgccccccgacgccgtgagaatggtgggcatcagaaagaccgccggcgagcacctgtag

SEQ ID NO: 317660 - DNA, 381 bp, Artificial Sequence
  derived and/or modified sequence
atgcccgtggccgccaccaacagcgagaccgccatgcagcaggtgctggacaacctgggcagcctgcccagcgccaccggcgccgccgagctggacctgatcttcctgagaggcatcatggagagccccatcgtgagaagcctggccaaggcccacgagagactggaggagaccaagctggaggccgtgagagacaacaacctggagctggtgcaggagatcctgagagacctggcccacgtggccgagcagagcagcaccgccgccgagctggcccacatcctgcaggagccccacttccagagcctgctggagacccacgacagcgtggccagcaagacctacgagacccccccccccagccccggcctggacccctag

SEQ ID NO: 317661 - DNA, 222 bp, Artificial Sequence
  derived and/or modified sequence
atgcccgtggccgccaccaacagcgagaccgccatgcagcaggtgctggacaacctgggcagcctgcccagcgccaccggcgccgccgagctggacctgatcttcctgagaggcatcatggagagccccatcgtgagaagcctggccaaggcccacgagagactggaggagaccaagctggaggccgtgagagacaacaacctggagctggtgcaggagtag

SEQ ID NO: 317662 - DNA, 447 bp, Artificial Sequence
  derived and/or modified sequence
atgcccgtggccgccaccaacagcgagaccgccatgcagcaggtgctggacaacctgggcagcctgcccagcgccaccggcgccgccgagctggacctgatcttcctgagaggcatcatggagagccccatcgtgagaagcctggccaaggcccacgagagactggaggagaccaagctggaggccgtgagagacaacaacctggagctggtgcaggagatcctgagagacctggcccacgtggccgagcagagcagcaccgccgccgagctggcccacatcctgcaggagccccacttccagagcctgctggagacccacgacagcgtggccagcaagacctacgagacccccccccccagccccggcctggaccccaccttcagcaaccagcccgtgccccccgacgccgtgagaatggtgggcatcagaaagaccgccggctag

SEQ ID NO: 317663 - protein, 388 aa, Artificial Sequence
  derived and/or modified sequence
MELQYPPPPPSPRICRERSGGDNASMPVLSEDSGLHETLALLTSQLRPDSNHKEEMGFLRDVFSEKSLSYLMKIHEKLRYYERQSPTPVLHSAVALAEDVMEELQAASVHSDERELLQLLSTPHLRAVLMVHDTVAQKNFDPVLPPLPDNIDEDFDEESVKIVRLVKNKEPLGATIRRDEHSGAVVVARIMRGGAADRSGLVHVGDELREVNGIAVLHKRPDEISQILAQSQGSITLKIIPATQEEDRLKESKVFMRALFHYNPREDRAIPCQEAGLPFQRRQVLEVVSQDDPTWWQAKRVGDTNLRAGLIPSKGFQERRLSYRRAYGTPISPQFSQPKQELSLPRHWAPTQLLPSCGAHCPGGKGTHTPTLIPILLSPSLQLEFIQY

SEQ ID NO: 317664 - protein, 610 aa, Artificial Sequence
  derived and/or modified sequence
MELQYPPPPPSPRICRERSGGDNASMPVLSEDSGLHETLALLTSQLRPDSNHKEEMGFLRDVFSEKSLSYLMKIHEKLRYYERQSPTPVLHSAVALAEDVMEELQAASVHSDERELLQLLSTPHLRAVLMVHDTVAQKNFDPVLPPLPDNIDEDFDEESVKIVRLVKNKEPLGATIRRDEHSGAVVVARIMRGGAADRSGLVHVGDELREVNGIAVLHKRPDEISQILAQSQGSITLKIIPATQEEDRLKESKVFMRALFHYNPREDRAIPCQEAGLPFQRRQVLEVVSQDDPTWWQAKRVGDTNLRAGLIPSKGFQERRLSYRRAAGTLPSPQSLRKPPYDQPCDKETCDCEGYLKGHYVAGLRRSFRLGCRERLGGSQEGKMSSGAESPELLTYEEVARYQHQPGERPRLVVLIGSLGARLHELKQKVVAENPQHFGVAVPHTTRPRKSHEKEGVEYHFVSKQAFEADLHHNKFLEHGEYKENLYGTSLEAIQAVMAKNKVCLVDVEPEALKQLRTSEFKPYIIFVKPAIQEKRKTPPMSPACEDTAAPFDEQQQEMAASAAFIDRHYGHLVDAVLVKEDLQGAYSQLKVVLEKLSKDTHWVPVSWVR

SEQ ID NO: 317665 - DNA, 1167 bp, Artificial Sequence
  derived and/or modified sequence
atggaacttcagtacccacccccaccgccgagccctcgcatttgccgggaaaggtctggaggtgataacgcatctatgccagttctgagcgaagactcaggactccatgaaaccctggcgctgctaacaagccaactgcgccctgacagcaaccataaagaggaaatgggctttctcagagacgtcttttcggagaaatccctctcgtacctgatgaaaattcacgaaaagctccgttactatgagcggcaatcccctacaccagtgctccatagcgccgtggctttggccgaagatgttatggaggagctccaggcggcctcggttcattcagacgagcgtgaactgcttcagctattatcgaccccacatctacgggccgtactgatggtccacgatactgtagctcagaagaacttcgacccagttctacctcccctgcctgacaatatcgacgaagacttcgacgaagagtcagtaaaaatcgtgaggttagtgaaaaacaaagagcccttgggcgccactattagaagggacgaacactcaggcgcggttgtggtcgcacggatcatgcgtggcggtgcggccgatagaagtggactggtgcacgtgggcgacgaactacgcgaagtcaacgggatagcagtgctgcacaagcgaccggatgaaatctcccaaatcctggcccagtcgcaaggatccatcacccttaaaataattcccgccacgcaagaggaggaccgcttaaaagagtcgaaggtcttcatgagagctttatttcactataatcctagggaggatcgtgccataccctgccaagaggcaggacttccctttcagcggcggcaagtgttggaagtggtgagccaagatgaccccacctggtggcaggctaagcgcgttggcgacaccaacctaagagctgggcttatcccatctaaaggatttcaagagcgcagactcagctaccgtcgtgcctatggaactcccatttctccacagtttagccagcccaagcaagagctgtcgctgccaaggcattgggcgcccacccagcttttaccgtcatgtggagcccattgccccggaggaaagggcacccatacgccgaccctgatccccattctgctgagtcctagtctccaactcgaattcatccaatattag

SEQ ID NO: 317666 - DNA, 1833 bp, Artificial Sequence
  derived and/or modified sequence
atggaattgcagtacccccctccacctccctccccccgcatatgcagggaaaggtctggaggcgataacgcaagcatgccagttttgagcgaggacagcggcctgcacgagactctggccttactcacttcacaactaagaccagactctaatcataaggaagagatgggattcctgcgcgacgtgttctcagagaaatctctgtcttaccttatgaagattcatgaaaagctgagatactatgaaagacagagccccaccccggtgctgcactcagcggttgctctggccgaggatgtaatggaagaacttcaagctgcctccgtgcatagtgacgagcgtgagctgctgcagttgctgagcacccctcacctgagggccgtgcttatggtgcacgatacggtcgcccagaagaacttcgacccggtcctaccacccctcccagataatatagatgaagattttgatgaagagagcgttaaaatagtacggctagtgaagaataaggaacccttgggcgccactatccggcgcgatgaacactccggggctgtggtcgtagccaggatcatgcgaggcggcgccgccgaccgcagtgggctcgtgcacgtgggcgacgagcttcgcgaggtgaacggcatcgcggtcctccataaacggcctgacgaaatctctcagatcctcgcccaatcacagggatccatcacattaaagattattcctgctacacaggaagaagatcgcctcaaagaatcgaaggtctttatgcgggccctgttccactacaatccacgagaggatagggccataccttgtcaggaggccggtctccccttccagcggcggcaggtcttagaggtcgtgtcacaggacgacccgacatggtggcaagcgaaacgggttggagacaccaacctccgggcgggcctgattccctctaaaggatttcaggaacggcgactaagctacagaagggcagctggcactctgcctagtcctcagtcacttcggaaaccaccctacgatcagccctgcgataaagaaacgtgtgactgtgaggggtatctgaaaggccactatgtcgctgggctgcgaagaagctttaggctcggctgtagagagcgcctggggggttcacaagagggtaagatgagctccggggccgaatccccggagttgctgacttacgaagaagtggcgaggtatcagcaccaacccggcgagagacctcggctggtcgttctgatcggaagcctgggagcaagactgcatgaacttaagcagaaggtagtggccgagaacccccagcacttcggagtggccgttccccatacaacacggcctcgcaagagtcacgagaaggaaggagtggagtatcacttcgtctccaagcaggctttcgaggctgacctccaccacaacaagttcctagagcatggcgagtacaaggagaacctttacggtacttctcttgaagctattcaggctgtaatggctaagaacaaagtatgtctggtggacgtcgaaccagaggcactgaagcagcttcgaacctccgaatttaagccgtatattatcttcgtgaagccggccatccaggagaaacgaaagacgcccccaatgtcgccagcctgtgaggataccgcagcacctttcgacgaacagcagcaggaaatggccgcctctgccgctttcatcgatagacactacggccatctcgtagatgctgtgttagtaaaagaagacctgcagggggcatattctcaattgaaggtggtgctcgagaaactctcaaaagatactcattgggtgcccgtaagctgggtgagatag

SEQ ID NO: 317667 - DNA, 1167 bp, Artificial Sequence
  derived and/or modified sequence
atggagctgcagtacccacctcctccacccagcccccgcatctgccgggagaggtctggaggagacaatgcctccatgcctgtgctgtctgaagattctggcctgcacgagaccctggccctgctgaccagccagctgcggccagacagcaaccacaaggaggagatgggcttcctgagagatgtgttcagcgagaagagcctgagctacctgatgaagatccacgagaagctgcgctactatgagcggcagagccccacccctgtgctgcacagcgctgtggccctggccgaggatgtgatggaggagctgcaggccgcctctgtgcacagtgatgagcgggagctgctgcagctgctgagcaccccccacctgcgggctgtgctgatggtgcatgacacagtggcccagaagaactttgatcctgtgctgccccccctgcctgacaacattgatgaagattttgatgaggagagcgtgaagatcgtgcggctggtgaagaacaaggagcccctgggcgccaccatcagaagagatgagcacagcggggctgtggtggtggcccgcatcatgagaggaggagctgctgacagaagtggcctggtgcacgtgggagatgagctgcgggaggtgaatggaattgctgtgctgcacaagaggccagatgagatcagccagatcctggcccagagccagggcagcatcaccctgaagatcatcccagccacccaggaggaggaccggctgaaggagagcaaggtgttcatgagggccctcttccactacaacccccgggaggaccgggccatcccctgccaggaggccggcctgcccttccagaggcggcaggtgctggaggtggtgtcccaggatgaccccacctggtggcaggccaagagggtgggggacaccaacctgcgggccggcctcatccccagcaagggcttccaggagcggcggctgagctaccgccgggcctacggcacccccatcagcccccagttcagccagcccaagcaggagctgagcctgcccaggcactgggcccccacccagctgctgcccagctgtggggcccactgccctgggggcaagggcacccacacccccaccctcatccccatcctgctgagccccagcctgcagctggagttcatccagtactag

SEQ ID NO: 317668 - DNA, 1833 bp, Artificial Sequence
  derived and/or modified sequence
atggagctgcagtacccacctcctccacccagcccccgcatctgccgggagaggtctggaggagacaatgcctccatgcctgtgctgtctgaagattctggcctgcacgagaccctggccctgctgaccagccagctgcggccagacagcaaccacaaggaggagatgggcttcctgagagatgtgttcagcgagaagagcctgagctacctgatgaagatccacgagaagctgcgctactatgagcggcagagccccacccctgtgctgcacagcgctgtggccctggccgaggatgtgatggaggagctgcaggccgcctctgtgcacagtgatgagcgggagctgctgcagctgctgagcaccccccacctgcgggctgtgctgatggtgcatgacacagtggcccagaagaactttgatcctgtgctgccccccctgcctgacaacattgatgaagattttgatgaggagagcgtgaagatcgtgcggctggtgaagaacaaggagcccctgggcgccaccatcagaagagatgagcacagcggggctgtggtggtggcccgcatcatgagaggaggagctgctgacagaagtggcctggtgcacgtgggagatgagctgcgggaggtgaatggaattgctgtgctgcacaagaggccagatgagatcagccagatcctggcccagagccagggcagcatcaccctgaagatcatcccagccacccaggaggaggaccggctgaaggagagcaaggtgttcatgagggccctcttccactacaacccccgggaggaccgggccatcccctgccaggaggccggcctgcccttccagaggcggcaggtgctggaggtggtgtcccaggatgaccccacctggtggcaggccaagagggtgggggacaccaacctgcgggccggcctcatccccagcaagggcttccaggagcggcggctgagctaccgccgggctgctggcaccctgcccagcccccagagcctgaggaagccaccctatgaccagccctgtgacaaggagacctgtgactgtgagggctacctgaagggccactacgtggccggcctgcggcgctccttccggctgggctgccgggagcggctgggcggcagccaggagggcaagatgagcagcggggctgagagccctgagctgctgacctatgaggaggtggcccgctaccagcaccagcccggggagcggccccggctggtggtgctgattggcagcctgggcgcccggctgcacgagctgaagcagaaggtggtggccgagaacccccagcactttggagtggccgtgccccacaccacccggcccaggaagagccatgagaaggagggcgtggagtaccactttgtgtccaagcaggcctttgaagctgacctgcaccacaacaagttcctggagcacggggagtacaaggagaacctgtatggcaccagcctggaggccatccaggccgtgatggccaagaacaaggtgtgcctggtggatgtggagcctgaggccctgaagcagctgcggaccagcgagttcaagccctacatcatctttgtgaagccagccatccaggagaagaggaagaccccacccatgagccctgcctgtgaggacacagctgccccctttgatgagcagcagcaggagatggccgccagcgctgccttcatcgacagacactacggccacctggtggatgctgtgctggtgaaggaggacctgcagggcgcctacagccagctgaaggtggtgctggagaagctgagcaaggacacccactgggtgcctgtgtcctgggtgaggtag

SEQ ID NO: 317669 - DNA, 1434 bp, Artificial Sequence
  derived and/or modified sequence
actcgcgcggctcccgttcgcggagcacacatcccggcgcgacgaggttccttcggagagcgagcgggagtcggtgctcggcctcctgcggggagcagcccgaggcctggtctcagagaacacagtagatgtgtagtcagtttgttcaataaatatgcttgatggagcttcaatacccacctccacccccttctcccagaatctgcagggagaggtcgggaggtgacaacgccagcatgccagtgctatcggaggactctggtttgcatgaaaccctggccctgctgacctcccagctcagacctgactccaaccacaaggaggagatgggcttcctgagggatgttttcagtgaaaaaagcctcagttacttaatgaagattcatgagaagcttcgctattatgaaaggcaaagtccaaccccagttctgcacagcgctgtggccctcgctgaggacgtgatggaggagttgcaggccgcctccgtgcacagtgatgagagggagctgctccagctgctgtccaccccgcacctgagggctgtgctcatggtacatgacacggttgcccagaagaattttgaccccgttctcccgcctctgcctgacaatatcgatgaggattttgatgaggaatcggtgaagatcgtccgcttggtgaagaacaaggaacccctgggtgccaccatccggcgggacgagcactcaggggctgttgtggtggccaggatcatgcgaggaggcgcagcagacaggagcggcctggtccacgttggagatgagctccgagaagtgaacgggatcgcagtcctgcacaagcggcccgacgagatcagccagattctggcccagtcccagggatccatcaccctaaaaatcatcccagccacccaggaggaagatcgcttaaaggagagcaaggtgttcatgcgcgccctcttccactacaaccctcgggaggaccgggccatcccttgccaggaggcgggcctgcccttccagcgcaggcaggtcctggaggtggtgagccaggacgaccccacgtggtggcaggccaagcgagtcggggacaccaaccttcgagccggcctcatcccctccaaggggttccaggagagacgactaagctaccggagagcctatgggacccccatctctcctcagttctctcaacccaagcaggagctgagcctgcccaggcattgggcccccacccagcttttacccagctgtggggcacactgccctggcgggaaaggcacacacacccctacattaataccaattctattatcaccatcattgcaattggagtttattcaatattaacaccactaccacgcagtgaggggtgtttgcggctctccagagccccttttcacttgttttggtcagttttttcaaaggtcttagagataggcaaaaagtttttttt

SEQ ID NO: 317670 - DNA, 2182 bp, Artificial Sequence
  derived and/or modified sequence
ccagcggcggcccaggctctgggcactcgcgcggctcccgttcgcggagcacacatcccggcgcgacgaggttccttcggagagcgagcgggagtcggtgctcggcctcctgcggggagcagcccgaggaatctgcagggagaggtcgggaggtgacaacgccagcatgccagtgctatcggaggactctggtttgcatgaaaccctggccctgctgacctcccagctcagacctgactccaaccacaaggaggagatgggcttcctgagggatgttttcagtgaaaaaagcctcagttacttaatgaagattcatgagaagcttcgctattatgaaaggcaaagtccaaccccagttctgcacagcgctgtggccctcgctgaggacgtgatggaggagttgcaggccgcctccgtgcacagtgatgagagggagctgctccagctgctgtccaccccgcacctgagggctgtgctcatggtacatgacacggttgcccagaagaattttgaccccgttctcccgcctctgcctgacaatatcgatgaggattttgatgaggaatcggtgaagatcgtccgcttggtgaagaacaaggaacccctgggtgccaccatccggcgggacgagcactcaggggctgttgtggtggccaggatcatgcgaggaggcgcagcagacaggagcggcctggtccacgttggagatgagctccgagaagtgaacgggatcgcagtcctgcacaagcggcccgacgagatcagccagattctggcccagtcccagggatccatcaccctaaaaatcatcccagccacccaggaggaagatcgcttaaaggagagcaaggtgttcatgcgcgccctcttccactacaaccctcgggaggaccgggccatcccttgccaggaggcgggcctgcccttccagcgcaggcaggtcctggaggtggtgagccaggacgaccccacgtggtggcaggccaagcgagtcggggacaccaaccttcgagccggcctcatcccctccaaggggttccaggagagacgactaagctaccggagagccgcgggcaccctgccgagcccccagagcctcaggaagcccccctatgatcagccttgtgacaaagagacctgtgactgtgagggctacctcaaagggcactatgtggctggtcttcggaggagcttccggctgggctgtagggagagactgggtggctcgcaggaaggaaagatgtcctccggagctgagtctccggagctgctgacttacgaagaggtggccaggtaccaacaccagcccggagagcggccccgcctggtggttctgatcgggtctctgggagcccgactgcacgagctgaagcaaaaggtggtggctgagaacccacagcactttggcgtcgctgttccacataccaccaggccccgaaagagccatgagaaggaaggagtggaatatcactttgtgtctaagcaagcatttgaggccgacttacatcacaacaagttcctggaacatggtgaatataaggaaaatctgtatggaaccagcctggaggccattcaggctgttatggccaaaaacaaagtttgtttggtggatgtggagccagaagcactgaaacaactgaggacctcagaatttaaaccctatattatatttgtaaagcctgcaattcaggaaaaaagaaaaacgccacctatgtccccagcttgtgaggacacagcagccccatttgatgagcagcagcaagagatggccgcttctgccgccttcatagaccggcattacgggcacctggtagacgccgtgctggtgaaggaggatctccagggtgcctacagccagctcaaagtggtcttagagaagctgagcaaggacactcactgggtacctgttagttgggtcaggtaactttatcccagaacatccaagctggacgggaccttgaagatcatctagtccagactccctcattttaccatcaaggaatctcaagcgcagagagggagagaattctccacaaattccatcatcgagaagagtataagtgggaagtcttgtttgttgttggtttttgtctgttgtttttcactgcacctctttggatcatgatttgaaaggggcatatcagaaaacaacacatttcatttattaaagtatcacaggcaa

SEQ ID NO: 317671 - DNA, 2996 bp, Artificial Sequence
  derived and/or modified sequence
agcttccacgccgctgtttcttcatcaataaaatgggaacattcgcagtcatttctcaggactttgtgcagacaaaaagtttatcatagaaatcaccccacacaatgcttggcacatcgaggacactcagcacatcttagctttatttccttcctctctgaaaaaagtaagcagagttatttgttcccatcctctctgtccacagcctggtctcagagaacacagtagatgtgtagtcagtttgttcaataaatatgcttgatggagcttcaatacccacctccacccccttctcccagaatctgcagggagaggtcgggaggtgacaacgccagcatgccagtgctatcggaggactctggtttgcatgaaaccctggccctgctgacctcccagctcagacctgactccaaccacaaggaggagatgggcttcctgagggatgttttcagtgaaaaaagcctcagttacttaatgaagattcatgagaagcttcgctattatgaaaggcaaagtccaaccccagttctgcacagcgctgtggccctcgctgaggacgtgatggaggagttgcaggccgcctccgtgcacagtgatgagagggagctgctccagctgctgtccaccccgcacctgagggctgtgctcatggtacatgacacggttgcccagaagaattttgaccccgttctcccgcctctgcctgacaatatcgatgaggattttgatgaggaatcggtgaagatcgtccgcttggtgaagaacaaggaacccctgggtgccaccatccggcgggacgagcactcaggggctgttgtggtggccaggatcatgcgaggaggcgcagcagacaggagcggcctggtccacgttggagatgagctccgagaagtgaacgggatcgcagtcctgcacaagcggcccgacgagatcagccagattctggcccagtcccagggatccatcaccctaaaaatcatcccagccacccaggaggaagatcgcttaaaggagagcaaggtgttcatgcgcgccctcttccactacaaccctcgggaggaccgggccatcccttgccaggaggcgggcctgcccttccagcgcaggcaggtcctggaggtggtgagccaggacgaccccacgtggtggcaggccaagcgagtcggggacaccaaccttcgagccggcctcatcccctccaaggggttccaggagagacgactaagctaccggagagccgcgggcaccctgccgagcccccagagcctcaggaagcccccctatgatcagccttgtgacaaagagacctgtgactgtgagggctacctcaaagggcactatgtggctggtcttcggaggagcttccggctgggctgtagggagagactgggtggctcgcaggaaggaaagatgtcctccggagctgagtctccggagctgctgacttacgaagaggtggccaggtaccaacaccagcccggagagcggccccgcctggtggttctgatcgggtctctgggagcccgactgcacgagctgaagcaaaaggtggtggctgagaacccacagcactttggcgtcgctgttccacataccaccaggccccgaaagagccatgagaaggaaggagtggaatatcactttgtgtctaagcaagcatttgaggccgacttacatcacaacaagttcctggaacatggtgaatataaggaaaatctgtatggaaccagcctggaggccattcaggctgttatggccaaaaacaaagtttgtttggtggatgtggagccagaagcactgaaacaactgaggacctcagaatttaaaccctatattatatttgtaaagcctgcaattcaggaaaaaagaaaaacgccacctatgtccccagcttgtgaggacacagcagccccatttgatgagcagcagcaagagatggccgcttctgccgccttcatagaccggcattacgggcacctggtagacgccgtgctggtgaaggaggatctccagggtgcctacagccagctcaaagtggtcttagagaagctgagcaaggacactcactgggtacctgttagttgggtcaggtaactttatcccagaacatccaagctggacgggaccttgaagatcatctagtccagactccctcattttaccatcaaggaatctcaagcgcagagagggagagaattctccacaaattccatcatcgagaagagtataagtgggaagtcttgtttgttgttggtttttgtctgttgtttttcactgcacctctttggatcatgatttgaaaggggcatatcagaaaacaacacatttcatttattaaagtatcacaggcaagctgaccctgattctttgtaccaaagttaagtagccactgtcttttgtgggtggtagtggttaatttatacagtactgattcgcagaatgtttaagctttttaaacatagtgacgcttagtagtttttttggaagctaacttgttttatccaaggggattttacatgtaactgaagttcccctgtcttcaagcactaaaacgttgatcttaaccttttttttgaagtgcttgcctggtaatagaaaacgggttctctgcctattttaaaatagtgaatatacgtaaattttctctggaaggctgaggcacacttcaccatcaacatgaattactgtactatcctgtactgcagtggtgccttcagggactcgaggaatgtaaggttgcctttcccctttctaaataccctcagattcctaacatcgagcccatgctttgtttgatttgttctattccatccattgtcccttttgttactgacagttgccttggtcctagccagtccctgccatgagatcataggggttcccattgtgctagatcttgggaaaccagatgactctccctgtcaaaactatggctacgtcactgtaaaccatttctgtcaagaataaaagtatgtagacccagagtgtgggcctaa

SEQ ID NO: 317672 - DNA, 1167 bp, Artificial Sequence
  derived and/or modified sequence
atggagctgcagtaccccccccccccccccagcccccggatctgccgtgagagatccggcggagacaatgccagcatgcccgtgctcagtgaggatagcggtttgcatgagactcttgcgttgctgactagccagctgagaccagattcaaaccataaagaagagatgggatttttgcgcgatgtgtttagcgagaagtctctgagttacctcatgaaaatacatgaaaagctccgttactatgagaggcagagcccaacccccgtgctgcacagcgcggtggcacttgcagaggacgttatggaggagctgcaggcagccagcgtccacagcgacgaaagagagctgctgcagttactctccactccccacctgcgagctgtgctgatggtacacgacacagtcgctcaaaaaaacttcgacccggttctgccaccactacctgacaatattgacgaagacttcgacgaggaaagcgtcaagattgtcaggctggtcaagaacaaggaacccctgggagccacaatcagaagagatgagcactcgggtgccgtcgtggtggcccgcatcatgcgggggggcgcggctgaccgctcgggcctggtccacgttggcgatgagttgcgagaagttaacggtattgcagtgctccacaagaggccagacgaaatcagccagatcctggctcagagccaaggcagtattacgcttaaaatcattcccgccacacaggaggaagatcgcctgaaggagtccaaagtgttcatgcgagccctgttccactacaatccgagagaggatcgcgccatcccttgtcaggaggcaggcctgccttttcagcgaagacaggtgttggaagtggtgtcacaggacgaccccacctggtggcaggccaaacgggtgggagacacaaatctgcgagcaggcctcattccgtctaaggggtttcaggaacggcggctgtcctataggagagcttacggcacacccatctccccacagttctctcagcccaagcaagagctatcactgcctcgtcactgggccccgacacagctgctcccctcctgcggggcacactgtccggggggaaagggaactcacactccaacccttataccaatcctgctcagcccaagccttcagcttgagtttattcagtactag

SEQ ID NO: 317673 - DNA, 1833 bp, Artificial Sequence
  derived and/or modified sequence
atggagctgcagtaccccccccccccccccagcccccggatctgcagggaaagatccggtggggataacgctagtatgcccgtcctttccgaggactctggactccacgaaacgttagccctacttacctctcaacttcgacccgattctaatcataaagaagagatgggatttctgcgagacgtattctctgaaaaatcgttaagttacctcatgaaaattcacgagaaactgcgatattatgagagacaatctcccacacccgttctccactccgcagttgctctggcagaggatgtgatggaagaacttcaggctgcttcggtgcacagtgatgagcgcgagctcctccaactcttgtccactccccaccttcgtgctgtgttaatggtgcacgataccgtcgcccagaagaacttcgatccagttctcccccccctgccggacaacattgatgaggatttcgatgaagaatctgtcaagatagtgcgcctggtgaaaaacaaagaacccctgggagccaccattcgcagggacgaacactcgggcgctgttgtggttgcccggataatgcgtgggggcgccgccgacaggtctggcctggtgcatgtgggtgacgagctaagggaggtaaacggtatcgccgtcctccacaagcgcccagacgaaattagtcagattctggcgcaatctcagggctctataacattgaaaatcattccggctacacaggaggaggataggctgaaggaatctaaggtctttatgagagcattgtttcattataaccccagggaggatcgtgccattccatgccaggaagccggactgccgttccagcggaggcaggtcctcgaagtcgtatcacaggacgatcccacttggtggcaagccaaacgcgtgggggatacaaatctcagggctggactgatcccgagcaaaggctttcaggaaagacgacttagttaccgcagggcagccggcactcttccgagccctcagtctctccggaagcctccatatgaccaaccttgcgacaaggaaacgtgcgactgcgaaggatacctaaagggtcactatgtggccggactcaggaggtctttcaggttaggttgtcgcgaacgcctcggaggctcccaagaaggaaaaatgtcaagtggagcagagtcccccgagctcctaacctatgaggaggtcgcacggtatcagcaccagccgggcgaacggccaagactggtggtactgattgggagcctcggagcccggctccatgagttgaaacagaaggttgtcgccgagaatccacagcattttggtgttgcggtaccacacacaactagaccccggaaatcgcacgaaaaggagggagttgagtaccatttcgtgtctaagcaggcattcgaggcagacttgcatcacaacaagttcttggagcacggcgaatataaggagaacctctatggaacttcgctggaggcaatccaagctgtcatggccaaaaacaaggtgtgtcttgtggacgtggagccggaggcgctcaagcagcttcgaacgagtgaattcaagccctatatcatctttgtgaagccagcaatccaagagaaacgcaagactccccccatgtctcccgcctgtgaagatacagcagcccccttcgacgagcagcagcaggaaatggccgcatcagccgccttcatcgacaggcactatggccacctcgtggacgccgtgctggtgaaggaggacctccagggagcctactcccagctcaaagtggtccttgagaaacttagcaaggatactcactgggtgcctgtaagttgggtgcggtag

SEQ ID NO: 317674 - DNA, 1167 bp, Artificial Sequence
  derived and/or modified sequence
atggagctgcagtaccctccacccccaccttcccctaggatttgtagagaacggagtgggggagacaatgcatctatgcctgtcctttctgaggacagtggacttcatgagaccctagccctgctgacgagtcaattgagacctgactcaaatcataaggaagagatgggctttctgcgagatgtcttcagcgagaaatccctgtcatacctaatgaagatccacgagaagctaaggtactacgagagacagagtccaactcctgtcctgcattcagctgtcgccctggcagaggacgtgatggaggagctccaggctgcctcagtccactccgatgaacgagagttgcttcaactcttgagcacccctcacttacgagcggtcctgatggttcacgacacggtggctcagaaaaatttcgacccagtcctgcctcccctgcctgacaacattgatgaggattttgacgaggagagcgttaagatcgtgcggctggtgaagaacaaagagcctttgggtgcgacaattcggagggatgaacacagtggggcagtggtcgtggcccgaatcatgaggggcggagcggctgatagatccggattggtacacgtcggggacgaactgagagaggtcaacggaatcgccgtattgcacaagaggcccgacgagatctctcagatcctggcccagtcacaaggctccatcactcttaagatcattcccgctacacaagaagaagataggctcaaggagagcaaagtgttcatgcgcgctctgtttcactataaccccagggaggacagagccatcccatgccaggaggccggacttccattccaacgccgtcaagttttggaagtagtgtcccaggacgaccccacgtggtggcaggctaagcgcgtgggagacacaaaccttagagctggcctgatcccaagcaagggtttccaggagaggcgcttgtcctaccgcagagcatatggcacacctatctcccctcagttttctcaacccaaacaggaactttccctcccgaggcactgggctcccactcaactgctgccatcatgcggcgcacactgccccggaggaaaggggacgcacacacccacgctcattcccattctactgtcgccatcactgcaactggagttcatacagtattag

SEQ ID NO: 317675 - DNA, 1833 bp, Artificial Sequence
  derived and/or modified sequence
atggagctgcagtatcccccaccaccaccctcaccgcgaatttgtagagagagatcaggcggtgacaacgcttctatgcctgtgctaagcgaggacagcggtctacacgaaactctcgccttattgaccagccagctccgaccggattcgaaccataaggaagaaatgggctttctgcgagacgtctttagtgaaaagtcgttatcgtacttgatgaagatccatgagaaactgagatactacgaacgccagagcccaacacctgttttacactccgcggtagccctggcagaagacgtgatggaggaactacaggcagcctcagttcattccgacgaaagggagcttctacaactgttgagtactccacacctcagagcggtgctcatggtgcacgacactgtggcgcagaagaattttgatccagtactgccccctctgcccgacaacatcgacgaagattttgatgaggaatcggtgaaaattgtgcggcttgtaaagaataaggaacccctcggcgctaccattcgccgagatgaacacagcggagcagtagtggtggcacggatcatgcgaggcggtgctgctgatcgttccggcttagtccacgtgggagacgagctacgcgaagtcaatggtattgctgttcttcacaaacgccctgatgaaatctctcaaatcctggcacagtcccaaggctcaataacgctgaagattatccccgctacacaggaggaagaccgcctcaaggagtctaaagtgtttatgagggccttgtttcattataacccccgtgaggaccgcgctataccatgtcaggaagctggcctcccttttcagcgccgtcaggtgctggaagttgtaagtcaggacgacccgacatggtggcaggctaaaagggtcggggacaccaatctccgtgcaggactgatcccttccaaaggttttcaggagagacggctctcatacagaagggcagcgggtacgctgccgtcacctcaatctcttaggaagcctccttatgaccagccctgtgacaaggagacgtgcgattgcgaaggctaccttaagggtcactacgttgccggactccgcaggagtttccgtcttggttgcagagaacgcctaggtgggagccaagaaggaaaaatgtcaagcggagcagagagcccagaacttctgacatatgaggaggtggctcgataccagcaccaaccaggagagaggcccagactcgtggtgcttatcggtagcttaggcgcacgccttcatgaattgaaacagaaagtagtcgccgagaacccgcagcactttggggtggcagtgccacacactacacgcccaaggaagtcccacgagaaagaaggagtggagtatcattttgtcagcaagcaggccttcgaggcagacctccatcataacaagtttctggagcacggagagtacaaggagaatttgtatggcactagtctggaggctattcaggctgtgatggctaagaacaaagtgtgtctcgtagatgtggaaccagaagctttaaagcaacttcgcacttctgaattcaagccgtacattatatttgttaagccagcgatacaggagaaacgcaagactccaccaatgtcaccggcttgtgaagataccgccgcaccattcgacgaacagcaacaagaaatggccgctagtgcagctttcatcgatagacattatggccatctggtggacgcagtcctggttaaggaagatctgcagggggcttactcacaacttaaagtcgtcctcgagaagttgagtaaggatacacactgggtgcccgtgtcttgggtgcggtag

SEQ ID NO: 317676 - DNA, 1167 bp, Artificial Sequence
  derived and/or modified sequence
atggagctgcagtaccccccccccccccccagccccagaatctgcagagagagaagcggcggcgacaacgccagcatgcccgtgctgagcgaggacagcggcctgcacgagaccctggccctgctgaccagccagctgagacccgacagcaaccacaaggaggagatgggcttcctgagagacgtgttcagcgagaagagcctgagctacctgatgaagatccacgagaagctgagatactacgagagacagagccccacccccgtgctgcacagcgccgtggccctggccgaggacgtgatggaggagctgcaggccgccagcgtgcacagcgacgagagagagctgctgcagctgctgagcaccccccacctgagagccgtgctgatggtgcacgacaccgtggcccagaagaacttcgaccccgtgctgccccccctgcccgacaacatcgacgaggacttcgacgaggagagcgtgaagatcgtgagactggtgaagaacaaggagcccctgggcgccaccatcagaagagacgagcacagcggcgccgtggtggtggccagaatcatgagaggcggcgccgccgacagaagcggcctggtgcacgtgggcgacgagctgagagaggtgaacggcatcgccgtgctgcacaagagacccgacgagatcagccagatcctggcccagagccagggcagcatcaccctgaagatcatccccgccacccaggaggaggacagactgaaggagagcaaggtgttcatgagagccctgttccactacaaccccagagaggacagagccatcccctgccaggaggccggcctgcccttccagagaagacaggtgctggaggtggtgagccaggacgaccccacctggtggcaggccaagagagtgggcgacaccaacctgagagccggcctgatccccagcaagggcttccaggagagaagactgagctacagaagagcctacggcacccccatcagcccccagttcagccagcccaagcaggagctgagcctgcccagacactgggcccccacccagctgctgcccagctgcggcgcccactgccccggcggcaagggcacccacacccccaccctgatccccatcctgctgagccccagcctgcagctggagttcatccagtactag

SEQ ID NO: 317677 - DNA, 1833 bp, Artificial Sequence
  derived and/or modified sequence
atggagctgcagtaccccccccccccccccagccccagaatctgcagagagagaagcggcggcgacaacgccagcatgcccgtgctgagcgaggacagcggcctgcacgagaccctggccctgctgaccagccagctgagacccgacagcaaccacaaggaggagatgggcttcctgagagacgtgttcagcgagaagagcctgagctacctgatgaagatccacgagaagctgagatactacgagagacagagccccacccccgtgctgcacagcgccgtggccctggccgaggacgtgatggaggagctgcaggccgccagcgtgcacagcgacgagagagagctgctgcagctgctgagcaccccccacctgagagccgtgctgatggtgcacgacaccgtggcccagaagaacttcgaccccgtgctgccccccctgcccgacaacatcgacgaggacttcgacgaggagagcgtgaagatcgtgagactggtgaagaacaaggagcccctgggcgccaccatcagaagagacgagcacagcggcgccgtggtggtggccagaatcatgagaggcggcgccgccgacagaagcggcctggtgcacgtgggcgacgagctgagagaggtgaacggcatcgccgtgctgcacaagagacccgacgagatcagccagatcctggcccagagccagggcagcatcaccctgaagatcatccccgccacccaggaggaggacagactgaaggagagcaaggtgttcatgagagccctgttccactacaaccccagagaggacagagccatcccctgccaggaggccggcctgcccttccagagaagacaggtgctggaggtggtgagccaggacgaccccacctggtggcaggccaagagagtgggcgacaccaacctgagagccggcctgatccccagcaagggcttccaggagagaagactgagctacagaagagccgccggcaccctgcccagcccccagagcctgagaaagcccccctacgaccagccctgcgacaaggagacctgcgactgcgagggctacctgaagggccactacgtggccggcctgagaagaagcttcagactgggctgcagagagagactgggcggcagccaggagggcaagatgagcagcggcgccgagagccccgagctgctgacctacgaggaggtggccagataccagcaccagcccggcgagagacccagactggtggtgctgatcggcagcctgggcgccagactgcacgagctgaagcagaaggtggtggccgagaacccccagcacttcggcgtggccgtgccccacaccaccagacccagaaagagccacgagaaggagggcgtggagtaccacttcgtgagcaagcaggccttcgaggccgacctgcaccacaacaagttcctggagcacggcgagtacaaggagaacctgtacggcaccagcctggaggccatccaggccgtgatggccaagaacaaggtgtgcctggtggacgtggagcccgaggccctgaagcagctgagaaccagcgagttcaagccctacatcatcttcgtgaagcccgccatccaggagaagagaaagaccccccccatgagccccgcctgcgaggacaccgccgcccccttcgacgagcagcagcaggagatggccgccagcgccgccttcatcgacagacactacggccacctggtggacgccgtgctggtgaaggaggacctgcagggcgcctacagccagctgaaggtggtgctggagaagctgagcaaggacacccactgggtgcccgtgagctgggtgagatag

SEQ ID NO: 317678 - DNA, 4508 bp, Artificial Sequence
  derived and/or modified sequence
acagcgtcctgcgcgcatgcgcttcgcagcttctctcgccgccgcgcccccagctgctctggttacggttggtgtttgcgaattctctgcggcaccttcttcgctgaactccaccgtcagttccataggcgcgcgcccgcgtcacgtgggccgaggttccggcgcggctgctggccggcggctgagccgggagaaaggagctgcggccaccgttcgccctacttctgcgcctcggggcgggcgcgccggtaaaaatggcgaaatgggggtaggcggcgctggacctgaagagatggggcgcgcaggtggggcggttgtcagagccccctgacgtgggcgccgggcttttatcggcgatttgatctggcgacctcgggccggcgcctaagaggtcagactgcggagcctgcgggtcgccagcggccccgccgagagccggaggcaatggatgaacagagcgtggagagcattgctgaggttttccgatgtttcatttgtatggagaaattgcgggatgcacgcctgtgtcctcattgctccaaactgtgttgtttcagctgtattaggcgctggctgacagagcagagagctcaatgtcctcattgccgtgctccactccagctacgagaactagtaaattgtcgttgggcagaagaagtaacacaacagcttgatactcttcaactctgcagtctcaccaaacatgaagaaaatgaaaaggacaaatgtgaaaatcaccatgaaaaacttagtgtattttgctggacttgtaagaagtgtatctgccatcagtgtgcactttggggaggaatgcatggcggacatacctttaaacctttggcagaaatttatgagcaacacgtcactaaagtgaatgaagaggtagccaaacttcgtcggcgtctcatggaactgatcagcttagttcaagaagtggaaaggaatgtagaagctgtaagaaatgcaaaagatgagcgtgttcgggaaattaggaatgcagtggagatgatgattgcacggttagacacacagctgaagaataagcttataacactgatgggtcagaagacatctctaacccaagaaacagagcttttggaatccttacttcaggaggtggagcaccagttgcggtcttgtagtaagagtgagttgatatctaagagctcagagatccttatgatgtttcagcaagttcatcggaagcccatggcatcttttgttaccactcctgttccaccagactttaccagtgaattagtgccatcttacgattcagctacttttgttttagagaatttcagcactttgcgtcagagagcagatcctgtttacagtccacctcttcaagtttcaggactttgctggaggttaaaagtttacccagatggaaatggagttgtgcgaggttactacttatctgtgtttctggagctctcagctggcttgcctgaaacttctaaatatgaatatcgtgtagagatggttcaccagtcctgtaatgatcctacaaaaaatatcattcgagaatttgcatctgactttgaagttggagaatgctggggctataatagatttttccgtttggacttactcgcaaatgaaggatacttgaatccacaaaatgatacagtgattttaaggtttcaggtacgttcaccaactttctttcaaaaatcccgggaccagcattggtacattactcagttggaagctgcacagactagttatatccaacaaataaacaaccttaaagagagacttactattgagctgtctcgaactcagaagtcaagagatttgtcaccaccagataaccatcttagcccccaaaatgatgatgctctggagacacgagctaagaagtctgcatgctctgacatgcttctcgaaggtggtcctactacagcttctgtaagagaggccaaagaggatgaagaagatgaggagaagattcagaatgaagattatcatcacgagctttcagatggagatctggatctggatcttgtttatgaggatgaagtaaatcagctcgatggcagcagttcctctgctagttccacagcaacaagtaatacagaagaaaatgatattgatgaagaaactatgtctggagaaaatgatgtggaatataacaacatggaattagaagagggagaactcatggaagatgcagctgctgcaggacccgcaggtagtagccatggttatgtgggttccagtagtagaatatcaagaagaacacatttatgctccgctgctaccagtagtttactagacattgatccattaattttaatacatttgttggaccttaaggaccggagcagtatagaaaatttgtggggcttacagcctcgcccacctgcttcacttctgcagcccacagcatcatattctcgaaaagataaagaccaaaggaagcaacaggcaatgtggcgagtgccctctgatttaaagatgctaaaaagactcaaaactcaaatggccgaagttcgatgtatgaaaactgatgtaaagaatacactttcagaaataaaaagcagcagtgctgcttctggagacatgcagacaagccttttttctgctgaccaggcagctctggctgcatgtggaactgaaaactctggcagattgcaggatttgggaatggaactcctggcaaagtcatcagttgccaattgttacatacgaaactccacaaataagaagagtaattcgcccaagccagctcgatccagtgtagcaggtagtctatcacttcgaagagcagtggaccctggagaaaatagtcgttcaaagggagactgtcagactctgtctgaaggctccccaggaagctctcagtctgggagcaggcacagttctccccgagccttgatacatggcagtatcggtgatattctgccaaaaactgaagaccggcagtgtaaagctttggattcagatgctgttgtggttgcagttttcagtggcttgcctgcggttgagaaaaggaggaaaatggtcaccttgggggctaatgctaaaggaggtcatctggaaggactgcagatgactgatttggaaaataattctgaaactggagagttacagcctgtactacctgaaggagcttcagctgcccctgaagaaggaatgagtagcgacagtgacattgaatgtgacactgagaatgaggagcaggaagagcataccagtgtgggcgggtttcacgactccttcatggtcatgacacagcccccggatgaagatacacattccagttttcctgatggtgaacaaataggccctgaagatctcagcttcaatacagatgaaaatagtggaaggtaattgccaaatcaagagaactgacttgcaagctaccttgaccctgaattttgctgtagttggtgctcaaatttgtcatcagtcagataatcagatttggtcttatttcttcattatctcgacctgaaatagtaatttggaaactgttggaaggtggcacagtttagtctaagacagcagtagtacatgggaaaaacagtatgggaagagttctttgtaatgtaaggaaataacaatgtagttctctattaatttagcaaatttgtacattcacaaaaggcagtttgtctactacagcagaaggctggttaactgccagaaaatgtacctccaggccctgcatgccgtcagtaacccgcccggcattggtgctctactgtctttggctagagcttagttgtgtttaaataatcatctttatatttggggttttaattacagttccattagtgcctgtagattagtgaacagaaaattgctttggaagagattctgccctgtagacactatgtgaataactgaagtaacactagactgaatctcctttttggagtatgtatcttctctcacttgttcaagtacaggcacactgttcaaccgcatggtatctttctgttgtgtgacttctacaaatgtaattttaaatgaaattaagttaacatggattcattacgttcctggccctgtagacacgtgtaagattatttaaaattctttcatttttttctgcctcttactatacgactgtagtgcaacaaatattttaaagcccccttttcttctttattttcattagttgtacattgatttcagtgtcaacacatttaaagattcattcatgttgcacagtggcttacatgaacgtgaaactgtgatataaggttttctttcatactcataattagcccaaaacagttgccaaactttgccattgtgctcctgcatttgtgtttgagctgctatatatttgtggaaattacactgaaagttgactaagagactattgaaaaagcatgaataattaaatatacatgtgagagacatctcatctgctgtattttacttagtgaatattgttcactcttccgtgtctgatgtcttgctgaatgctgtgactcatagtttacttttgttcaaaatagtttgcactttttgttaataaaatcaacttg

SEQ ID NO: 317679 - DNA, 3616 bp, Artificial Sequence
  derived and/or modified sequence
acagcgtcctgcgcgcatgcgcttcgcagcttctctcgccgccgcgcccccagctgctctggttacggttggtgtttgcgaattctctgcggcaccttcttcgctgaactccaccgtcagttccataggcgcgcgcccgcgtcacgtgggccgaggttccggcgcggctgctggccggcggctgagccgggagaaaggagctgcggccaccgttcgccctacttctgcgcctcggggcgggcgcgccggtaaaaatggcgaaatgggggtaggcggcgctggacctgaagagatggggcgcgcaggtggggcggttgtcagagccccctgacgtgggcgccgggcttttatcggcgatttgatctggcgacctcgggccggcgcctaagaggtcagactgcggagcctgcgggtcgccagcggccccgccgagagccggaggcaatggatgaacagagcgtggagagcattgctgaggttttccgatgtttcatttgtatggagaaattgcgggatgcacgcctgtgtcctcattgctccaaactgtgttgtttcagctgtattaggcgctggctgacagagcagagagctcaatgtcctcattgccgtgctccactccagctacgagaactagtaaattgtcgttgggcagaagaagtaacacaacagcttgatactcttcaactctgcagtctcaccaaacatgaagaaaatgaaaaggacaaatgtgaaaatcaccatgaaaaacttagtgtattttgctggacttgtaagaagtgtatctgccatcagtgtgcactttggggaggaatgcatggcggacatacctttaaacctttggcagaaatttatgagcaacacgtcactaaagtgaatgaagaggtagccaaacttcgtcggcgtctcatggaactgatcagcttagttcaagaagtggaaaggaatgtagaagctgtaagaaatgcaaaagatgagcgtgttcgggaaattaggaatgcagtggagatgatgattgcacggttagacacacagctgaagaataagcttataacactgatgggtcagaagacatctctaacccaagaaacagagcttttggaatccttacttcaggaggtggagcaccagttgcggtcttgtagtaagagtgagttgatatctaagagctcagagatccttatgatgtttcagcaagttcatcggaagcccatggcatcttttgttaccactcctgttccaccagactttaccagtgaattagtgccatcttacgattcagctacttttgttttagagaatttcagcactttgcgtcagagagcagatcctgtttacagtccacctcttcaagtttcaggactttgctggaggttaaaagtttacccagatggaaatggagttgtgcgaggttactacttatctgtgtttctggagctctcagctggcttgcctgaaacttctaaatatgaatatcgtgtagagatggttcaccagtcctgtaatgatcctacaaaaaatatcattcgagaatttgcatctgactttgaagttggagaatgctggggctataatagatttttccgtttggacttactcgcaaatgaaggatacttgaatccacaaaatgatacagtgattttaaggtttcaggtacgttcaccaactttctttcaaaaatcccgggaccagcattggtacattactcagttggaagctgcacagactagttatatccaacaaataaacaaccttaaagagagacttactattgagctgtctcgaactcagaagtcaagagatttgtcaccaccagataaccatcttagcccccaaaatgatgatgctctggagacacgagctaagaagtctgcatgctctgacatgcttctcgaaggtggtcctactacagcttctgtaagagaggccaaagaggatgaagaagatgaggagaagattcagaatgaagattatcatcacgagctttcagatggagatctggatctggatcttgtttatgaggatgaagtaaatcagctcgatggcagcagttcctctgctagttccacagcaacaagtaatacagaagaaaatgatattgatgaagaaactatgtctggagaaaatgatgtggaatataacaacatggaattagaagagggagaactcatggaagatgcagctgctgcaggacccgcaggtagtagccatggttatgtgggttccagtagtagaatatcaagaagaacacatttatgctccgctgctaccagtagtttactagacattgatccattaattttaatacatttgttggaccttaaggaccggagcagtatagaaaatttgtggggcttacagcctcgcccacctgcttcacttctgcagcccacagcatcatattctcgaaaagataaagaccaaaggaagcaacaggcaatgtggcgagtgccctctgatttaaagatgctaaaaagactcaaaactcaaatggccgaagttcgatgtatgaaaactgatgtaaagaatacactttcagaaataaaaagcagcagtgctgcttctggagacatgcagacaagccttttttctgctgaccaggcagctctggctgcatgtggaactgaaaactctggcagattgcaggatttgggaatggaactcctggcaaagtcatcagttgccaattgttacatacgaaactccacaaataagaagagtaattcgcccaagccagctcgatccagtgtagcaggtagtctatcacttcgaagagcagtggaccctggagaaaatagtcgttcaaagggagactgtcagactctgtctgaaggctccccaggaagctctcagtctgggagcaggcacagttctccccgagccttgatacatggcagtatcggtgatattctgccaaaaactgaagaccggcagtgtaaagctttggattcagatgctgttgtggttgcagttttcagtggcttgcctgcggttgagaaaaggaggaaaatggtcaccttgggggctaatgctaaaggaggtcatctggaaggactgcagatgactgatttggaaaataattctgaaactggagagttacagcctgtactacctgaaggagcttcagctgcccctgaagaaggaatgagtagcgacagtgacattgaatgtgacactgagaatgaggagcaggaagagcataccagtgtgggcgggtttcacgactccttcatggtcatgacacagcccccggatgaagatacacattccagttttcctgatggtgaacaaataggccctgaagatctcagcttcaatacagatgaaaatagtggaagataatttgatttgaaactgacactgcacctgatgggttaacaagatctaggcttcagaaggtgacagatatgagtgaggaccatgtgtggggcaaagcctcagaatgatgaaaaggttccggcactatagttggggccatgttgactccttttcaaccatttgtcacagacgtgagaagaagaaatgacttcaaaatcaagagaaaacaaatactgaaagtctctacttacatccaaattttaaaaaataaaatctgtagattaacaatctgatcattgct

SEQ ID NO: 317680 - DNA, 4391 bp, Artificial Sequence
  derived and/or modified sequence
acagcgtcctgcgcgcatgcgcttcgcagcttctctcgccgccgcgcccccagctgctctggttacggttggtgtttgcgaattctctgcggcaccttcttcgctgaactccaccgtcagttccataggcgcgcgcccgcgtcacgtgggccgaggttccggcgcggctgctggccggcggctgagccgggagaaaggagctgcggccaccgttcgccctacttctgcgcctcggggcgggcgcgccggtaaaaatggcgaaatgggggtaggcggcgctggacctgaagagatggggcgcgcaggtggggcggttgtcagagccccctgacgtgggcgccgggcttttatcggcgatttgatctggcgacctcgggccggcgcctaagaggtcagactgcggagcctgcgggtcgccagcggccccgccgagagccggaggcaatggatgaacagagcgtggagagcattgctgaggttttccgatgtttcatttgtatggagaaattgcgggatgcacgcctgtgtcctcattgctccaaactgtgttgtttcagctgtattaggcgctggctgacagagcagagagctcaatgtcctcattgccgtgctccactccagctacgagaactagtaaattgtcgttgggcagaagaagtaacacaacagcttgatactcttcaactctgcagtctcaccaaacatgaagaaaatgaaaaggacaaatgtgaaaatcaccatgaaaaacttagtgtattttgctggacttgtaagaagtgtatctgccatcagtgtgcactttggggaggaatgcatggcggacatacctttaaacctttggcagaaatttatgagcaacacgtcactaaagtgaatgaagaggtagccaaacttcgtcggcgtctcatggaactgatcagcttagttcaagaagtggaaaggaatgtagaagctgtaagaaatgcaaaagatgagcgtgttcgggaaattaggaatgcagtggagatgatgattgcacggttagacacacagctgaagaataagcttataacactgatgggtcagaagacatctctaacccaagaaacagagcttttggaatccttacttcaggaggtggagcaccagttgcggtcttgtagtaagagtgagttgatatctaagagctcagagatccttatgatgtttcagcaagttcatcggaagcccatggcatcttttgttaccactcctgttccaccagactttaccagtgaattagtgccatcttacgattcagctacttttgttttagagaatttcagcactttgcgtcagagagcagatcctgtttacagtccacctcttcaagtttcaggactttgctggaggttaaaagtttacccagatggaaatggagttgtgcgaggttactacttatctgtgtttctggagctctcagctggcttgcctgaaacttctaaatatgaatatcgtgtagagatggttcaccagtcctgtaatgatcctacaaaaaatatcattcgagaatttgcatctgactttgaagttggagaatgctggggctataatagatttttccgtttggacttactcgcaaatgaaggatacttgaatccacaaaatgatacagtgattttaaggtttcaggtacgttcaccaactttctttcaaaaatcccgggaccagcattggtacattactcagttggaagctgcacagactagttatatccaacaaataaacaaccttaaagagagacttactattgagctgtctcgaactcagaagtcaagagatttgtcaccaccagataaccatcttagcccccaaaatgatgatgctctggagacacgagctaagaagtctgcatgctctgacatgcttctcgaaggtggtcctactacagcttctgtaagagaggccaaagaggatgaagaagatgaggagaagattcagaatgaagattatcatcacgagctttcagatggagatctggatctggatcttgtttatgaggatgaagtaaatcagctcgatggcagcagttcctctgctagttccacagcaacaagtaatacagaagaaaatgatattgatgaagaaactatgtctggagaaaatgatgtggaatataacaacatggaattagaagagggagaactcatggaagatgcagctgctgcaggacccgcaggtagtagccatggttatgtgggttccagtagtagaatatcaagaagaacacatttatgctccgctgctaccagtagtttactagacattgatccattaattttaatacatttgttggaccttaaggaccggagcagtatagaaaatttgtggggcttacagcctcgcccacctgcttcacttctgcagcccacagcatcatattctcgaaaagataaagaccaaaggaagcaacaggcaatgtggcgagtgccctctgatttaaagatgctaaaaagactcaaaactcaaatggccgaagttcgatgtatgaaaactgatgtaaagaatacactttcagaaataaaaagcagcagtgctgcttctggagacatgcagacaagccttttttctgctgaccaggcagctctggctgcatgtggaactgaaaactctggcagattgcaggatttgggaatggaactcctggcaaagtcatcagttgccaattgttacatacgaaactccacaaataagaagagtaattcgcccaagccagctcgatccagtgtagcaggtagtctatcacttcgaagagcagtggaccctggagaaaatagtcgttcaaagggagactgtcagactctgtctgaaggctccccaggaagctctcagtctgggagcaggcacagttctccccgagccttgatacatggcagtatcggtgatattctgccaaaaactgaagaccggcagtgtaaagctttggattcagatgctgttgtggttgcagttttcagtggcttgcctgcggttgagaaaaggaggaaaatggtcaccttgggggctaatgctaaaggaggtcatctggaaggactgcagatgactgatttggaaaataattctgaaactggagagttacagcctgtactacctgaaggagcttcagctgcccctgaagaagatacacattccagttttcctgatggtgaacaaataggccctgaagatctcagcttcaatacagatgaaaatagtggaaggtaattgccaaatcaagagaactgacttgcaagctaccttgaccctgaattttgctgtagttggtgctcaaatttgtcatcagtcagataatcagatttggtcttatttcttcattatctcgacctgaaatagtaatttggaaactgttggaaggtggcacagtttagtctaagacagcagtagtacatgggaaaaacagtatgggaagagttctttgtaatgtaaggaaataacaatgtagttctctattaatttagcaaatttgtacattcacaaaaggcagtttgtctactacagcagaaggctggttaactgccagaaaatgtacctccaggccctgcatgccgtcagtaacccgcccggcattggtgctctactgtctttggctagagcttagttgtgtttaaataatcatctttatatttggggttttaattacagttccattagtgcctgtagattagtgaacagaaaattgctttggaagagattctgccctgtagacactatgtgaataactgaagtaacactagactgaatctcctttttggagtatgtatcttctctcacttgttcaagtacaggcacactgttcaaccgcatggtatctttctgttgtgtgacttctacaaatgtaattttaaatgaaattaagttaacatggattcattacgttcctggccctgtagacacgtgtaagattatttaaaattctttcatttttttctgcctcttactatacgactgtagtgcaacaaatattttaaagcccccttttcttctttattttcattagttgtacattgatttcagtgtcaacacatttaaagattcattcatgttgcacagtggcttacatgaacgtgaaactgtgatataaggttttctttcatactcataattagcccaaaacagttgccaaactttgccattgtgctcctgcatttgtgtttgagctgctatatatttgtggaaattacactgaaagttgactaagagactattgaaaaagcatgaataattaaatatacatgtgagagacatctcatctgctgtattttacttagtgaatattgttcactcttccgtgtctgatgtcttgctgaatgctgtgactcatagtttacttttgttcaaaatagtttgcactttttgttaataaaatcaacttg

SEQ ID NO: 317681 - protein, 419 aa, Artificial Sequence
  derived and/or modified sequence
PQCCLHSRGMFPRLSPVDTEAVWLLQGWLFQHQPQFWGPAQIRAVLGAVPRGRLLVLDLFAESQPVYTRTASFQGQPFIWCMLHNFGGNHGLFGALEAVNGGPEAARLFPNSTMVGTGMAPEGISQNEVVYSLMAELGWRKDPVPDLAAWVTSFAARRYGVSHPDAGAAWRLLLRSVYNCSGEACRGHNRSPLVRRPSLQMNTSIWYNRSDVFEAWRLLLTSAPSLATSPAFRYDLLDLTRQAVQELVSLYYEEARSAYLSKELASLLRAGGVLAYELLPALDEVLASDSRFLLGSWLEQARAAAVSEAEADFYEQNSRYQLTLWGPEGNILDYANKQLAGLVANYYTPRWRLFLEALVDSVAQGIPFQQHQFDKNVFQLEQAFVLSKQRYPSQPRGDTVDLAKKIFLKYYPRWVAGSW

SEQ ID NO: 317682 - DNA, 1260 bp, Artificial Sequence
  derived and/or modified sequence
cctcaatgttgtctgcactcccgagggatgttcccacggctgagtccagttgatacagaggcagtatggctcctccaggggtggctttttcagcaccagccacaattttgggggccagcccagattagagccgtgctgggtgctgtcccaagaggccgactcctcgtgctagatctgtttgctgagtctcagcctgtctatactagaactgcttccttccaaggacagcccttcatctggtgtatgctgcacaactttggtggaaaccatggcctgttcggagcgctcgaggcagtaaacgggggaccagaggctgccaggctgtttcccaactccaccatggtagggacaggaatggcgcccgagggtatcagccagaatgaggtcgtctattccctcatggcagaactcgggtggagaaaagaccccgtgcctgatctggccgcctgggtcacctccttcgctgctcgaaggtacggcgtcagtcatcccgatgctggagccgcctggagactgctgctgcgctccgtgtataattgtagtggcgaagcttgccgcggtcacaacaggagtcctcttgtaagaaggccaagcctgcaaatgaacacaagcatttggtataacagaagtgatgtcttcgaagcctggcgcctcctactgactagtgccccctcgctggcgacatcaccggcctttagatacgacctccttgatctcactagacaagcagttcaggaactcgtgtctctgtactatgaggaggcccgaagcgcttacctgagcaaggagctagcatcgctgctacgcgcaggcggagtccttgcctacgagctgcttcccgcccttgacgaggtgttagcgtccgattcaagattcctgttgggctcctggctggagcaagcgcgcgcagctgccgtgagtgaagcggaggccgacttctatgaacagaattcgcgttaccaactaacattgtggggccccgaagggaacatcctcgactacgctaataaacagctggctgggctcgtggcaaattactataccccacgctggagactgtttctcgaggcattggtggactccgtggcacagggaatcccatttcagcaacatcagtttgacaagaatgtattccagctcgagcaagcatttgtgctatctaagcaaagatacccttcccagccccgaggcgacaccgtggatttggcaaagaagatcttcctgaagtactacccccgctgggtcgcgggaagctggtag

SEQ ID NO: 317683 - DNA, 1260 bp, Artificial Sequence
  derived and/or modified sequence
ccccagtgctgcctgcacagccggggcatgttcccccggctgagccctgtggacacagaagctgtgtggctgctgcagggctggctgttccagcaccagccccagttctggggccctgcccagatccgggctgtgctgggcgctgtgccccggggccgcctgctggtgctggacctgtttgctgagagccagcctgtgtacaccaggacagccagcttccagggccagcccttcatctggtgcatgctgcacaactttggaggcaaccacggcctgtttggagccctggaggccgtgaatggaggccctgaggccgcccggctcttccccaacagcaccatggtgggcaccggcatggcccctgagggcatcagccagaatgaggtggtgtacagcctgatggccgagctgggctggaggaaggaccctgtgcctgacctggccgcctgggtgaccagctttgctgccaggagatatggagtgagccacccagatgctggggccgcctggaggctgctgctgcggtctgtgtacaactgcagcggggaggcctgccggggccacaacagaagccccctggtgagaagacccagcctgcagatgaacaccagcatctggtacaacagaagtgatgtgtttgaggcctggaggctgctgctgaccagcgcccccagcctggccaccagccctgccttccgctatgacctgctggacctgacccggcaggccgtgcaggagctggtgtccctgtactatgaggaggcccggagcgcctacctgagcaaggagctggccagcctgctgcgggccggcggcgtgctggcctatgagctgctgcctgccctggatgaggtgctggccagtgacagccgcttcctgctgggctcctggctggagcaggcccgggctgctgctgtgtctgaggccgaggccgacttctatgagcagaacagccgctaccagctgaccctgtggggccctgagggcaacatcctggactatgccaacaagcagctggccggcctggtggccaactactacaccccccgctggaggctcttcctggaggccctggtggacagcgtggcccagggcatccccttccagcagcaccagtttgacaagaatgtgttccagctggagcaggcctttgtgctgagcaagcagcgctaccccagccagcccaggggggacacagtggacctggccaagaagatcttcctgaagtactacccccgctgggtggccggctcctggtag

SEQ ID NO: 317684 - DNA, 2206 bp, Artificial Sequence
  derived and/or modified sequence
gcgggacccgcaggactgagaccatggaggcggtggcggtggccgcggcggtgggggtccttctcctggccggggccgggggcgcggcaggcgacgaggcccgggaggcggcggccgtgcgggcgctcgtggcccggctgctggggccaggccccgcggccgacttctccgtgtcggtggagcgcgctctggctgccaagccgggcttggacacctacagcctgggcggcggcggcgcggcgcgcgtgcgggtgcgcggctccacgggcgtggcggccgccgcggggctgcaccgctacctgcgcgacttctgtggctgccacgtggcctggtccggctctcagctgcgcctgccgcggccactgccagccgtgccgggggagctgaccgaggccacgcccaacaggtaccgctattaccagaatgtgtgcacgcaaagctactctttcgtgtggtgggactgggcccgctgggagcgagagatagactggatggcgctgaatggcatcaacctggcactggcctggagcggccaggaggccatctggcagcgggtgtacctggccttgggcctgacccaggcagagatcaatgagttctttactggtcctgccttcctggcctgggggcgaatgggcaacctgcacacctgggatggccccctgcccccctcctggcacatcaagcagctttacctgcagcaccgggtcctggaccagatgcgctccttcggcatgaccccagtgctgcctgcattcgcggggcatgttcccgaggctgtcaccagtggatactgaggctgtgtggctgctccaaggctggctcttccagcaccagccgcagttctgggggcccgcccagatcagggctgtgctgggagctgtgccccgtggccgcctcctggttctggacctgtttgctgagagccagcctgtgtatacccgcactgcctccttccagggccagcccttcatctggtgcatgctgcacaactttgggggaaaccatggtctttttggagccctagaggctgtgaacggaggcccagaagctgcccgcctcttccccaactccaccatggtaggcacgggcatggcccccgagggcatcagccagaacgaagtggtctattccctcatggctgagctgggctggcgaaaggacccagtgccagatttggcagcctgggtgaccagctttgccgcccggcggtatggggtctcccacccggacgcaggggcagcgtggaggctactgctccggagtgtgtacaactgctccggggaggcctgcaggggccacaatcgtagcccgctggtcaggcggccgtccctacagatgaataccagcatctggtacaaccgatctgatgtgtttgaggcctggcggctgctgctcacatctgctccctccctggccaccagccccgccttccgctacgacctgctggacctcactcggcaggcagtgcaggagctggtcagcttgtactatgaggaggcaagaagcgcctacctgagcaaggagctggcctccctgttgagggctggaggcgtcctggcctatgagctgctgccggcactggacgaggtgctggctagtgacagccgcttcttgctgggcagctggctagagcaggcccgagcagcggcagtcagtgaggccgaggccgatttctacgagcagaacagccgctaccagctgaccttgtgggggccagaaggcaacatcctggactatgccaacaagcagctggcggggttggtggccaactactacacccctcgctggcggcttttcctggaggcgctggttgacagtgtggcccagggcatccctttccaacagcaccagtttgacaaaaatgtcttccaactggagcaggccttcgttctcagcaagcagaggtaccccagccagccgcgaggagacactgtggacctggccaagaagatcttcctcaaatattacccccgctgggtggccggctcttggtgatagattcgccaccactgggccttgttttccgctaattccagggcagattccagggcccagagctggacagacatcacaggataacccaggcctgggaggaggccccacggcctgctggtggggtctgacctggggggattggagggaaatgacctgccctccaccaccacccaaagtgtgggattaaagtactgttttctttccactt

SEQ ID NO: 317685 - DNA, 1260 bp, Artificial Sequence
  derived and/or modified sequence
ccccagtgctgcctgcacagccggggcatgttcccccggctgagccctgtcgacactgaggccgtgtggctgctgcagggttggctgtttcaacatcaacctcagttttggggcccagcacagatcagagcggtccttggcgccgtgcctcgcggtcgcctcctggttctagatctgtttgcggaatcccagcccgtctacacccgcaccgcctcattccaaggacaacctttcatttggtgcatgttacacaactttgggggaaatcacgggctgtttggagccttagaagccgtcaacggcggtccagaggctgcacgccttttccccaatagcacaatggtggggacgggaatggctcccgagggtatcagtcagaatgaggtagtttatagcctcatggctgaactagggtggaggaaagaccctgtgccagatcttgctgcctgggtcacctcctttgccgcccgacgttacggagtaagccaccccgacgcaggcgcggcctggcggctgctcttaagatccgtatacaattgctcaggagaggcctgcaggggtcacaatcgctctccgctggtacgcagaccgagtttgcagatgaatacctccatatggtataaccggagtgacgtgtttgaggcctggcgcctacttctcacgagcgcacccagcctagcaacatcccccgcctttcgctacgatctgctggacttgaccaggcaagccgtgcaagaactagtgtctctttactacgaagaagcgaggtccgcttacctatctaaagagctggccagcctgctcagggctggcggggtgctggcctacgagcttctcccagcactggacgaggtgctcgcgagtgatagccggttcctcctgggaagttggctggaacaggctcgtgctgctgcggtgtccgaagcggaagctgacttttatgagcagaatagccgttatcagctgacactatgggggccggaagggaacatcttggattacgccaacaagcagctggcggggctcgtcgcaaattactacacccctcggtggcggttgtttttagaggccctagtggactctgtggcacaaggtatcccgtttcagcaacatcagttcgataagaacgtattccaattggaacaagcattcgtgctgagcaagcagcgctaccctagtcagccaagaggagatactgtcgacctagccaagaagattttcctcaagtactaccctcgttgggtggcaggaagctggtag

SEQ ID NO: 317686 - DNA, 1260 bp, Artificial Sequence
  derived and/or modified sequence
ccacagtgctgcttgcacagtagaggtatgttccctaggctgtccccggtagatacggaggccgtctggttgctccagggttggctgttccagcaccagccccaattttggggaccggcacagattagagctgtcctgggcgctgtgccacgaggtcgactcctggtactggacctctttgccgagagccagccggtttacacccgcaccgcttcttttcaaggccagccttttatatggtgtatgctccacaactttggaggcaatcatggactatttggagccttagaagccgttaacggcggacctgaggcagcacgactgtttcccaactcgaccatggtggggaccggtatggccccagaaggaatcagccaaaacgaagtcgtgtatagtctgatggccgagcttgggtggcgcaaagatccggtgcctgatctcgctgcttgggttacttccttcgccgcacgaaggtatggtgtgagccaccccgacgccggtgccgcttggcgactgctgctgcgtagcgtttacaactgttcaggggaagcctgccggggacataataggagtccccttgtgagacgtccttccctgcagatgaacaccagcatttggtataatagaagtgatgtatttgaagcctggcgactgctcctgacgagcgcacctagcttggccacctccccggcttttaggtatgatctcctggatttgaccagacaggccgtgcaagagcttgtttccctttattacgaggaggccagatcagcatacctcagcaaggaactcgcctcactcttgagggccggtggagtgctggcttatgagttgctgccagccttggatgaagtcctggccagtgatagtcgttttttgctgggctcctggctggaacaggcgagggctgctgctgtgtccgaagccgaggctgacttctacgaacagaactctaggtatcagctaacgctgtgggggccagagggtaatatcctcgactacgcaaacaagcagcttgcaggactggtggcaaactattacacccctcgctggcgcttatttctggaggcattggtcgattccgtggctcagggaatcccttttcagcagcatcagttcgacaagaatgtattccagctcgaacaagctttcgtgctctcgaaacagagatacccttctcagccaaggggagacaccgtcgacctcgccaaaaaaatctttcttaaatattacccccgttgggtggcaggctcatggtag

SEQ ID NO: 317687 - DNA, 1260 bp, Artificial Sequence
  derived and/or modified sequence
ccccagtgctgcctgcacagcagaggcatgttccccagactgagccccgtggacaccgaggccgtgtggctgctgcagggctggctgttccagcaccagccccagttctggggccccgcccagatcagagccgtgctgggcgccgtgcccagaggcagactgctggtgctggacctgttcgccgagagccagcccgtgtacaccagaaccgccagcttccagggccagcccttcatctggtgcatgctgcacaacttcggcggcaaccacggcctgttcggcgccctggaggccgtgaacggcggccccgaggccgccagactgttccccaacagcaccatggtgggcaccggcatggcccccgagggcatcagccagaacgaggtggtgtacagcctgatggccgagctgggctggagaaaggaccccgtgcccgacctggccgcctgggtgaccagcttcgccgccagaagatacggcgtgagccaccccgacgccggcgccgcctggagactgctgctgagaagcgtgtacaactgcagcggcgaggcctgcagaggccacaacagaagccccctggtgagaagacccagcctgcagatgaacaccagcatctggtacaacagaagcgacgtgttcgaggcctggagactgctgctgaccagcgcccccagcctggccaccagccccgccttcagatacgacctgctggacctgaccagacaggccgtgcaggagctggtgagcctgtactacgaggaggccagaagcgcctacctgagcaaggagctggccagcctgctgagagccggcggcgtgctggcctacgagctgctgcccgccctggacgaggtgctggccagcgacagcagattcctgctgggcagctggctggagcaggccagagccgccgccgtgagcgaggccgaggccgacttctacgagcagaacagcagataccagctgaccctgtggggccccgagggcaacatcctggactacgccaacaagcagctggccggcctggtggccaactactacacccccagatggagactgttcctggaggccctggtggacagcgtggcccagggcatccccttccagcagcaccagttcgacaagaacgtgttccagctggagcaggccttcgtgctgagcaagcagagataccccagccagcccagaggcgacaccgtggacctggccaagaagatcttcctgaagtactaccccagatgggtggccggcagctggtag

SEQ ID NO: 317688 - protein, 382 aa, Artificial Sequence
  derived and/or modified sequence
MLTRLFSEPGLLSDVPKFASWGDGEDDEPRSDKGDAPPPPPPAPGPGAPGPARAAKPVPLRGEEGTEATLAEVKEEGELGGEEEEEEEEEEGLDEAEGERPKKRGPKKRKMTKARLERSKLRRQKANARERNRMHDLNAALDNLRKVVPCYSKTQKLSKIETLRLAKNYIWALSEILRSGKRPDLVSYVQTLCKGLSQPTTNLVAGCLQLNSRNFLTEQGADGAGRFHGSGGPFAMHPYPYPCSRLAGAQCQAAGGLGGGAAHALRTHGYCAAYETLYAAAGGGGASPDYNSSEYEGPLSPPLCLNGNFSLKQDSSPDHEKSYHYSMHYSALPGSRPTGHGLVFGSSAVRGGVHSENLLSYDMHLHHDRGPMYEELNAFFHN

SEQ ID NO: 317689 - DNA, 1149 bp, Artificial Sequence
  derived and/or modified sequence
atgttgacacgcttgttcagcgaacctgggctcttgagtgatgtccccaagtttgcttcttggggcgacggggaagatgacgagccgagaagcgataagggcgatgcccccccccctccacctccggccccaggacctggtgcccctggcccagcgcgagccgctaagcccgtgccactgcggggagaggagggcacggaggccactttggcggaggtgaaagaggagggcgagctcggaggcgaagaggaagaagaggaggaggaggaggagggactcgacgaggcggaaggagagagaccaaaaaagcgggggcccaaaaagaggaagatgaccaaagctcggctggagcgctccaaactgaggcggcagaaggctaatgcaagggagcgcaaccggatgcacgatcttaatgcagcactggacaatctgcgcaaagtcgtgccgtgttatagtaagacgcagaaactgtctaagattgagaccttgaggctagccaagaactacatatgggctttgtctgagatattgagatcaggaaagcgaccagatctggtgtcctatgtgcaaacgctgtgcaaggggctcagccagcctaccacaaacctggtcgccggatgtctgcagttgaactccaggaactttctcacagagcagggcgccgacggagccggaaggttccacggaagcggcgggccctttgcaatgcacccgtacccctatccatgtagccgtttagccggagctcagtgccaggccgcaggcggcctggggggcggggctgcccatgctttgcgtacacacggctactgtgcagcttacgagactctctacgcggccgcaggtggtgggggcgcctcacccgactataactcaagcgagtacgagggccccctgtctccacctctgtgtctgaacggcaacttcagtctcaagcaggatagttctcctgaccacgaaaaatcatatcactattccatgcattattctgctttacccggctcaaggcctacaggccacgggctggtgttcggctctagtgccgtgcgcggaggagtccacagtgagaatctgctgagttacgacatgcacctgcaccacgaccgcggcccgatgtacgaggagctcaatgcttttttccataattag

SEQ ID NO: 317690 - DNA, 1149 bp, Artificial Sequence
  derived and/or modified sequence
atgctgaccaggctcttcagcgagcccggcctgctgagtgatgtgcccaagtttgcctcctggggagatggagaagatgatgagcccaggagtgacaagggagatgcccctcctcctcctcctccagcccctggccctggggcccctggccctgcccgggccgccaagcctgtgcccctgcggggggaggagggcacagaggccaccctggccgaggtgaaggaggagggggagctgggcggggaggaggaggaggaggaggaggaggaggagggcctggatgaggccgagggggagcggcccaagaagaggggccccaagaagaggaagatgaccaaggcccggctggagaggagcaagctgcggcggcagaaggccaatgcccgggagaggaacaggatgcatgacctgaatgctgccctggacaacctgaggaaggtggtgccctgctacagcaagacccagaagctgagcaagattgagaccctgcggctggccaagaactacatctgggccctgtctgagatcctgcggagcggcaagaggccagacctggtgtcctatgtgcagaccctgtgcaagggcctgagccagcccaccaccaacctggtggccggctgcctgcagctgaacagcaggaacttcctgacagagcagggcgcagatggagctggccgcttccacggcagcggcggcccctttgccatgcacccctacccctacccctgcagccggctggccggggcccagtgccaggccgccggcggcctgggcggcggggccgcccacgccctgcggacccacggctactgtgccgcctatgagaccctgtatgctgctgctgggggcggcggggccagcccagactacaacagcagtgaatatgagggccccctgagcccccccctgtgcctgaatggaaacttcagcctgaagcaggacagcagcccagaccacgagaagagctaccactacagcatgcactacagcgccctgcccggcagccggcccaccggccacggcctggtgtttggcagcagcgctgtgcggggcggcgtgcacagcgagaacctgctgtcctatgacatgcacctgcaccacgaccggggccccatgtatgaggagctgaatgccttcttccacaactag

SEQ ID NO: 317691 - DNA, 1149 bp, Artificial Sequence
  derived and/or modified sequence
atgctgacccggctgttcagcgagcccggcctgctgagcgacgtgccaaagttcgcttcttggggcgatggagaagacgatgagccccgttccgataaaggcgatgccccgccgcctcctcctcccgcgcctggccccggagcacctggtcctgccagggccgcaaagccggtgcccttacgtggagaggagggaactgaggccactctagccgaggtaaaggaggagggcgagctcggaggcgaagaggaagaggaggaagaggaggaagagggcttggacgaggctgagggagagcgaccgaaaaagcgcggccccaagaagaggaaaatgacaaaagcccgccttgaacggagtaagctaaggcgtcaaaaagctaatgccagggagcgcaaccgaatgcacgacctgaatgcagctttagataatctcagaaaggtggtgccatgttacagtaagacccagaaattgtcgaagatcgaaacccttcgcctggcaaagaattatatttgggctctgtccgaaatcctccgctcgggaaagcggcccgatctggtcagttatgtgcagactctttgcaaggggctcagccagcccaccacgaaccttgtggccgggtgtctgcaactgaacagccgtaactttttgacagagcagggcgcagatggcgcgggaagatttcacggctcaggcggtccgtttgccatgcacccttatccttatccatgctcgcgcctggctggggcgcagtgtcaggccgctggaggtttaggcgggggcgcagctcatgccctcaggacccacggctactgcgcggcatatgagaccctgtatgctgccgccggcggagggggggcctcaccggactacaacagtagcgagtatgagggacctctgtccccccccctgtgtctcaacgggaatttcagcctgaaacaagactcttcacctgatcacgaaaagtcttatcactacagcatgcactatagcgccctgcctggctctaggccaacagggcacggactagtcttcggatctagcgctgtgcgcggcggagtacatagtgagaacctcctgagttacgatatgcacctgcatcacgacaggggtcctatgtacgaagagctgaatgcatttttccacaactag

SEQ ID NO: 317692 - DNA, 1149 bp, Artificial Sequence
  derived and/or modified sequence
atgctgactagactgttcagcgaaccaggacttctctctgatgtgccaaaatttgcaagctggggagatggcgaagacgacgagcccagatctgataagggagatgcacctccacctcctccccctgcaccaggtcccggtgcacccggtccggcaagggccgctaaaccagtcccactgcggggagaggaggggactgaagctaccctggcagaagtaaaagaggaaggcgaactgggcggagaggaggaggaagaagaagaagaggaagagggactggatgaggctgaaggcgagcgacccaagaaacgaggtcccaaaaaacgcaagatgactaaagcacgactagagagaagcaagctccgcagacagaaggcaaatgcaagagagcggaatcggatgcatgatctgaatgctgcccttgataatctccggaaggtggtgccctgctattccaagacccagaaacttagcaaaatagaaactctccgtcttgcgaagaattacatctgggcgttgtccgagatcttgcgctctgggaaacgacccgacttggtgagctatgtgcagaccttgtgtaaggggctgtctcagccaacaacaaatttagtagccggatgtttacagttgaactcgcggaattttttaaccgaacagggcgcagacggcgcaggcagatttcacggcagcggaggaccatttgctatgcatccttatccctatccatgttcacggctcgcgggtgctcaatgccaggccgcagggggactgggaggaggagccgcacatgctttacgcactcatggttactgtgccgcatatgagaccctctacgctgctgccggaggcggaggtgcctctccggactacaactcatcggaatacgaggggccactctcaccccctctgtgtttaaatggcaactttagtctgaagcaggattcaagcccagatcatgagaaatcttatcattactcaatgcattactcagcattgccaggctcccgtccaaccggacacggacttgtgtttggtagctcagccgtgcgtggaggcgtgcattccgagaatctgttgtcctacgacatgcatcttcaccacgacaggggtcctatgtacgaggaactaaatgccttcttccacaactag

SEQ ID NO: 317693 - DNA, 1149 bp, Artificial Sequence
  derived and/or modified sequence
atgctgaccagactgttcagcgagcccggcctgctgagcgacgtgcccaagttcgccagctggggcgacggcgaggacgacgagcccagaagcgacaagggcgacgccccccccccccccccccccgcccccggccccggcgcccccggccccgccagagccgccaagcccgtgcccctgagaggcgaggagggcaccgaggccaccctggccgaggtgaaggaggagggcgagctgggcggcgaggaggaggaggaggaggaggaggaggagggcctggacgaggccgagggcgagagacccaagaagagaggccccaagaagagaaagatgaccaaggccagactggagagaagcaagctgagaagacagaaggccaacgccagagagagaaacagaatgcacgacctgaacgccgccctggacaacctgagaaaggtggtgccctgctacagcaagacccagaagctgagcaagatcgagaccctgagactggccaagaactacatctgggccctgagcgagatcctgagaagcggcaagagacccgacctggtgagctacgtgcagaccctgtgcaagggcctgagccagcccaccaccaacctggtggccggctgcctgcagctgaacagcagaaacttcctgaccgagcagggcgccgacggcgccggcagattccacggcagcggcggccccttcgccatgcacccctacccctacccctgcagcagactggccggcgcccagtgccaggccgccggcggcctgggcggcggcgccgcccacgccctgagaacccacggctactgcgccgcctacgagaccctgtacgccgccgccggcggcggcggcgccagccccgactacaacagcagcgagtacgagggccccctgagcccccccctgtgcctgaacggcaacttcagcctgaagcaggacagcagccccgaccacgagaagagctaccactacagcatgcactacagcgccctgcccggcagcagacccaccggccacggcctggtgttcggcagcagcgccgtgagaggcggcgtgcacagcgagaacctgctgagctacgacatgcacctgcaccacgacagaggccccatgtacgaggagctgaacgccttcttccacaactag

SEQ ID NO: 317694 - DNA, 1256 bp, Artificial Sequence
  derived and/or modified sequence
aggcatgcatgagagatattccaacgtgcaagtggctggaccagtggacagaactagctcaaaggactcgcctctgcacaaagccctcttttgggtagctgtggctgtgctgcagcttgatgaggtcaacttgtattcagcaggtaccgcacttcttgaacaaaacctgcatactttagatagtctccgtatattcaatgacaagagtccagaggaagtatttatggcaatccggaatcctctggagtggcactgcaagcaaatggatcattttgttggactcaatttcaactctaactttaactttgcattggttggacaccttttaaaagggtacaggcatccttcacctgctattgttgcaagaacagtcagaattttacatacactactaactctggttaacaaacacagaaattgtgacaaatttgaagtgaatacacagagcgtggcctacttagcagctttacttacagtgtctgaagaagttcgaagtcgctgcagcctaaaacatagaaagtcacttcttcttactgatatttcaatggaaaatgttcctatggatacatatcccattcatcatggtgacccttcctataggaacaaggaaaagttttgatcacttgatatcagacacaaaggctcctaaaaggcaagaaatggaatcagggatcacaacaccccccaaaatgaggagagtagcagaaactgattatgaaatggaaactcagaggatttcctcatcacaacagcacccacatttacgtaaagtttcagtgtctgaatcaaatgttctcttggatgaagaagtacttactgatccgaagatccaggcgctgcttcttactgttctagctacactggtaaaatataccacagatgagtttgatcaacgaattctttatgaatacttagcagaggccagtgttgtgtttcccaaagtctttcctgttgtgcataatttgttggactctaagatcaacaccctgttatcattgtgccaagatccaaatttgttaaatccaatccatggaattgtgcagagtgtggtgtaccatgaagaatccccaccacaataccaaacatcttacctgcaaagttttggttttaatggcttgtggcggtttgcaggaccgttttcaaagcaaacacaaattccagactatgctgagcttattgttaagtttcttgatgccttgattgacacgtacctgcctggaattgatgaagaaaccagtgaagaatccctcctgact

SEQ ID NO: 317695 - DNA, 1066 bp, Artificial Sequence
  derived and/or modified sequence
gcaactcaagatggcggacgagagtgagacagcagtgaagccgccggcacctccgctgccgcagatgatggaagggaacgggaacggccatgagcactgcagcgattgcgagaatgaggaggacaacagctacaaccggggtggtttgagtccagccaatgacactggagccaaaaagaagaaaaagaaacaaaaaaagaagaaagaaaaaggcagtgagacagattcagcccaggatcagcctgtgaagatgaactctttgccagcagagaggatccaggaaatacagaaggccattgagctgttctcagtgggtcagggacctgccaaaaccatggaggaggctagcaagcgaagctaccagttctgggatacgcagcccgtccccaagctggctaaaagaactgtacaccctcctgaatgagaactatgtggaagatgatgacaacatgttccgatttgattattccccggagtttcttttgtgggctctccggccacccggctggctcccccagtggcactgtggggttcgagtggtctcaagtcggaaattggttgggttcattagcgccatcccagcaaacatccatatctatgacacagagaagaagatggtagagatcaacttcctgtgtgtccacaagaagctgcgttccaagagggttgctccagttctgatccgagagatcaccaggcgggttcacctggagggcatcttccaagcagtttacactgccggggtggtactaccaaagcccgttggcacctgcaggtaaaactgtcttcctgtaaggccccaaaaatgcgggtgtctgcactgtagttgaggagcatgtgccactgtgagtcacagctccgcccttagcatcccacctctggcgtatctggtaaggcgggcacttggtgcctgcaggagccagatggggagcatggagagggcgggagggttgtagggatggcagattggcaagtccctgccttgtctggagggctcttggtgtctgctggctgctgccatttggagatggtggggggcggtactggtggtttgtttttgttttta

SEQ ID NO: 317696 - protein, 644 aa, Artificial Sequence
  derived and/or modified sequence
MTIEIDFLQKKSIDSNPYDTDKMAAEFIQQFNNQAFSVGQQLVFSFNEKLFGLLVKDIEAMDPSILKGEPATGKRQKIEVGLVVGNSQVAFEKAENSSLNLIGKAKTKENRQSIINPDWNFEKMGIGGLDKEFSDIFRRAFASRVFPPEIVEQMGCKHVKGILLYGPPGCGKTLLARQIGKMLNAREPKVVNGPEILNKYVGESEANIRKLFADAEEEQRRLGANSGLHIIIFDEIDAICKQRGSMAGSTGVHDTVVNQLLSKIDGVEQLNNILVIGMTNRPDLIDEALLRPGRLEVKMEIGLPDEKGRLQILHIHTARMRGHQLLSADVDIKELAVETKNFSGAELEGLVRAAQSTAMNRHIKASTKVEVDMEKAESLQVTRGDFLASLENDIKPAFGTNQEDYASYIMNGIIKWGDPVTRVLDDGELLVQQTKNSDRTPLVSVLLEGPPHSGKTALAAKIAEESNFPFIKICSPDKMIGFSETAKCQAMKKIFDDAYKSQLSCVVVDDIERLLDYVPIGPRFSNLVLQALLVLLKKAPPQGRKLLIIGTTSRKDVLQEMEMLNAFSTTIHVPNIATGEQLLEALELLGNFKDKERTTIAQQVKGKKVWIGIKKLLMLIEMSLQMDPEYRVRKFLALLREEGA

SEQ ID NO: 317697 - protein, 452 aa, Artificial Sequence
  derived and/or modified sequence
MASRINTNFTLIPNQKLRRSNRQTSCYSKTLGSGFQPISTFGNFKALPLEIFQIILKYLSVKDISMLSMVSKTVSQHIINYISTSSGSKRLLLQDFHNLELPDRRQDSAILEHYRSLGLLFKRCTLLLPTKERLKYIHKILTEVSCFKFNGCAAPMQCLGLTCYGMFLQTLTAGWDELECHRVYNFLCELTNLCRKIQMAVCSKPGSAQKLELRIRLFCRNVLLDHWTHRSDSAFWLTRILKPWPMVNQARLLYIIFGPISPQDGQVVWQEMIEEPTDEFSLKGLADAIKLLYDASTKEWTADDVISLVDELSVVPREWLLENNARLLMLSGNNICFSFMASKAVNGRTIELARLVVFLALVCEKELYCMDWTVKMMQKVCKVFSTPVERKNFLQNVANAFACVIMEMLQSIMSGDRDEDDRSFLNLFHLVHAQANFHKEVLYLTMNTPLST

SEQ ID NO: 317698 - DNA, 2302 bp, Artificial Sequence
  derived and/or modified sequence
ggtagggctgcagctccggagcctacgggagtgtgaccctctcgcctcctggcgggaagctcttgaggagatattttcttttctaaacactaagaaatttgaggatggtggggcaaaacgactaactcccactttcctgtgactctgtagccggaaaaactgtcaaaatctgtggataaatttgtgagacaagaagaagaatggcatccagaataaatacaaatttcactttgattcccaaccagaaacttagacgtagtaatcgtcaaaccagctgttattccaagacccttggctcaggctttcaacccatatcaacatttggaaattttaaagccttaccattggaaatattccagataattttaaaatatttgtcagtgaaggatatcagcatgctaagcatggtgtccaaaacagtcagccaacacattattaattatatctcaacctcatcaggaagcaaaagacttttactacaggactttcataaccttgagctgcctgacaggagacaagactctgctatactggagcactacagatctctaggtctactgtttaaaagatgcacattgctgctacccaccaaggaaaggctaaaatacattcacaagatactcacagaagtttcctgctttaaattcaatggctgtgcagctcctatgcagtgtttaggattaacatgttatggcatgtttttacagaccttaacagcaggttgggatgaacttgagtgccatcgcgtttataatttcttatgcgaactgactaatctctgccgcaagatacaaatggctgtctgcagcaaaccaggaagtgcccaaaaactggagttaagaatcagactcttctgtaggaatgtcctccttgatcattggacacatcgaagtgattctgctttttggttgacgcgaatattaaaaccatggccaatggtgaatcaggcaagattactgtatatcatctttgggccaatatctcctcaagatggacaggtggtttggcaggaaatgatagaagaacctacagatgaattcagtctgaaaggtttggctgatgccattaagttactatatgacgctagcactaaagagtggacagcagatgatgttatcagtcttgtagatgaactatcagtggttccccgtgagtggcttctagagaataatgcacgtctcctaatgctaagtggaaacaacatctgtttcagtttcatggctagtaaagctgtgaatggacgcaccattgaactggcaaggctcgtagtctttttggctttggtgtgtgagaaagaactgtactgcatggattggacagttaaaatgatgcaaaaagtctgcaaagtctttagcactccagtggaaagaaagaacttcctgcagaatgtggcaaatgcatttgcatgtgttataatggaaatgctgcaatcaattatgtctggagaccgtgatgaagatgacagaagctttttgaatttgttccatcttgtacatgctcaggctaacttccataaggaggtcctgtatttgaccatgaatactcctctgtctacctaaatcctcagaaagccttgcctttagagaacgtcactgaacgaatgattagaggagtgctactttttcactcaaaaaatagcatccatgggactttttatcatctaagtaacctaagaattcaaaagctggatagaattttagaagcaactacgtacatcattattaatataaaaataacaggcagcctcaagaatgtgctgagatttctctggaaaacaagctctgcctctccgggttttagtcaacctaacaccaaaccaaaatagaatgttagctgttcaagaatctgggaccagccaacctgtatgtatgcatttttgaagcaagagaaaattccattttatagttagacccaaattcactaaatagtgtgtatgttcactttgtttaagttgtatagacatagcccagaatgttttgtgaagatttgcaatatggtgttttggaatgtgtagaatacaaatcacagtttttactaccttcttggcatatgcttacaaagaacattatattttgttcatgttttacatgaactaatggataaaaaacaaagtatacatatatgtctatatatatatatagacacacacacacagacatatatttccttctttaaggtaatcatacaaaaggtctatacatacaggaaggtatatattgtctcaatgcaatcaaatcatcttttactggggattcaaataaaatgtagcaaataagagaaaaataaaatgaaagaaaatagc

SEQ ID NO: 317699 - DNA, 1359 bp, Artificial Sequence
  derived and/or modified sequence
atggctagtcgcatcaatacaaacttcactctgattcctaatcagaagttacgacgcagcaacaggcaaacttcctgttacagtaaaactctgggttctggatttcaacctatttctactttcgggaactttaaggctctcccactggagatatttcagattatcctgaaatatttgagcgtcaaggatatctctatgctgtcaatggtctcaaaaacagtgagccagcatattattaattatatctccacaagcagtggtagcaaaagactcttgctccaggatttccataacttggaattgccggacagacggcaggactccgccatcctcgaacactacaggtcactcgggctgctctttaagaggtgtacgttgctgctgcccacgaaggagcgcctgaaatacattcataagatattgaccgaagtctcttgcttcaaattcaacggctgcgccgctccgatgcagtgccttggattgacatgctatggtatgtttctccagacgcttacggcgggatgggacgagttggaatgccaccgcgtctataatttcctttgcgagctgactaacctgtgtaggaaaattcaaatggccgtgtgttccaaacccgggtctgcgcaaaagctggaactgaggatcagactgttttgcagaaacgtcctcctggaccactggactcatcgctccgactccgccttttggctcactcggatcctgaaaccctggcctatggttaaccaggccagattactgtatataattttcggaccgatttctccacaagatggtcaggtggtctggcaggaaatgatcgaagaacccactgacgaattcagcctgaagggcctcgctgatgcaatcaaactgctgtacgacgcatccacaaaagagtggaccgcggacgatgtgatttcactggttgacgagctctctgttgtgcccagagagtggctgcttgaaaataacgcgagactgttgatgctcagcgggaacaatatctgtttctcttttatggcatccaaggcggtaaatggccggacaatcgagctcgcccgcttagtggtgttcctggcccttgtgtgcgagaaggaactgtactgcatggattggacggtgaagatgatgcaaaaggtgtgcaaggtgttttctaccccggtggaacggaaaaacttcctgcagaatgtggcaaatgcctttgcttgcgtaatcatggagatgctccagagcattatgtcgggcgaccgcgacgaggacgaccgctcctttttaaatctgtttcatctcgtgcacgcgcaagcaaacttccacaaggaggtcctgtacctgacaatgaatactcctcttagcacttag

SEQ ID NO: 317700 - DNA, 1359 bp, Artificial Sequence
  derived and/or modified sequence
atggccagccgcatcaacaccaacttcaccctcatccccaaccagaagctgcggcgcagcaaccggcagaccagctgctacagcaagaccctgggcagcggcttccagcccatcagcacctttggaaacttcaaggccctgcccctggagatcttccagatcatcctgaagtacctgtctgtgaaggacatctccatgctgtccatggtgtccaagacagtgtcccagcacatcatcaactacatcagcaccagcagcggcagcaagaggctgctgctgcaggacttccacaacctggagctgcctgaccggcggcaggacagcgccatcctggagcactaccgcagcctgggcctgctcttcaagcgctgcaccctgctgctgcccaccaaggagcggctgaagtacatccacaagatcctgacagaggtgtcctgcttcaagttcaacggctgtgccgcccccatgcagtgcctgggcctgacctgctacggcatgttcctgcagaccctgacagctggctgggatgagctggagtgccaccgggtgtacaacttcctgtgtgagctgaccaacctgtgcaggaagatccagatggctgtgtgcagcaagccaggcagcgcccagaagctggagctgcgcatccgcctcttctgcagaaatgtgctgctggaccactggacccacagaagtgacagcgccttctggctgacccgcatcctgaagccctggcccatggtgaaccaggcccggctgctgtacatcatcttcggccccatcagcccccaggacggccaggtggtgtggcaggagatgattgaggagcccacagatgagttcagcctgaagggcctggctgatgccatcaagctgctgtatgatgccagcaccaaggagtggacagcagatgatgtgatcagcctggtggatgagctgtctgtggtgccccgggagtggctgctggagaacaatgcccggctgctgatgctgagcggcaacaacatctgcttctccttcatggccagcaaggctgtgaatggccgcaccatcgagctggcccggctggtggtgttcctggccctggtgtgtgagaaggagctgtactgcatggactggacagtgaagatgatgcagaaggtgtgcaaggtgttcagcacccctgtggagaggaagaacttcctgcagaatgtggccaatgcctttgcctgtgtgatcatggagatgctgcagagcatcatgtctggggacagagatgaagatgaccgctccttcctgaacctcttccacctggtgcacgcccaggccaacttccacaaggaggtgctgtacctgaccatgaacacccccctgagcacctag

SEQ ID NO: 317701 - DNA, 1359 bp, Artificial Sequence
  derived and/or modified sequence
atggccagccggatcaacaccaacttcaccctgatccccaaccagaaacttcgtaggagcaatcgccagacctcatgctattctaagacactagggtccggatttcaaccaatcagcacattcggaaactttaaagcgctccctcttgaaatcttccaaataattctaaagtatttgagcgtgaaggacattagcatgctgtccatggtgtctaaaactgtttctcagcacataatcaactacatctccacctctagcggaagtaagcgcttgcttctgcaggatttccacaaccttgaactccctgaccggcggcaggattcagccatccttgagcactaccggagcctcggtctcctgtttaagcgctgcaccctactgcttcctactaaagaacggttgaagtacatccacaagatacttaccgaagtctcttgtttcaagttcaatggttgcgctgctcccatgcagtgtttgggtctgacatgctatggtatgtttctacagactctcacggccgggtgggatgagctcgagtgccacagggtgtacaattttctgtgcgagcttactaacctctgccggaagatacaaatggctgtctgttctaaacctggaagcgcacagaagctcgagctgagaatcagactgttttgcaggaacgttctccttgatcactggacccacaggtccgattctgctttctggttaactcgcattttaaagccgtggcccatggtgaatcaggcccggttattatacattatttttggccctatcagtccccaggacgggcaggtggtttggcaggaaatgatcgaagagcccaccgacgagttcagtctcaagggtctggccgatgccatcaaactcttgtacgatgcatctaccaaagagtggaccgccgatgacgtcatttctttggttgacgaactgagcgttgtacctagggagtggttgctggagaacaatgcaaggcttctgatgctatcaggcaataacatctgcttctctttcatggcgtctaaggcagtcaacggcagaaccatcgagctggcacgactagtggtcttcctcgcactggtgtgtgagaaggagctttattgtatggactggacagttaaaatgatgcagaaggtatgcaaagtgttcagtacccccgtggagcgcaaaaattttctgcaaaatgtggccaacgcctttgcatgcgtaattatggaaatgctacagtctatcatgtcaggggatagggacgaggacgatcgcagctttctaaacctcttccatcttgtccatgcccaagcaaattttcataaggaagtgctgtatctaaccatgaatacccctctctccacgtag

SEQ ID NO: 317702 - DNA, 1359 bp, Artificial Sequence
  derived and/or modified sequence
atggcatcacggattaataccaacttcacgctgatcccaaaccagaagcttaggaggtcaaatcggcaaacttcttgttatagcaagaccctgggaagtgggttccagccaataagcacgttcggtaacttcaaggccctcccactggagatatttcagattattctcaagtacctgagtgtcaaggacatttctatgcttagcatggtgagtaaaaccgtgagccagcatataataaattatatctcaacctctagcggcagtaagagactcctgctacaagactttcacaacctggaactgcccgatcgcagacaggacagtgccattctggagcactatagatccctgggattactgttcaagcgctgcacactactgttacccactaaggaaaggctgaaatacatccataagattctgacagaggtttcctgttttaagtttaatgggtgcgcagcacccatgcaatgcttgggcttgacttgctacggcatgtttttacagacactgacagccggatgggatgaactagagtgccacagggtgtacaacttcctgtgcgaactgaccaatctttgtcgcaagatccaaatggcggtgtgttccaagcctggcagcgcccagaagctggagctgagaattaggcttttttgcagaaatgtcttgctggaccactggacccataggagtgatagcgccttttggctgactaggatcctcaagccctggcccatggtgaatcaggctagattgctttatattatcttcgggccaatctcaccacaggacggccaggtcgtgtggcaggagatgatcgaggaaccaactgatgagtttagcctgaaggggctggcagacgcgattaaacttttatatgacgctagcaccaaagagtggaccgcagacgatgtgatctctctggttgacgagctaagcgtagtacctcgagagtggcttctcgagaataacgcaagactcctgatgctctctggaaataacatctgcttcagcttcatggcttctaaagccgtcaatgggagaacgatcgagctcgctcgtcttgtcgtgttcttggccctggtgtgtgaaaaagagctctactgtatggattggacagttaagatgatgcagaaagtgtgcaaggttttctcaacaccagtcgagcgcaagaactttctccagaatgttgccaacgctttcgcctgtgtgattatggagatgctgcagagcattatgtctggcgacagagacgaagacgataggtctttcctgaacctctttcatcttgttcacgcccaggctaattttcacaaagaagtgctgtatcttaccatgaatactcctctcagcacatag

SEQ ID NO: 317703 - DNA, 1359 bp, Artificial Sequence
  derived and/or modified sequence
atggccagcagaatcaacaccaacttcaccctgatccccaaccagaagctgagaagaagcaacagacagaccagctgctacagcaagaccctgggcagcggcttccagcccatcagcaccttcggcaacttcaaggccctgcccctggagatcttccagatcatcctgaagtacctgagcgtgaaggacatcagcatgctgagcatggtgagcaagaccgtgagccagcacatcatcaactacatcagcaccagcagcggcagcaagagactgctgctgcaggacttccacaacctggagctgcccgacagaagacaggacagcgccatcctggagcactacagaagcctgggcctgctgttcaagagatgcaccctgctgctgcccaccaaggagagactgaagtacatccacaagatcctgaccgaggtgagctgcttcaagttcaacggctgcgccgcccccatgcagtgcctgggcctgacctgctacggcatgttcctgcagaccctgaccgccggctgggacgagctggagtgccacagagtgtacaacttcctgtgcgagctgaccaacctgtgcagaaagatccagatggccgtgtgcagcaagcccggcagcgcccagaagctggagctgagaatcagactgttctgcagaaacgtgctgctggaccactggacccacagaagcgacagcgccttctggctgaccagaatcctgaagccctggcccatggtgaaccaggccagactgctgtacatcatcttcggccccatcagcccccaggacggccaggtggtgtggcaggagatgatcgaggagcccaccgacgagttcagcctgaagggcctggccgacgccatcaagctgctgtacgacgccagcaccaaggagtggaccgccgacgacgtgatcagcctggtggacgagctgagcgtggtgcccagagagtggctgctggagaacaacgccagactgctgatgctgagcggcaacaacatctgcttcagcttcatggccagcaaggccgtgaacggcagaaccatcgagctggccagactggtggtgttcctggccctggtgtgcgagaaggagctgtactgcatggactggaccgtgaagatgatgcagaaggtgtgcaaggtgttcagcacccccgtggagagaaagaacttcctgcagaacgtggccaacgccttcgcctgcgtgatcatggagatgctgcagagcatcatgagcggcgacagagacgaggacgacagaagcttcctgaacctgttccacctggtgcacgcccaggccaacttccacaaggaggtgctgtacctgaccatgaacacccccctgagcacctag

SEQ ID NO: 317704 - protein, 592 aa, Artificial Sequence
  derived and/or modified sequence
MAAFIQRTPDNWHLRPDGNGPRFVHRGRPEPLDLHLGMFLPTLLHQATAEQQERFFMPAWNLEIIGTYAQTEMGHGTHLRGLETTATYDPETQEFILNSPTVTSIKWWPGGLGKTSNHAIVLAQLITKGKCYGLHAFIVPIREIGTHKPLPGITVGDIGPKFGYDEIDNGYLKMDNHRIPRENMLMKYAQVKPDGTYVKPLSNKLTYGTMVFVRSFLVGEAARALSKACTIAIRYSAVRHQSEIKPGEPEPQILDFQTQQYKLFPLLATAYAFQFVGAYMKETYHRINEGIGQGDLSELPELHALTAGLKAFTSWTANTGIEACRMACGGHGYSHCSGLPNIYVNFTPSCTFEGENTVMMLQTARFLMKSYDQVHSGKLVCGMVSYLNDLPSQRIQPQQVAVWPTMVDINSPESLTEAYKLRAARLVEIAAKNLQKEVIHRKSKEVAWNLTSVDLVRASEAHCHYVVVKLFSEKLLKIQDKAIQAVLRSLCLLYSLYGISQNAGDFLQGSIMTEPQITQVNQRVKELLTLIRSDAVALVDAFDFQDVTLGSVLGRYDGNVYENLFEWAKNSPLNKAEVHESYKHLKSLQSKL

SEQ ID NO: 317705 - DNA, 1779 bp, Artificial Sequence
  derived and/or modified sequence
atggccgctttcattcagagaaccccggataattggcacctcaggccagacggtaatggccctagatttgtgcataggggcagacctgagcctttggatctgcatttagggatgtttctgcccacactgctgcaccaggcgactgccgagcagcaagagcggtttttcatgcccgcttggaacctcgaaatcattgggacctatgcccagactgagatgggacacggaacacacctaagaggcctcgagacaacagctacttacgatccggaaacccaggagttcatcttgaacagtcctactgttacctctattaaatggtggccgggagggcttgggaagacatccaaccacgccatcgtgttggcacagttgattacaaaggggaaatgctatggcctgcatgctttcatagtaccaatccgggaaattggcacccacaaacccctgccgggtattaccgtgggtgatattggtcctaaatttgggtacgatgagattgataacggctacctgaagatggataaccatcggatccccagggagaatatgctgatgaaatacgcacaggtaaaacctgatggcacttacgtgaagccactatccaacaagttgacatatggcacaatggtctttgtgaggtcttttttggtgggtgaggctgctagagcgctgtccaaggcttgtactatagctattcgatattcagccgtgcgccaccagagcgaaattaagccgggagagccagagccacagatcctggactttcagacacaacagtacaaactcttccccctgttggcgacagcctacgccttccagttcgttggcgcctacatgaaggaaacctaccaccgtattaatgaagggatcggtcagggagatctgagcgaactgccagagcttcacgccctgacggccggtctcaaggcctttacctcctggacagccaataccggcattgaggcgtgtcgaatggcctgcggcggccatggctactcccactgctcaggtttacctaatatctacgttaactttacgccatcctgtacctttgagggggagaacactgtcatgatgctgcagacagccaggtttctgatgaagtcttacgatcaggtgcacagtggcaaactggtgtgcggtatggtgtcttaccttaacgatttgccatcgcaacgtattcagccccagcaggtcgccgtatggccaacaatggtcgacattaactcccctgagagcctaacagaggcttacaaacttcgtgctgcccggctagtcgagatcgccgctaagaatctccagaaggaggtcattcaccgcaagagtaaggaagtggcatggaatctgacctctgtggacctggtgcgggcctccgaagcacattgtcactatgtagtggtaaaactattctccgagaagctactcaagatacaggacaaggcaattcaggccgtgctccgctcgctctgcctcctctacagtctatatggaatctcgcaaaatgctggagatttccttcaggggtcaatcatgactgagccacaaataactcaagtaaatcagcgcgtcaaagagctgctgaccctcattcggtctgatgccgtcgccctcgtggacgcttttgacttccaggacgttacgctggggagcgtgctggggaggtatgacggaaatgtgtatgagaacttgttcgaatgggccaagaacagccctctgaataaggctgaagtacacgaatcttataagcacctgaagagcctacaatccaagctgtag

SEQ ID NO: 317706 - DNA, 1779 bp, Artificial Sequence
  derived and/or modified sequence
atggccgccttcatccagaggaccccagacaactggcacctgcggccagatggaaatggccccaggtttgtgcaccggggccggcctgagcccctggacctgcacctgggcatgttcctgcccaccctgctgcaccaggccacagctgagcagcaggagcgcttcttcatgcctgcctggaacctggagatcatcggcacctacgcccagacagagatgggccacggcacccacctgcggggcctggagaccacagccacctatgaccctgagacccaggagttcatcctgaacagccccaccgtgaccagcatcaagtggtggccaggcggcctgggcaagaccagcaaccacgccatcgtgctggcccagctgatcaccaagggcaagtgctacggcctgcacgccttcatcgtgcccatccgggagatcggcacccacaagcccctgcccggcatcaccgtgggggacatcggccccaagtttggctatgatgaaattgacaatggctacctgaagatggacaaccaccgcatcccccgggagaacatgctgatgaagtatgcccaggtgaagccagatggcacctacgtgaagcccctgagcaacaagctgacctacggcaccatggtgtttgtgcgctccttcctggtgggggaggccgcccgggccctgagcaaggcctgcaccatcgccatccgctacagcgctgtgcgccaccagagcgagatcaagccaggagagcctgagccccagatcctggacttccagacccagcagtacaagctgttccccctgctggccacagcctatgccttccagtttgtgggcgcctacatgaaggagacctaccaccgcatcaatgaaggaattggccagggcgacctgtctgagctgcctgagctgcacgccctgacagctggcctgaaggccttcacctcctggacagccaacacaggaattgaggcctgcaggatggcctgtggcggccacggctacagccactgcagcggcctgcccaacatctacgtgaacttcacccccagctgcacctttgaaggagaaaatacagtgatgatgctgcagacagcccgcttcctgatgaagagctatgaccaggtgcacagcggcaagctggtgtgtggcatggtgtcctacctgaatgacctgcccagccagaggatccagccccagcaggtggccgtgtggcccaccatggtggacatcaacagccctgagagcctgacagaggcctacaagctgcgggccgcccggctggtggagattgctgccaagaacctgcagaaggaggtgatccacaggaagagcaaggaggtggcctggaacctgacctctgtggacctggtgcgggccagcgaggcccactgccactacgtggtggtgaagctgttcagcgagaagctgctgaagatccaggacaaggccatccaggccgtgctgcggagcctgtgcctgctgtacagcctgtatggcatcagccagaatgctggggacttcctgcagggcagcatcatgacagagccccagatcacccaggtgaaccagagggtgaaggagctgctgaccctcatccgcagtgatgctgtggccctggtggatgcctttgacttccaggatgtgaccctgggctctgtgctgggccgctatgatggaaatgtgtatgagaacctgtttgagtgggccaagaacagccccctgaacaaggccgaggtgcatgagagctacaagcacctgaagagcctgcagagcaagctgtag

SEQ ID NO: 317707 - DNA, 1779 bp, Artificial Sequence
  derived and/or modified sequence
atggccgccttcatccagcggacccccgacaactggcacctgcggccggacggaaatggccctcgatttgtgcaccgcggccgtccagaacctttggacctgcacctgggaatgttcctgcctacgctgctgcatcaggcaactgccgagcagcaggagcggtttttcatgccggcatggaatctcgagatcattgggacatacgcacagaccgaaatgggacacggcacccacctaagagggctcgagacaaccgccacatatgatcccgagacccaggagtttatactgaattcacctacagttacgagcatcaagtggtggcctggtgggttgggcaagacttccaatcatgcgatcgtcctggctcagctgatcaccaagggtaaatgctatgggttacatgcctttattgtgccgatcagagaaatcgggacccacaagccgctgcccggtattaccgtgggagatataggacccaagtttgggtacgacgaaatagataacgggtatctgaagatggataaccacaggatcccccgcgagaacatgctgatgaagtatgcccaagttaagcccgacggtacctacgtgaagccactctccaacaaactgacttacggtactatggtctttgtgcgctcttttctggtgggcgaggcggctcgcgccctctcaaaagcgtgtactattgcaatcagatacagcgccgtgcgtcatcagtccgaaattaagcctggcgagcccgaacctcagatcctcgattttcagacgcagcagtacaagctctttcccctgctcgccaccgcctacgcattccaattcgtgggcgcctatatgaaagagacctatcatagaattaacgaaggcatcggtcagggcgatcttagcgagcttccagaactgcatgcattgaccgcgggcctcaaagcctttaccagttggacagccaataccggtattgaagcctgtcggatggcatgcggcggacatggctatagccattgctcgggcctccccaacatttatgtcaatttcacaccgtcatgtaccttcgagggagagaataccgttatgatgctccagaccgctcggtttctgatgaagtcttacgatcaggtacactctggcaagctggtgtgtggaatggtttcgtatcttaacgatcttccgagtcagcgtatccagcctcaacaggtggccgtgtggccaacgatggtcgatatcaattctcctgaatcactgacggaggcctacaagttgcgcgcggcacgcttagtggaaatcgccgctaagaatctacagaaagaagtgattcacaggaaaagcaaagaggtcgcatggaacctgacaagcgtcgacctggtgcgcgcttcggaagcacattgccactacgtggtggttaagctgttctctgaaaagttacttaagatccaggataaggccattcaggcagtgctgagatcactatgtctgctctacagcctctacggaatttctcagaacgctggagatttcctgcagggatctattatgactgagccccagattactcaggttaatcagcgagttaaagaactcctcactctgatcagaagtgatgcggtggccctggttgacgcctttgatttccaagacgtcactctcggctcagtgctgggaaggtatgacggcaacgtatacgaaaatttgtttgagtgggcgaagaactctcctctcaataaagcagaggtgcacgagtcttacaaacacctgaagtccctgcagagcaaactgtag

SEQ ID NO: 317708 - DNA, 1779 bp, Artificial Sequence
  derived and/or modified sequence
atggccgctttcatccagaggactccggataactggcacctgagacccgatggcaatggtccgaggttcgttcatagaggacggccagaacccctagatctgcatttgggtatgtttcttcccaccctgctacaccaagctacagcagagcaacaagaaagattcttcatgcctgcgtggaatctggaaataatagggacctatgcccaaactgaaatgggccatggcacacacctccgaggactggagacgaccgccacttatgacccggagacccaggagttcatactgaactcacctactgtcaccagcatcaagtggtggccaggcggactgggaaaaacgtccaatcatgcaatcgtgttggcacaactgattactaaggggaagtgctatggacttcacgcgttcatagtacccattcgcgaaattggtacccataaacctctgccaggaatcacagtgggtgacattggtcccaagtttgggtacgacgaaatcgataacggctacttaaaaatggacaaccaccgcatccctagagagaatatgctaatgaaatatgcccaggtcaagccggatgggacttacgtaaagccgctctcaaataagctgacctacgggacaatggtgttcgtgaggtccttcctagtgggggaggcagccagggccttatccaaggcatgcacaatagccatccggtactcagccgttcgccatcaatctgagataaagcccggtgagccagagccccagatattggactttcaaacccagcagtataagctgttccctttgctggcaactgcttacgcttttcagtttgtgggtgcttacatgaaagagacttaccacaggataaatgaaggtattggtcaaggtgacttgagtgagctaccagaattgcacgcgctgacggctggactcaaagcttttactagttggaccgccaacactggcatcgaagcctgcagaatggcttgtggtggacacggctactcccattgttctggtttaccaaacatatacgttaactttacaccctcttgcacattcgaaggagagaatactgtgatgatgctgcagactgctagatttctgatgaaaagttatgatcaggtgcattccgggaagctggtgtgtggaatggtgagttatctcaacgaccttccctcacagcgcattcagccacaacaagtcgcagtatggccaaccatggtggatataaattcaccagagtcactgactgaggcgtataaacttagggctgcgagactggtagagattgctgccaagaatttgcagaaggaagtgatacatagaaagtctaaagaggtggcttggaacctcacttcagtggatcttgtaagggctagtgaagctcattgtcattacgttgtggtgaagctctttagcgaaaaactcctgaagattcaggacaaagctatccaggcagtactccgctctttgtgcttgctgtatagcctttatggaataagccaaaatgctggcgattttctgcagggaagtattatgacggaaccacagattactcaggtgaaccaacgtgtaaaggagctacttaccttgattcgctctgacgccgtggcattagtcgacgcctttgacttccaggacgtcaccctagggtccgtgctcgggagatacgacggaaatgtctacgaaaatctgttcgaatgggctaagaacagtccccttaataaggcggaggtgcacgagtcatataagcatctgaaaagtcttcagagcaaactgtag

SEQ ID NO: 317709 - DNA, 1779 bp, Artificial Sequence
  derived and/or modified sequence
atggccgccttcatccagagaacccccgacaactggcacctgagacccgacggcaacggccccagattcgtgcacagaggcagacccgagcccctggacctgcacctgggcatgttcctgcccaccctgctgcaccaggccaccgccgagcagcaggagagattcttcatgcccgcctggaacctggagatcatcggcacctacgcccagaccgagatgggccacggcacccacctgagaggcctggagaccaccgccacctacgaccccgagacccaggagttcatcctgaacagccccaccgtgaccagcatcaagtggtggcccggcggcctgggcaagaccagcaaccacgccatcgtgctggcccagctgatcaccaagggcaagtgctacggcctgcacgccttcatcgtgcccatcagagagatcggcacccacaagcccctgcccggcatcaccgtgggcgacatcggccccaagttcggctacgacgagatcgacaacggctacctgaagatggacaaccacagaatccccagagagaacatgctgatgaagtacgcccaggtgaagcccgacggcacctacgtgaagcccctgagcaacaagctgacctacggcaccatggtgttcgtgagaagcttcctggtgggcgaggccgccagagccctgagcaaggcctgcaccatcgccatcagatacagcgccgtgagacaccagagcgagatcaagcccggcgagcccgagccccagatcctggacttccagacccagcagtacaagctgttccccctgctggccaccgcctacgccttccagttcgtgggcgcctacatgaaggagacctaccacagaatcaacgagggcatcggccagggcgacctgagcgagctgcccgagctgcacgccctgaccgccggcctgaaggccttcaccagctggaccgccaacaccggcatcgaggcctgcagaatggcctgcggcggccacggctacagccactgcagcggcctgcccaacatctacgtgaacttcacccccagctgcaccttcgagggcgagaacaccgtgatgatgctgcagaccgccagattcctgatgaagagctacgaccaggtgcacagcggcaagctggtgtgcggcatggtgagctacctgaacgacctgcccagccagagaatccagccccagcaggtggccgtgtggcccaccatggtggacatcaacagccccgagagcctgaccgaggcctacaagctgagagccgccagactggtggagatcgccgccaagaacctgcagaaggaggtgatccacagaaagagcaaggaggtggcctggaacctgaccagcgtggacctggtgagagccagcgaggcccactgccactacgtggtggtgaagctgttcagcgagaagctgctgaagatccaggacaaggccatccaggccgtgctgagaagcctgtgcctgctgtacagcctgtacggcatcagccagaacgccggcgacttcctgcagggcagcatcatgaccgagccccagatcacccaggtgaaccagagagtgaaggagctgctgaccctgatcagaagcgacgccgtggccctggtggacgccttcgacttccaggacgtgaccctgggcagcgtgctgggcagatacgacggcaacgtgtacgagaacctgttcgagtgggccaagaacagccccctgaacaaggccgaggtgcacgagagctacaagcacctgaagagcctgcagagcaagctgtag

SEQ ID NO: 317710 - DNA, 2417 bp, Artificial Sequence
  derived and/or modified sequence
agattgtcactgccacctcggtcggtgcttacttcgctgccagctggtcgtcgccatgaacccggacctgcgcagggagcgggattccgccagcttcaacccggagctgcttacacacatcctggacggcagccccgagaaaacccggcgccgccgagagatcgagaacatgatcctgaacgacccagacttccagcatgaggacttgaacttcctcactcgcagccagcgttatgaggtggctgtcaggaaaagtgccatcatggtgaagaagatgagggagtttggcatcgctgaccctgatgaaattatgtggtttaaaaaactacatttggtcaattttgtggaacctgtgggcctcaattactccatgtttattcctaccttgctgaatcagggcaccactgctcagaaagagaaatggctgctttcatccaaaggactccagataattggcacctacgcccagacggaaatgggccacgttttgtgcaccgagggcggcctgagcctctggatcttcacttgggcatgttcctgcccaccttgcttcaccaggcaactgcggagcagcaggagcgcttcttcatgcccgcctggaacttggagatcattggcacttatgcccagacagagatgggtcatggaactcaccttcgaggcttggaaaccacagccacgtatgaccctgaaacccaggagttcattctcaacagtcctactgtgacctccattaaatggtggcctggtgggcttggaaagacttcaaatcatgcaatagttcttgcccagctcatcactaaggggaaatgctatggattacatgcctttatcgtacctattcgtgaaatcgggacccataagcctttgccaggaattaccgttggtgacatcggccccaaatttggttatgatgagatagacaatggctacctcaaaatggacaaccatcgtattcccagagaaaacatgctgatgaagtatgcccaggtgaagcctgatggcacatacgtgaaaccgctgagtaacaagctgacttacgggaccatggtgtttgtcaggtccttccttgtgggagaagctgctcgggctctgtctaaggcgtgcaccattgccatccgatacagcgctgtgaggcaccagtctgaaatcaagccaggtgaaccagaaccacagattttggattttcaaacccagcagtataaactctttccactcctggccactgcctatgccttccagtttgtgggcgcatacatgaaggagacctatcaccggattaacgaaggcattggtcaaggggacctgagtgaactgcctgagcttcatgccctcaccgctggactgaaggctttcacctcctggactgcaaacactggcattgaagcatgtcggatggcttgtggtgggcatggctattctcattgcagtggtcttccaaatatttatgtcaatttcaccccaagctgtacctttgagggagaaaacactgtcatgatgctccagacggctaggttcctgatgaaaagttatgatcaggtgcactcaggaaagttggtgtgtggcatggtgtcctatttgaacgacctgcccagtcagcgcatccagccacagcaggtagcagtctggccaaccatggtggatatcaacagccccgaaagcctaaccgaagcatataaactccgtgcagccagattagtagaaattgctgcaaaaaaccttcaaaaagaagtgattcacagaaaaagcaaggaggtagcttggaacctaacttctgttgaccttgttcgagcaagtgaggcacattgccactatgtggtagttaagctcttttcagaaaaactcctcaaaattcaagataaagccattcaagctgtcttaaggagtttatgtctgctgtattctctgtatggaatcagtcagaacgcgggggatttccttcaggggagcatcatgacagagcctcagattacacaagtaaaccagcgtgtaaaggagttactcactctgattcgctcagatgctgttgctttggttgatgcatttgattttcaggatgtgacacttggctctgtgcttggccgctatgatgggaatgtgtatgaaaacttgtttgagtgggctaagaactccccactgaacaaagcagaggtccacgaatcttacaagcacctgaagtcactgcagtccaagctctgaagtgtcacaaggacaagtttaatctgcttcagaaagcgcctgtgtgcaactcaaattttgtggaatctttttcgaattcaaatagctatagagcaaatgataaattgacccctttttataaatggagggaaaaaatgaacagatttcagagattaaatgaaaaaaagcagatgttttaagtgcaattaacactgaaagagacctgttaaaccattcag

SEQ ID NO: 317711 - DNA, 981 bp, Artificial Sequence
  derived and/or modified sequence
atgctgggcggcgtgggcgaggagaacgagaagctgtggagcttcaccaagaaggccagccacatccagctggacagcctgcccgaggtgcccctgctggtggacgtgccctgcctgagcgcccagctggacgacagcatcctgaacatcgtgaaggaccacatcttcaagcacggcaccgtggccagcagaccccccgtgcagatcgaggagctgatcgagaagcccggcggcatcatcgtgagatggtgcaaggtggacgacgacttcaccgcccaggactacagactgcagttcagaaagtgcaccagcaaccacttcgaggacgtgtacgtgggcagcgagaccgagttcatcgtgctgcacatcgaccccaacgtggactaccagttcagagtgtgcgccagaggcgacggcagacaggagtggagcccctggagcgtgccccagatcggccacagcaccctggtgccccacgagtggaccgccggcttcgagggctacagcctgagcagcagaagaaacatcgccctgagaaacgacagcgagagcagcggcgtgctgtacagcagagcccccacctacttctgcggccagaccctgaccttcagagtggagaccgtgggccagcccgacagaagagacagcatcggcgtgtgcgccgagaagcaggacggctacgacagcctgcagagagaccaggccgtgtgcatcagcaccaacggcgccgtgttcgtgaacggcaaggagatgaccaaccagctgcccgccgtgaccagcggcagcaccgtgaccttcgacatcgaggccgtgaccctgggcaccaccagcaacaacgagggcggccacttcaagctgagagtgaccatcagcagcaacaacagagaggtggtgttcgactggctgctggaccagagctgcggcagcctgtacttcggctgcagcttcttctaccccggctggaaggtgctggtgttctag

SEQ ID NO: 317712 - DNA, 981 bp, Artificial Sequence
  derived and/or modified sequence
atgctggggggcgtgggtgaagagaatgaaaagctgtggtcattcaccaaaaaagcttctcacatccaattagacagtctcccagaggtccctctgctggtggatgtgccgtgcttgtcagcacagctggatgacagcatcctcaatattgttaaggaccatatcttcaagcatggtaccgtggctagccggcctccagtgcagatcgaggagcttatcgagaagccgggcggtatcatcgtgcgatggtgtaaggtggatgacgactttacagcccaggactacaggttacagtttaggaagtgcaccagcaatcatttcgaggacgtctacgtgggatccgagacagagttcattgtcctccatatcgatcctaacgtggattaccagttccgagtctgcgctcgcggtgatggccgccaagagtggagcccatggtccgtgccacaaatcggccattcaaccctggttcctcacgaatggacggctggcttcgagggctattcactgtcatcacgcagaaatatcgccttgcggaacgactctgagagcagtggtgtcttgtactctcgtgcacccacctacttttgcggccagacgctcaccttcagagttgagacagtcgggcagcctgaccgccgcgacagtatcggcgtgtgcgctgaaaaacaggacggctatgactctctgcagagagatcaggccgtgtgcatcagtacaaacggtgccgtgtttgtgaacgggaaggagatgaccaaccagctgccagcagttactagcggttccactgtcacatttgacatcgaagctgtaaccctcgggaccactagtaataatgaaggagggcactttaaacttagggtgactattagcagtaacaacagagaagtcgtttttgattggctgctggaccagtcttgtgggagcctgtacttcggctgctccttcttctaccccggctggaaggtgcttgtgttttag

SEQ ID NO: 317713 - DNA, 981 bp, Artificial Sequence
  derived and/or modified sequence
atgctgggcggcgtgggggaggagaatgagaagctgtggagcttcaccaagaaggccagccacatccagctggacagcctgcctgaggtgcccctgctggtggatgtgccctgcctgagcgcccagctggatgacagcatcctgaacatcgtgaaggaccacatcttcaagcacggcaccgtggccagcaggcctcctgtgcagatcgaggagctgattgagaagccaggcggcatcatcgtgcgctggtgcaaggtggatgatgacttcaccgcccaggactaccgcctgcagttcaggaagtgcaccagcaaccactttgaagatgtgtatgtgggcagcgagacagagttcatcgtgctgcacatcgaccccaacgtggactaccagttccgggtgtgtgcccggggagatggccggcaggagtggagcccctggagcgtgccccagatcggccacagcaccctggtgccccatgagtggacagctggctttgagggctacagcctgagcagcagaagaaacatcgccctgagaaatgacagcgagagcagtggagtgctgtacagccgggcccccacctacttctgtggccagaccctgaccttccgggtggagaccgtgggccagcctgacagaagagacagcattggagtgtgtgccgagaagcaggacggctatgacagcctgcagagggaccaggccgtgtgcatcagcaccaatggagctgtgtttgtgaatggcaaggagatgaccaaccagctgcctgctgtgaccagcggcagcacagtgacctttgacatcgaggccgtgaccctgggcaccaccagcaacaatgaaggaggccacttcaagctgcgggtgaccatcagcagcaacaaccgggaggtggtgtttgactggctgctggaccagagctgtggcagcctgtacttcggctgcagcttcttctacccaggctggaaggtgctggtgttctag

SEQ ID NO: 317714 - DNA, 981 bp, Artificial Sequence
  derived and/or modified sequence
atgctgggcggcgtgggcgaggagaacgagaagctgtggagcttcaccaagaaggcgtcgcatatccaactggacagcctgcctgaagtccccctgctcgtggatgtgccatgtctaagcgcgcagttggacgatagcattctcaacattgtgaaggaccatatcttcaagcatggcacggtcgcttcccgccctcctgtgcaaattgaagaattaatagagaaaccaggcgggataatagtaagatggtgcaaggtggacgatgacttcactgcccaggactatcgcttgcagttccgcaagtgtacttctaatcatttcgaagatgtatacgttggcagcgagaccgaattcattgtgttgcacattgacccaaatgtcgactaccagtttagggtgtgcgccaggggagacggaaggcaggagtggtctccctggagcgtccctcagattggtcactcaaccctggtcccccatgagtggacagctggattcgaaggatattcactgagctctcgcaggaacatagcactacgcaacgacagcgaaagtagcggggttctgtattctcgtgctcccacttacttctgcggacagacactaacgttcagagtcgaaaccgtgggacagcccgatcggagggatagtattggagtgtgcgcagagaagcaggacggctacgacagtctgcagagagatcaggcagtgtgcatttctaccaacggagcagtcttcgtgaatggcaaggagatgacaaatcagctgccagccgtgacttccggcagcacggtgacatttgacatcgaggccgtcacactaggaacgacctcgaacaacgaagggggccactttaagttgagagtgacgatcagctccaataacagggaagtggtgtttgactggcttctagaccagagctgtggctccctgtatttcggttgttcgtttttctatccagggtggaaggtgttggtgttctag

SEQ ID NO: 317715 - DNA, 981 bp, Artificial Sequence
  derived and/or modified sequence
atgctcggaggcgtgggcgaggaaaatgaaaaactctggagttttacgaagaaggcttcccacatccagctcgactcccttcccgaggtcccactgctggtcgacgttccctgcttgtcagcacagcttgatgactctatactgaacattgtgaaagaccacatcttcaaacacgggacagtcgcctcaagaccccctgtacagatagaagagctcatagaaaaacctgggggtatcatcgtgcgatggtgtaaggtggacgatgattttactgcccaggactatcggcttcagtttcgaaaatgtactagcaaccacttcgaggatgtctatgtcggatctgaaacagagttcattgtcctacacatcgaccctaatgtagattaccaatttagggtttgtgcgaggggcgacgggcgacaggaatggagtccctggtcagttcctcaaattggccattccaccctcgttccccacgagtggaccgctgggttcgagggctattccctgtcgagtcgtcgtaacattgctttgaggaatgatagtgagtcaagcggtgtgctgtattcccgagcccctacttacttctgtggacagacacttactttccgggtggagactgtcggccaacccgatagacgggatagtatcggggtatgcgccgaaaagcaggacggttacgattccctgcagagagatcaggcagtatgtatctccacgaatggcgctgtattcgtgaacgggaaggaaatgactaaccagctgcccgcagtgacaagtgggtctaccgtaacttttgacatcgaggctgtcacgctagggaccacttctaacaacgagggcggacactttaaactgcgggtgaccatttctagcaataatcgcgaagtcgtgttcgactggctgctcgaccaatcctgcggctccctctatttcggctgcagttttttttatcctgggtggaaagtgcttgtcttttag

SEQ ID NO: 317716 - DNA, 1392 bp, Artificial Sequence
  derived and/or modified sequence
ttcgccggccgcgcggccagatgaggggggcgatggagctggagcctgagctgctgttgcaggaggcccgcgagaacgtggaggcagcgcagagctaccggcgggagctgggtcaccggcttgaggggctgcgtgaggcgcggaggcaggtgaaatcgccatgcttggtggtgtgggagaagagaatgagaaactgtggagctttaccaaaaaggcctcgcacattcagttggacagcttaccagaagtacctttactggttgatgtgccttgtttatctgctcagttggatgactcaattcttaacatagtgaaagaccacatttttaagcatggaacagtagcatctcgcccaccagtacagatagaagaactaatagagaaacctggaggcatcattgtacgatggtgtaaggtggatgatgactttacagcccaagattacaggctccagtttcgtaaatgtacttcaaatcattttgaggatgtatatgtaggttctgaaactgaattcatagtattgcacatagaccccaacgttgattaccagttcagagtctgcgcccgaggagatggccgacaggagtggagtccttggagtgtcccccagataggtcattccacattggtgcctcatgagtggacagctggttttgaggggtacagtctgagcagtcgaagaaatatagcacttcggaacgattctgaatcatcgggtgttctctactccagagctccgacttatttctgtgggcagacattaacattcagagttgaaactgtgggacagccagacagaagagatagcataggagtgtgtgcagaaaaacaggatggatatgactctctgcagcgggatcaagctgtgtgcattagtacaaatggtgcagtttttgtcaatggaaaagaaatgacaaatcagttacccgcagttacttctgggtccactgtcacgtttgacattgaagccgtgactctaggaaccaccagtaataatgaaggtggacacttcaagcttcgagtaactataagttcaaataatagagaagtggtttttgactggttacttgatcagtcttgtggttctctttactttggatgctcatttttctatcctggatggaaagtgttagtgttttagatgtttgggtgcttggctttggttttcagggtctaacgtagctgtcctcagcccagcgtagttgtaattgctttaaaaaaaaagttgaattcatctctaacttaggccattggaaagtgtttactggattcattttgtaatattttagcaaaaagagacttcaatgttgtggacaaaatcatacaattcagtcaattttatttttagcatactgttaaatatcacatcacaataaaaatcaaattggcatt

SEQ ID NO: 317717 - protein, 184 aa, Artificial Sequence [sequence omitted]

SEQ ID NO: 317718 - protein, 738 aa, Artificial Sequence
  derived and/or modified sequence
MQPRWAQGATMWLGVLLTLLLCSSLEGQENSFTINSVDMKSLPDWTVQNGKNLTLQCFADVSTTSHVKPQHQMLFYKDDVLFYNISSMKSTESYFIPEVRIYDSGTYKCTVIVNNKEKTTAEYQVLVEGVPSPRVTLDKKEAIQGGIVRVNCSVPEEKAPIHFTIEKLELNEKMVKLKREKNSRDQNFVILEFPVEEQDRVLSFRCQARIISGIHMQTSESTKSELVTVTESFSTPKFHISPTGMIMEGAQLHIKCTIQVTHLAQEFPEIIIQKDKAIVAHNRHGNKAVYSVMAMVEHSGNYTCKVESSRISKVSSIVVNITELFSKPELESSFTHLDQGERLNLSCSIPGAPPANFTIQKEDTIVSQTQDFTKIASKSDSGTYICTAGIDKVVKKSNTVQIVVCEMLSQPRISYDAQFEVIKGQTIEVRCESISGTLPISYQLLKTSKVLENSTKNSNDPAVFKDNPTEDVEYQCVADNCHSHAKMLSEVLRVKVIAPVDEVQISILSSKVVESGEDIVLQCAVNEGSGPITYKFYREKEGKPFYQMTSNATQAFWTKQKASKEQEGEYYCTAFNRANHASSVPRSKILTVRVILAPWKKGLIAVVIIGVIIALLIIAAKCYFLRKAKAKQMPVEMSRPAVPLLNSNNEKMSDPNMEANSHYGHNDDVRNHAMKPINDNKEPLNSDVQYTEVQVSSAESHKDLGKKDTETVYSEVRKAVPDAVESRYSRTEGSLDGT

SEQ ID NO: 317719 - protein, 230 aa, Artificial Sequence
  derived and/or modified sequence
MQPRWAQGATMWLGVLLTLLLCSSLEGQENSFTINSVDMKSLPDWTVQNGKNLTLQCFADVSTTSHVKPQHQMLFYKDDVLFYNISSMKSTESYFIPEVRIYDSGTYKCTVIVNNKEKTTAEYQVLVEGVPSPRVTLDKKEAIQGGIVRVNCSVPEEKAPIHFTIEKLELNEKMVKLKREKNSRDQNFVILEFPVEEQDRVLSFRCQARIISGIHMQTSESTKSELVTVT

SEQ ID NO: 317720 - DNA, 2217 bp, Artificial Sequence
  derived and/or modified sequence
atgcagcccagatgggcccagggcgccaccatgtggctgggcgtgctgctgaccctgctgctgtgcagcagcctggagggccaggagaacagcttcaccatcaacagcgtggacatgaagagcctgcccgactggaccgtgcagaacggcaagaacctgaccctgcagtgcttcgccgacgtgagcaccaccagccacgtgaagccccagcaccagatgctgttctacaaggacgacgtgctgttctacaacatcagcagcatgaagagcaccgagagctacttcatccccgaggtgagaatctacgacagcggcacctacaagtgcaccgtgatcgtgaacaacaaggagaagaccaccgccgagtaccaggtgctggtggagggcgtgcccagccccagagtgaccctggacaagaaggaggccatccagggcggcatcgtgagagtgaactgcagcgtgcccgaggagaaggcccccatccacttcaccatcgagaagctggagctgaacgagaagatggtgaagctgaagagagagaagaacagcagagaccagaacttcgtgatcctggagttccccgtggaggagcaggacagagtgctgagcttcagatgccaggccagaatcatcagcggcatccacatgcagaccagcgagagcaccaagagcgagctggtgaccgtgaccgagagcttcagcacccccaagttccacatcagccccaccggcatgatcatggagggcgcccagctgcacatcaagtgcaccatccaggtgacccacctggcccaggagttccccgagatcatcatccagaaggacaaggccatcgtggcccacaacagacacggcaacaaggccgtgtacagcgtgatggccatggtggagcacagcggcaactacacctgcaaggtggagagcagcagaatcagcaaggtgagcagcatcgtggtgaacatcaccgagctgttcagcaagcccgagctggagagcagcttcacccacctggaccagggcgagagactgaacctgagctgcagcatccccggcgccccccccgccaacttcaccatccagaaggaggacaccatcgtgagccagacccaggacttcaccaagatcgccagcaagagcgacagcggcacctacatctgcaccgccggcatcgacaaggtggtgaagaagagcaacaccgtgcagatcgtggtgtgcgagatgctgagccagcccagaatcagctacgacgcccagttcgaggtgatcaagggccagaccatcgaggtgagatgcgagagcatcagcggcaccctgcccatcagctaccagctgctgaagaccagcaaggtgctggagaacagcaccaagaacagcaacgaccccgccgtgttcaaggacaaccccaccgaggacgtggagtaccagtgcgtggccgacaactgccacagccacgccaagatgctgagcgaggtgctgagagtgaaggtgatcgcccccgtggacgaggtgcagatcagcatcctgagcagcaaggtggtggagagcggcgaggacatcgtgctgcagtgcgccgtgaacgagggcagcggccccatcacctacaagttctacagagagaaggagggcaagcccttctaccagatgaccagcaacgccacccaggccttctggaccaagcagaaggccagcaaggagcaggagggcgagtactactgcaccgccttcaacagagccaaccacgccagcagcgtgcccagaagcaagatcctgaccgtgagagtgatcctggccccctggaagaagggcctgatcgccgtggtgatcatcggcgtgatcatcgccctgctgatcatcgccgccaagtgctacttcctgagaaaggccaaggccaagcagatgcccgtggagatgagcagacccgccgtgcccctgctgaacagcaacaacgagaagatgagcgaccccaacatggaggccaacagccactacggccacaacgacgacgtgagaaaccacgccatgaagcccatcaacgacaacaaggagcccctgaacagcgacgtgcagtacaccgaggtgcaggtgagcagcgccgagagccacaaggacctgggcaagaaggacaccgagaccgtgtacagcgaggtgagaaaggccgtgcccgacgccgtggagagcagatacagcagaaccgagggcagcctggacggcacctag

SEQ ID NO: 317721 - DNA, 2217 bp, Artificial Sequence
  derived and/or modified sequence
atgcagccacgatgggctcaaggcgcaacaatgtggcttggtgtgttgctgacgctgctcttgtgctcatctctagaaggtcaggagaactcattcaccatcaattccgtggacatgaaatcactgcccgattggactgtccagaatggtaagaatcttaccctccaatgcttcgccgacgtgagtactacctctcacgtaaaaccacagcatcagatgctgttttataaggacgacgtgctcttctacaatatcagctccatgaagtccaccgagtcttactttattccagaagtccggatctatgactcaggaacctacaaatgcactgtgatcgtgaacaacaaggaaaagacgactgctgagtaccaggttctggtggagggtgtcccctcgccccgcgtcacactggataaaaaggaggcgatccagggcggcattgtgcgcgtcaactgtagtgtcccggaggagaaagctcccatccattttacaattgaaaaattggagttgaatgaaaaaatggtcaaactgaagcgtgagaaaaattcaagagatcagaacttcgtgattttggaattccccgtggaggagcaggatagagtcctcagctttcgttgccaggcgcggattatctccggtatccatatgcagacgagcgagtccacaaagtcagagttggtcacagtgacagagtctttctcaactcctaagttccatatcagccctactggtatgattatggaaggagcccagctgcatatcaaatgcaccattcaagtgacccacttggcacaggagttccccgaaattatcatccagaaagataaagctattgtggcacataatcgccacgggaacaaagccgtttatagcgtcatggcgatggtggagcattcaggcaactacacgtgtaaagttgagtcaagcaggatatctaaggtgtcctccatcgtggttaacatcacagagttatttagcaaaccggaactcgaatctagcttcactcatctagatcagggcgagagacttaacctctcttgttccatccctggggccccacccgcaaacttcactattcagaaagaggataccatcgtgagccaaacgcaggacttcactaagatagccagtaagtctgactctgggacctatatctgtactgccggtatcgataaggtggtaaaaaaaagcaataccgtgcaaattgtggtttgcgaaatgctttcacaacccaggatatcttatgacgctcaatttgaggtaataaaggggcagacaattgaggtgcgttgcgaatcgatatctggtactctgccaattagttaccagctgctgaaaacatccaaggtgctggagaattcgactaagaattctaacgaccccgccgtgtttaaggacaatccgacagaggatgtggaataccagtgcgtggcggacaattgtcatagtcacgctaagatgctgtcagaggtgctgcgggtgaaggttattgctcccgttgatgaggtccaaatttcaatcctgtcttccaaggtggtggaatctggggaggatattgtactgcaatgcgcggttaatgagggttctggccccattacatacaagttctatcgagaaaaagagggaaagcctttctaccagatgacgtctaatgccacacaggccttttggactaagcagaaggcttcaaaggaacaggagggcgagtactattgcacggcctttaatcgtgctaaccacgccagcagcgtccctaggtccaaaatcctgaccgttcgggtaattttggccccttggaagaagggactcatagcagtggtgatcataggagtgatcatagcgctattaatcatcgctgccaagtgttactttttgcggaaggcaaaagccaagcagatgcccgtggagatgagccgccccgcggtccctttactaaactccaataatgagaaaatgagtgacccaaacatggaggccaactctcactacggccacaatgatgacgtgcggaatcacgccatgaaacccatcaacgacaacaaggaacccctgaactctgatgtgcaatacacagaggtgcaggttagctccgctgagagtcacaaggacctcggaaagaaagacacggaaacagtctactccgaggtccgcaaggcagttcccgacgcggtggagagcaggtatagccgcacagaggggtcccttgacggtacctag

SEQ ID NO: 317722 - DNA, 2217 bp, Artificial Sequence
  derived and/or modified sequence
atgcagccccgctgggcccagggcgccaccatgtggctgggcgtgctgctgaccctgctgctgtgcagcagcctggagggccaggagaacagcttcaccatcaacagcgtggacatgaagagcctgcctgactggacagtgcagaatggcaagaacctgaccctgcagtgctttgctgatgtgtccaccaccagccacgtgaagccccagcaccagatgctgttctacaaggatgatgtgctcttctacaacatcagctccatgaagagcacagagagctacttcatccctgaggtgcgcatctatgacagcggcacctacaagtgcaccgtcatcgtgaacaacaaggagaagaccacagctgagtaccaggtgctggtggagggcgtgcccagcccccgggtgaccctggacaagaaggaggccatccagggcggcatcgtgcgggtgaactgcagcgtgcctgaggagaaggcccccatccacttcaccatcgagaagctggagctgaatgagaagatggtgaagctgaagcgggagaagaacagccgggaccagaacttcgtcatcctggagttccctgtggaggagcaggacagagtgctgtccttccgctgccaggcccgcatcatcagcggcatccacatgcagaccagcgagagcaccaagtctgagctggtgacagtgacagagagcttcagcacccccaagttccacatcagccccaccggcatgatcatggagggcgcccagctgcacatcaagtgcaccatccaggtgacccacctggcccaggagttccctgagatcatcatccagaaggacaaggccatcgtggcccacaacagacatggcaacaaggctgtgtacagcgtgatggccatggtggagcacagcggcaactacacctgcaaggtggagagcagccgcatcagcaaggtgagcagcatcgtggtgaacatcacagagctgttcagcaagccagagctggagagcagcttcacccacctggaccagggcgagcggctgaacctgagctgcagcatccctggggcccccccagccaacttcaccatccagaaggaggacaccatcgtgtcccagacccaggacttcaccaagatcgccagcaagagtgacagcggcacctacatctgcacagctggcatcgacaaggtggtgaagaagagcaacacagtgcagatcgtggtgtgtgagatgctgagccagccccgcatctcctatgatgcccagtttgaagtcatcaagggccagaccatcgaggtgcgctgtgagagcatcagcggcaccctgcccatctcctaccagctgctgaagaccagcaaggtgctggagaacagcaccaagaacagcaatgaccctgctgtgttcaaggacaaccccacagaagatgtggagtaccagtgtgtggccgacaactgccacagccacgccaagatgctgtctgaggtgctgcgggtgaaggtgattgcccctgtggatgaggtgcagatcagcatcctgagcagcaaggtggtggagagcggagaagatattgtgctgcagtgtgctgtgaatgaaggcagcggccccatcacctacaagttctaccgggagaaggagggcaagcccttctaccagatgaccagcaatgccacccaggccttctggaccaagcagaaggccagcaaggagcaggagggggagtactactgcacagccttcaacagagccaaccacgccagctctgtgcccaggagcaagatcctgactgtgcgggtcatcctggccccctggaagaagggcctgattgctgtggtgatcattggagtcatcatcgccctgctgatcatcgccgccaagtgctacttcctgaggaaggccaaggccaagcagatgcctgtggagatgagcaggcctgctgtgcccctgctgaacagcaacaatgagaagatgtctgaccccaacatggaggccaacagccactacggccacaatgatgatgtgaggaaccacgccatgaagcccatcaatgacaacaaggagcccctgaacagtgatgtgcagtacacagaggtgcaggtgtcctctgctgagagccacaaggacctgggcaagaaggacacagaaacagtgtacagcgaggtgaggaaggctgtgcctgatgctgtggagagccgctacagcaggacagagggcagcctggatggcacctag

SEQ ID NO: 317723 - DNA, 2217 bp, Artificial Sequence
  derived and/or modified sequence
atgcagccccggtgggcccagggcgccaccatgtggctgggcgtgctgctaaccttgctcctgtgctcaagtctggaagggcaggagaattcgttcactattaacagcgtggatatgaagagcctccctgactggacggtccaaaacggcaagaacctgactctccagtgcttcgctgacgtgtcaacgaccagccacgtcaaaccccagcatcagatgctattttataaggatgacgtactgttttacaatatctctagcatgaagtcaaccgagtcatacttcatccctgaggtccgcatttacgattcagggacatacaagtgcacagttatcgtgaataacaaagagaagaccacagcagaatatcaggtcctggtggagggtgtgccttctcctcgggttacgctggacaaaaaggaggctattcaaggaggaatcgtgcgagtcaattgtagtgtcccagaggaaaaggctccaattcattttactattgaaaaactggagttaaatgaaaaaatggttaagcttaaacgggaaaaaaacagccgagaccaaaactttgtgatcctggaattcccagtggaggagcaggaccgcgtgctctcatttcgatgccaagccagaatcatatctggcattcacatgcagacaagcgaaagtaccaagtcagagttggtcactgtgaccgaatctttctccacccccaaattccatatctcccctaccggaatgatcatggaaggggctcagttacatatcaagtgtacaatccaggtcacccacctggcccaagagttcccagaaattataatccaaaaagataaagctattgtcgctcacaaccgtcacggtaacaaagcagtctacagtgtgatggccatggtcgaacattcggggaattacacttgcaaggtggaatcgagcaggataagcaaggtatcttcaatcgtggtgaatattacagaacttttctctaaaccagaactcgaatcgagttttacgcacctagatcaaggcgagcgcttaaatctgtcttgtagtatacctggcgccccccccgctaacttcactatccagaaggaggatacaatcgtttcccagacacaggactttaccaaaatagccagtaaatctgactccggtacgtacatttgtacggcaggtatcgataaagtcgtaaaaaagtcaaacaccgtacagatagtggtgtgcgagatgttatcacagcccagaatatcctatgatgctcaattcgaagtgatcaagggacagacaatcgaagtgagatgcgagagcatttctggaacactgcctataagctaccagctcctgaagacatctaaggtgctggaaaacagcaccaaaaattccaatgacccagccgttttcaaagataacccgactgaagatgtcgaataccagtgcgtcgcggacaattgtcactcgcacgcaaagatgttgtctgaggtcctgcgcgtaaaagtaattgctcctgtggatgaagtccagatttctatcctttccagcaaagttgttgagagcggggaggacattgtgctccaatgcgcagtgaatgaagggagtggccctataacatacaagttctacagggagaaggaggggaagccattttaccaaatgacttccaacgcaacccaggcattctggactaaacagaaggccagcaaagaacaggagggggagtattattgtaccgctttcaatagagcaaaccacgcaagcagcgtgccgcgatctaaaattctgactgtgcgcgtaattctcgctccatggaagaaaggcctgattgctgtcgtgatcataggagtcataattgcactgctgatcatcgccgctaagtgttactttctgcgcaaagcgaaggctaaacagatgccagtggagatgtccagacctgccgttccattgctgaactcaaacaatgaaaaaatgagcgatcccaacatggaggccaattctcattatggccacaatgacgacgttagaaaccatgctatgaaacctattaatgataataaagagccactcaattccgacgtccagtacactgaggtgcaggtgtcatccgctgagtcccataaagatcttggtaagaaggacacagaaacagtgtactctgaggtccgaaaggccgtcccggatgctgtggaatctcgctattcccgtacagagggatccctagatggcacctag

SEQ ID NO: 317724 - DNA, 2217 bp, Artificial Sequence
  derived and/or modified sequence
atgcagcccaggtgggcccagggtgccaccatgtggttgggagtgttgctgactctgctgctgtgtagttctctagaaggacaggaaaactcattcaccatcaatagcgtcgatatgaaatcacttccagattggacggtgcagaatggtaagaatttgactctccagtgcttcgctgacgtaagtactacatcccacgtaaaacctcagcaccagatgctcttctacaaggacgatgtgcttttttacaacatctcatccatgaaatcaaccgagagttatttcatcccggaagttagaatctatgatagcggcacctacaagtgtaccgttattgttaataacaaggagaaaactaccgccgagtaccaggtactcgtggaaggcgtgccctccccgagagtgacactggacaagaaagaagctatacaaggaggcatcgtgagggtcaattgctccgtgccagaggaaaaagcaccgatacacttcaccatcgagaagcttgaactcaatgagaagatggtgaaactcaaaagggagaaaaactccagggatcagaactttgtgatcttggaattcccggtcgaggagcaggatagggtgctgtcatttcgatgccaagccagaatcatctctggaatacacatgcagacaagcgaatctactaaatctgagctggtgacagtgactgagtctttctcaacacccaagttccacattagccctaccggcatgatcatggaaggggctcagcttcacatcaagtgcacaatccaagtgactcatctggcgcaggagttccctgaaatcatcatacagaaagataaggctatagttgctcataaccggcatggtaacaaggccgtatactcagtaatggctatggttgaacattcgggcaattacacatgcaaggtggagtcttcacgaatctccaaagtgagttctatagtcgtgaacatcacagagctttttagcaaaccagagttagagtcttcgttcacacacctggaccaaggcgaaaggctaaatttgtcatgctctatccccggagctccgcctgctaactttacaatccagaaagaggacactatagttagccagactcaggacttcaccaaaattgcttctaagtccgattcggggacgtacatctgtactgccggtattgacaaggtcgtcaaaaaatctaacacagttcagatcgttgtgtgtgaaatgctctctcagccacgcatttcatacgacgcccagttcgaagtcataaaaggacaaactattgaagtaaggtgcgaatccattagcggcacactccccatctcttatcagctgctcaagactagtaaagtgctcgagaatagcacgaagaacagcaatgaccctgccgtattcaaggataaccccaccgaggacgtcgaataccaatgtgtggccgataattgtcattcccatgccaagatgctctctgaggtattgagggttaaggtaattgctccagtggatgaggtgcagatttccattttgtccagtaaagtggttgaatccggagaggatatcgtccttcagtgcgctgtgaacgaaggttctgggccaatcacatataaattctacagagaaaaagaagggaagccgttttaccagatgactagtaacgccacgcaagcattctggaccaaacaaaaggccagcaaggaacaagagggagagtattattgtaccgcgtttaatagagctaatcatgcatcttctgtgccgagatcaaagatacttactgtgcgtgttattttggcaccctggaagaagggattgattgccgtcgtgatcattggtgtaatcatagccttattgatcatagcagccaagtgctacttccttagaaaggcgaaagccaagcaaatgcccgtggagatgtcccgccctgccgtgcctctcttgaactccaataacgagaagatgagtgatccaaacatggaagctaatagccactacggccacaatgacgacgtgagaaaccacgcaatgaaacccataaacgacaacaaggaacctctgaactcggacgtccagtacacggaggtacaagtcagttccgccgaaagtcataaagaccttgggaagaaagataccgagacggtctatagtgaggtgcgaaaggccgtccctgatgctgtggagagccgatattcacgaacggaaggatccctggacgggacatag

SEQ ID NO: 317725 - DNA, 3743 bp, Artificial Sequence
  derived and/or modified sequence
ccaggccccattgttcccggtttccagccatggctgccattacctgaccagcgccacagccggtctctctgcaggcgccgggagaagtgaccagagcaatttctgcttttcacagggcgggtttctcaacggtgacttgtgggcagtgccttctgctgagcgagtcatggcccgaaggcagaactaactgtgcctgcagtcttcactctcaggatgcagccgaggtgggcccaaggggccacgatgtggcttggagtcctgctgacccttctgctctgttcaagccttgagggtcaagaaaactctttcacaatcaacagtgttgacatgaagagcctgccggactggacggtgcaaaatgggaagaacctgaccctgcagtgcttcgcggatgtcagcaccacctctcacgtcaagcctcagcaccagatgctgttctataaggatgacgtgctgttttacaacatctcctccatgaagagcacagagagttattttattcctgaagtccggatctatgactcagggacatataaatgtactgtgattgtgaacaacaaagagaaaaccactgcagagtaccaggtgttggtggaaggagtgcccagtcccagggtgacactggacaagaaagaggccatccaaggtgggatcgtgagggtcaactgttctgtcccagaggaaaaggccccaatacacttcacaattgaaaaacttgaactaaatgaaaaaatggtcaagctgaaaagagagaagaattctcgagaccagaattttgtgatactggaattccccgttgaggaacaggaccgcgttttatccttccgatgtcaagctaggatcatttctgggatccatatgcagacctcagaatctaccaagagtgaactggtcaccgtgacggaatccttctctacacccaagttccacatcagccccaccggaatgatcatggaaggagctcagctccacattaagtgcaccattcaagtgactcacctggcccaggagtttccagaaatcataattcagaaggacaaggcgattgtggcccacaacagacatggcaacaaggctgtgtactcagtcatggccatggtggagcacagtggcaactacacgtgcaaagtggagtccagccgcatatccaaggtcagcagcatcgtggtcaacataacagaactattttccaagcccgaactggaatcttccttcacacatctggaccaaggtgaaagactgaacctgtcctgctccatcccaggagcacctccagccaacttcaccatccagaaggaagatacgattgtgtcacagactcaagatttcaccaagatagcctcaaagtcggacagtgggacgtatatctgcactgcaggtattgacaaagtggtcaagaaaagcaacacagtccagatagtcgtatgtgaaatgctctcccagcccaggatttcttatgatgcccagtttgaggtcataaaaggacagaccatcgaagtccgttgcgaatcgatcagtggaactttgcctatttcttaccaacttttaaaaacaagtaaagttttggagaatagtaccaagaactcaaatgatcctgcggtattcaaagacaaccccactgaagacgtcgaataccagtgtgttgcagataattgccattcccatgccaaaatgttaagtgaggttctgagggtgaaggtgatagccccggtggatgaggtccagatttctatcctgtcaagtaaggtggtggagtctggagaggacattgtgctgcaatgtgctgtgaatgaaggatctggtcccatcacctataagttttacagagaaaaagagggcaaacccttctatcaaatgacctcaaatgccacccaggcattttggaccaagcagaaggctagcaaggaacaggagggagagtattactgcacagccttcaacagagccaaccacgcctccagtgtccccagaagcaaaatactgacagtcagagtcattcttgccccatggaagaaaggacttattgcagtggttatcatcggagtgatcattgctctcttgatcattgcggccaaatgttattttctgaggaaagccaaggccaagcagatgccagtggaaatgtccaggccagcagtaccacttctgaactccaacaacgagaaaatgtcagatcccaatatggaagctaacagtcattacggtcacaatgacgatgtcagaaaccatgcaatgaaaccaataaatgataataaagagcctctgaactcagacgtgcagtacacggaagttcaagtgtcctcagctgagtctcacaaagatctaggaaagaaggacacagagacagtgtacagtgaagtccggaaagctgtccctgatgccgtggaaagcagatactctagaacggaaggctcccttgatggaacttagacagcaaggccagatgcacatccctggaaggacatccatgttccgagaagaacagataatccctgtatttcaagacctctgtgcacttatttatgaacctgccctgctcccacagaacacagcaattcctcaggctaagctgccggttcttaaatccatcctgctaagttaatgttgggtagaaagagatacagaggggctgttgaatttcccacataccctccttccaccaagttggaacatccttggaaattggaagagcacaagaggagatccagggcaaggccattgggatattctgaaacttgaatattttgttttgtgcagagataaagaccttttccatgcaccctcatacacagaaaccaattttcttttttatactcaatcatttctagcgcatggcctggttagaggctggttttttctcttttcctttggtccttcaaaggcttgtagttttggctagtccttgttctttggaaatacacagtgctgaccagacagcctccccctgtcccctctatgacctcgccctccacaaatgggaaaaccagactacttgggagcaccgcctgtgaaataccaacctgaagacaccgttcattcaggcaacgcacaaaacagaaaatgaaggtggaacaagcacagatgttcttcaactgtttttgtctacactctttctcttttcctctaccatgctgaaggctgaaagacaggaagatggtgccatcagcaaatattattcttaattgaaaacttgaaatgtgtatgtttcttactaatttttaaaaatgtattccttgccagggcaggcaaggtggctcacgcctgtaatcccagcacttcaggaggctgaggtgggcggatcacctgaggtcaggagtttgagaccagcctgatgaaaccctgtctctactaaaaatacaagaattagccgggcgtggtggcgcatgcctgtagtatcagctactcaagaggctgaggtgagattatcgcttgaacccaggaaacggaggttgtagtgagcggagatcgcgccactgcactccagcctgagtgacagagtgagaatccatctcaaaaaaaacaaaaaacaaaattgcttgctaaagaagtggtctcctgaggtcttaagacattcctgacagtgtcttgagtgggtgggagagaggctgctgtcattgcgctgtggaatttcacagatgagaaccacgcctagccaaaatcacttttcctgtttgcctcagtgacacagctgcagggaccctcgtggatgttgtattaaataaatttgacctttgctctttgca

SEQ ID NO: 317726 - DNA, 555 bp, Artificial Sequence
  derived and/or modified sequence
atgactgatttcctggaagtcaacagacaggagctcggcagatggcttcaggaggagccaggagcctttaactggtcaatgtactcccaacacgcatgtcttatcgagggcaagggggagtgttggcaggataaagagaggcaactccgtgcacgcgttaaaagagtgctgcctatcgacgttcaccagcctcagcccctgggcgcagggagccctgcccccctgcctgcggatgctctagtcagtgccttttgcctggaggccgtctcccccgacctcgccagctttcagcgtgctttggatcatataacaactttactgagacccggaggacacctactccttataggcgctctcgaggaaagctggtacctggcgggtgaggcccgcctgacagtcgtgccagtctctgaggaagaagtgcgagaggccctggtgagaagcggctacaaagttcgggaccttcgaacatatattatgcccgctcatctccagaccggcgtggacgacgtcaagggggtgttttttgcttgggcacagaaggtaggactgtag

SEQ ID NO: 317727 - DNA, 555 bp, Artificial Sequence
  derived and/or modified sequence
atgacagacttcctggaggtgaaccggcaggagctgggccgctggctgcaggaggagcccggggccttcaactggagcatgtacagccagcacgcctgcctgattgagggcaagggggagtgctggcaggacaaggagcggcagctgcgggcccgggtgaagagggtgctgcccattgatgtgcaccagccccagcccctgggcgccggcagccctgcccccctgcctgcagatgccctggtgtctgccttctgcctggaggccgtgtccccagacctggccagcttccagagggccctggaccacatcaccaccctgctgcggcctgggggccacctgctgctgattggagccctggaggagagctggtacctggccggggaggcccggctgactgtggtgcctgtgtctgaggaggaggtgcgggaggccctggtgcgcagcggctacaaggtgcgggacctgcggacctacatcatgcctgcccacctgcagacaggagtggatgatgtgaagggcgtcttctttgcctgggcccagaaggtgggcctgtag

SEQ ID NO: 317728 - DNA, 555 bp, Artificial Sequence
  derived and/or modified sequence
atgaccgacttcctggaggtgaaccggcaggagctgggccggtggctgcaggaagaacctggcgcattcaactggtctatgtattcccaacacgcctgcctgatagagggaaagggtgaatgctggcaggacaaggagcggcagctgagggcccgagtcaaaagggtgctgcctatcgatgttcaccagcctcaacccctgggcgcgggctcaccagctcctctccccgcagatgccctggtgtctgccttttgcttggaagcagtttccccggacctcgcctctttccagagggccctggaccacatcactacactgctgaggccagggggccatttgttgctgattggggccctggaggaaagctggtacctggctggagaagcacgattgaccgtcgtgcctgttagcgaagaggaggtgcgagaggctctcgtacgcagtggttacaaggtgagggacttacgaacatatattatgccagcacacttgcagactggggttgatgacgtgaagggagtgtttttcgcatgggcccagaaggtgggactgtag

SEQ ID NO: 317729 - DNA, 555 bp, Artificial Sequence
  derived and/or modified sequence
atgacagacttcctggaagtcaatagacaggagctcggacggtggctgcaagaagaacctggcgcattcaattggagcatgtacagccagcatgcctgcctgatagaagggaagggtgagtgctggcaggacaaggagcgccagcttagggcgagagtgaagagggtattacccatcgacgtccatcagccgcagccccttggcgcaggcagccctgctcccctaccagctgatgccttggtatccgcattctgtctggaagcagtcagtcccgatcttgcctcctttcagagagccctggaccacataacgacactgctgcgccctggcggtcacctgctgttaattggagctctggaggagagttggtacctggcaggggaggccaggttaactgtggtccccgtgtcagaagaggaagtcagagaggctcttgtgcggagcggctacaaggtgcgtgatctaagaacttacattatgcctgcccacctgcagacaggcgtggatgacgtcaagggcgtatttttcgcctgggctcagaaggtgggactctag

SEQ ID NO: 317730 - DNA, 555 bp, Artificial Sequence
  derived and/or modified sequence
atgaccgacttcctggaggtgaacagacaggagctgggcagatggctgcaggaggagcccggcgccttcaactggagcatgtacagccagcacgcctgcctgatcgagggcaagggcgagtgctggcaggacaaggagagacagctgagagccagagtgaagagagtgctgcccatcgacgtgcaccagccccagcccctgggcgccggcagccccgcccccctgcccgccgacgccctggtgagcgccttctgcctggaggccgtgagccccgacctggccagcttccagagagccctggaccacatcaccaccctgctgagacccggcggccacctgctgctgatcggcgccctggaggagagctggtacctggccggcgaggccagactgaccgtggtgcccgtgagcgaggaggaggtgagagaggccctggtgagaagcggctacaaggtgagagacctgagaacctacatcatgcccgcccacctgcagaccggcgtggacgacgtgaagggcgtgttcttcgcctgggcccagaaggtgggcctgtag

SEQ ID NO: 317731 - protein, 459 aa, Artificial Sequence
  derived and/or modified sequence
MIKRFLEDTTDDGELSKFVKDFSGNASCHPPEAKTWASRPQVPEPRPQAPDLYDDDLEFRPPSRPQSSDNQQYFCAPAPLSPSARPRSPWGKLDPYDSSEDDKEYVGFATLPNQVHRKSVKKGFDFTLMVAGESGLGKSTLVNSLFLTDLYRDRKLLGAEERIMQTVEITKHAVDIEEKGVRLRLTIVDTPGFGDAVNNTECWKPVAEYIDQQFEQYFRDESGLNRKNIQDNRVHCCLYFISPFGHGLRPLDVEFMKALHQRVNIVPILAKADTLTPPEVDHKKRKIREEIEHFGIKIYQFPDCDSDEDEDFKLQDQALKESIPFAVIGSNTVVEARGRRVRGRLYPWGIVEVENPGHCDFVKLRTMLVRTHMQDLKDVTRETHYENYRAQCIQSMTRLVVKERNRNKLTRESGTDFPIPAVPPGTDPETEKLIREKDEELRRMQEMLHKIQKQMKENY

SEQ ID NO: 317732 - protein, 331 aa, Artificial Sequence
  derived and/or modified sequence
MVAGESGLGKSTLVNSLFLTDLYRDRKLLGAEERIMQTVEITKHAVDIEEKGVRLRLTIVDTPGFGDAVNNTECWKPVAEYIDQQFEQYFRDESGLNRKNIQDNRVHCCLYFISPFGHGLRPLDVEFMKALHQRVNIVPILAKADTLTPPEVDHKKRKIREEIEHFGIKIYQFPDCDSDEDEDFKLQDQALKESIPFAVIGSNTVVEARGRRVRGRLYPWGIVEVENPGHCDFVKLRTMLVRTHMQDLKDVTRETHYENYRAQCIQSMTRLVVKERNRNKLTRESGTDFPIPAVPPGTDPETEKLIREKDEELRRMQEMLHKIQKQMKENY

SEQ ID NO: 317733 - DNA, 996 bp, Artificial Sequence
  derived and/or modified sequence
atggtggccggcgagagcggcctgggcaagagcaccctggtgaacagcctgttcctgaccgacctgtacagagacagaaagctgctgggcgccgaggagagaatcatgcagaccgtggagatcaccaagcacgccgtggacatcgaggagaagggcgtgagactgagactgaccatcgtggacacccccggcttcggcgacgccgtgaacaacaccgagtgctggaagcccgtggccgagtacatcgaccagcagttcgagcagtacttcagagacgagagcggcctgaacagaaagaacatccaggacaacagagtgcactgctgcctgtacttcatcagccccttcggccacggcctgagacccctggacgtggagttcatgaaggccctgcaccagagagtgaacatcgtgcccatcctggccaaggccgacaccctgaccccccccgaggtggaccacaagaagagaaagatcagagaggagatcgagcacttcggcatcaagatctaccagttccccgactgcgacagcgacgaggacgaggacttcaagctgcaggaccaggccctgaaggagagcatccccttcgccgtgatcggcagcaacaccgtggtggaggccagaggcagaagagtgagaggcagactgtacccctggggcatcgtggaggtggagaaccccggccactgcgacttcgtgaagctgagaaccatgctggtgagaacccacatgcaggacctgaaggacgtgaccagagagacccactacgagaactacagagcccagtgcatccagagcatgaccagactggtggtgaaggagagaaacagaaacaagctgaccagagagagcggcaccgacttccccatccccgccgtgccccccggcaccgaccccgagaccgagaagctgatcagagagaaggacgaggagctgagaagaatgcaggagatgctgcacaagatccagaagcagatgaaggagaactactag

SEQ ID NO: 317734 - DNA, 996 bp, Artificial Sequence
  derived and/or modified sequence
atggtcgcgggggagtctgggcttggcaaaagtacactagtgaacagcctttttcttacagacctgtatagggacagaaagctgctgggcgcagaggagcgaataatgcagacagtggagatcacgaagcacgccgttgatattgaggaaaagggggtgcggctccgccttacaattgtggatactccaggctttggtgacgccgtgaataacactgaatgctggaaaccggtggccgagtacattgaccaacagttcgagcaatatttccgggacgagagtggccttaatcggaagaacatccaagacaaccgcgttcattgttgtctctactttatctcaccattcgggcacggattgaggcccctggatgttgaatttatgaaagctttacatcaacgggtgaacatcgttcccatcctggcaaaggccgacaccctcacaccacctgaggtcgatcacaaaaagagaaaaattcgtgaggagattgagcacttcggaattaaaatctaccagtttcccgactgtgacagcgacgaggacgaggacttcaagttgcaggaccaagctctgaaggaaagcattcccttcgccgttatcggtagcaacaccgtcgttgaggcaagaggacgccgggttagaggccgcctttatccctgggggattgtggaggtcgaaaacccaggccactgtgacttcgtgaagctgcgcacgatgctagtccgcacacacatgcaggatcttaaggatgtgacccgtgaaacacactacgaaaattatagagctcagtgtattcagtctatgacgcgcctcgtggtgaaggagcgaaatcgcaataaactgacacgcgagtcagggacagacttccccattccagcggtgcctcccggaacagacccagaaacagagaaattgatccgcgagaaagacgaggagcttcgaaggatgcaggagatgctgcacaaaattcagaagcagatgaaggagaactattag

SEQ ID NO: 317735 - DNA, 996 bp, Artificial Sequence
  derived and/or modified sequence
atggtggccggggagagcggcctgggcaagagcaccctggtgaacagcctcttcctgacagacctgtacagagacaggaagctgctgggcgctgaggagcgcatcatgcagacagtggagatcaccaagcatgctgtggacatcgaggagaagggcgtgcggctgcggctgaccatcgtggacaccccaggctttggagatgctgtgaacaacacagagtgctggaagcctgtggccgagtacatcgaccagcagtttgagcagtacttcagagatgagagcggcctgaacaggaagaacatccaggacaacagagtgcactgctgcctgtacttcatcagccccttcggccacggcctgcggcccctggatgtggagttcatgaaggccctgcaccagagggtgaacatcgtgcccatcctggccaaggctgacaccctgaccccacctgaggtggaccacaagaagaggaagatccgggaggagattgagcacttcggcatcaagatctaccagttcccagactgtgacagtgatgaagatgaggacttcaagctgcaggaccaggccctgaaggagagcatcccctttgctgtgattggcagcaacacagtggtggaggcccggggcagaagagtgcggggccgcctgtacccctggggcatcgtggaggtggagaaccctggccactgtgactttgtgaagctgcggaccatgctggtgaggacccacatgcaggacctgaaggatgtgacccgggagacccactatgagaactaccgggcccagtgcatccagagcatgacccggctggtggtgaaggagaggaacagaaacaagctgacccgggagagcggcacagacttccccatcccagctgtgcccccaggcacagatcctgagacagagaagctgatccgggagaaggatgaggagctgcggaggatgcaggagatgctgcacaagatccagaagcagatgaaggagaactactag

SEQ ID NO: 317736 - DNA, 996 bp, Artificial Sequence
  derived and/or modified sequence
atggtggccggcgagagcggcctgggcaagagcaccctggtgaactcactctttctgaccgacctatatcgagaccgcaagctgttgggtgctgaagaaaggataatgcagacagtagagattacaaaacacgcggtggacatcgaagagaaaggggttaggctccgcttgaccattgtggacacacctggatttggggatgcagttaacaatactgagtgctggaaaccggtggccgagtacatcgaccaacaattcgagcagtatttccgagacgaaagcggacttaaccggaagaacattcaagataatcgcgtgcactgttgtttgtatttcatttctcctttcggtcatgggttgagaccgctcgacgtcgagttcatgaaggcccttcaccaaagggtcaatatcgttcccattctggctaaagccgacaccctcaccccccccgaagtcgaccataaaaaacggaagatcagggaagagatcgaacactttggaataaagatatatcaattccccgactgcgacagtgatgaggacgaggattttaagctgcaagatcaggctttaaaggagtccatcccctttgccgtcatcggcagtaatactgtggtggaagcaagaggccggagggtgaggggccgactatatccatggggaattgtggaggtggaaaatcccggccattgcgatttcgttaaactgcgaactatgcttgttcggacgcacatgcaggacctaaaagatgtcacccgggagactcactatgagaactaccgcgcacagtgtatccaatctatgacccgcctggtggttaaagagcgaaacaggaataagttaacacgtgaatcgggcactgacttccccattcccgctgtgccgcccgggacagaccccgagacggaaaagctgataagagaaaaggatgaggagctgaggcgcatgcaggagatgctccacaagatacagaaacagatgaaggaaaattactag

SEQ ID NO: 317737 - DNA, 996 bp, Artificial Sequence
  derived and/or modified sequence
atggtggcaggagaatccgggctgggcaaatctacactcgtgaactcactgtttctcactgatttgtatcgcgaccggaaactacttggggctgaagagcgcataatgcagactgtcgagatcacaaagcatgccgttgatattgaagaaaagggggtgcggttacgactcaccatcgttgataccccaggcttcggtgacgcagtgaacaataccgagtgttggaaaccagtggcagaatacatcgaccaacaatttgagcagtatttccgggatgaatctgggcttaacagaaagaatattcaagacaatagagttcactgttgtctctatttcatttctccctttgggcacgggcttaggccgctggatgttgaattcatgaaggctctacaccaacgcgttaatatcgtgcccattctggccaaggctgatactctaactccacctgaagtcgaccataagaaacgcaagatcagggaggaaatcgagcattttggcattaaaatctatcagttccccgattgcgactcagatgaagacgaggactttaagctgcaagatcaagctttgaaggagtcgattccatttgccgtgatcggatcaaacacagtagtggaagctcgcggtaggagggtacgcggtcgtctgtacccatggggaatcgtggaagtggaaaaccctggacattgtgatttcgtaaagttaagaactatgctggttaggacccatatgcaggatctaaaggacgtcacccgcgagacacactatgaaaactaccgagctcagtgtatacagtcaatgacacggctggtcgttaaggaaagaaatagaaataagctcactcgcgagagtgggaccgactttcccatcccagccgttccacctgggactgaccccgagaccgagaagttaatccgtgaaaaggatgaagaattaaggaggatgcaggagatgcttcataaaatccaaaaacagatgaaagagaattattag

SEQ ID NO: 317738 - protein, 304 aa, Artificial Sequence
  derived and/or modified sequence
  misc_feature (1)..(1): Xaa can be any naturally occurring amino acid
XSSKDGSVRIWDTTAGRCERILTGHTQSVTCLRWGGDGLLYSASQDRTIKVWRAHDGVLCRTLQGHGHWVNTMALSTDYALRTGAFEPAEASVNPQDLQGSLQELKERALSRYNLVRGQGPERLVSGSDDFTLFLWSPAEDKKPLTRMTGHQALINQVLFSPDSRIVASASFDKSIKLWDGRTGKDDFHSVTWCSSGSSAAARSWLITTSASWVQVILLPQPPRYLASLRGHVAAVYQIAWSADSRLLVSGSSDSTLKVWDVKAQKLAMDLPGHADEVYAVDWSPDGQRVASGGKDKCLRIWRR

SEQ ID NO: 317739 - DNA, 915 bp, Artificial Sequence
  derived and/or modified sequence
taaagttctaaagatggctccgtcagaatctgggatactaccgccggacggtgtgagagaattctcacaggacatacccagtccgtgacatgtctccgatggggcggggatggactgttgtactccgctagccaggaccgaaccattaaagtgtggagggcgcacgatggggtactctgcagaaccctgcagggtcatgggcactgggtgaatacaatggctttaagcactgactatgcccttaggacaggagcttttgagcccgccgaggcttccgtaaacccgcaagatctgcagggctccttacaggagctgaaagaacgcgctttatccaggtacaacctggtgcgggggcagggccccgagcggttggtatctgggtccgacgatttcacactgtttctctggtcacccgctgaagataagaaacccttaacccgtatgacaggccaccaggcccttatcaatcaggtcctcttctctcccgactcaagaatcgtggcatctgcctcctttgacaaatccatcaagttgtgggacggacggaccggcaaggacgactttcacagtgtgacctggtgtagttccggcagttcagcagctgcacggtcctggttaatcaccacgtcagcttcttgggtgcaagtcatccttttaccccagcctccacgttatctggcaagtcttcggggccacgtagcagccgtctatcagatagcttggtcagcagatagtcgcctcctggtgagcggtagctctgatagtacactgaaggtgtgggatgtgaaggcccaaaagctggcaatggacttgcccggccacgctgacgaagtctacgctgtggattggagtccagacggtcaacgggtggcttctggcggaaaggacaaatgcttgcgcatttggagaagatag

SEQ ID NO: 317740 - DNA, 1107 bp, Artificial Sequence
  derived and/or modified sequence
gcagctccaaggatggcagtgtgcggatctgggacacaactgcaggccgctgtgagcgcatcctcaccgggcacacccagtcggtcacctgtctccggtggggaggggacgggcttctctactctgcctcccaggaccgcaccatcaaagtctggagagctcatgacggtgtgctgtgccggactctgcaaggccacggccactgggtgaacaccatggccctcagcactgactatgccctgcgcactggggcctttgaacctgctgaggcctcagttaatccccaagacctccaaggatccttgcaggagttgaaggagagggctctgagccgatacaacctcgtgcggggccagggtccagagaggctggtgtctggctccgacgacttcaccttattcctgtggtccccagcagaggacaaaaagcctctcactcggatgacaggacaccaagctctcatcaaccaggtgctcttctctcctgactcccgcatcgtggctagtgcctcctttgacaagtccatcaagctgtgggatggcaggacgggcaaagatgactttcactctgtcacctggtgttcaagtggctcgagtgcagcggcacgatcttggctcattacaacctctgcttcctgggttcaagtgattctcctgcctcagcctcccaggtacctggcttccctacgcggccacgtggctgccgtgtaccagattgcgtggtcagctgacagtcggctcctggtcagcggcagcagtgacagcacactgaaggtgtgggatgtgaaggcccagaagctggccatggacctgcccggccacgcggatgaggtatatgctgttgactggagtccagatggccagagagtggcaagtggtgggaaggacaaatgcctccggatatggaggagatgagacggcccgaagttctctctgacccccacctcgactcggcctctgccagctgccttccctgccagagaacaaaggctgagatggcagtgcacacaccctccccaccagtggggacctgagaatgcgtgtggcctgctgtcctcgatagaccggaatggggttttcccacagatccccgcctgtggcacacccc

SEQ ID NO: 317741 - DNA, 915 bp, Artificial Sequence
  derived and/or modified sequence
tgaagcagcaaggatggctctgtgcgcatctgggacaccacagctggccgctgtgagcgcatcctgaccggccacacccagagcgtgacctgcctgcgctggggcggagatggcctgctgtacagcgccagccaggacaggaccatcaaggtgtggagggcccatgatggagtgctgtgcaggaccctgcagggccacggccactgggtgaacaccatggccctgagcacagattatgccctgaggactggagcctttgagcctgctgaggcctctgtgaacccccaggacctgcagggcagcctgcaggagctgaaggagcgggccctgagccgctacaacctggtgcggggccagggccctgagcggctggtgtctggcagtgatgacttcaccctcttcctgtggagccctgctgaggacaagaagcccctgaccaggatgacaggccaccaggccctgatcaaccaggtgctcttctccccagacagccgcatcgtggccagcgccagctttgacaagagcatcaagctgtgggatggccgcacaggcaaggatgacttccacagcgtgacctggtgcagcagcggcagcagcgctgctgcccgctcctggctgatcaccaccagcgcctcctgggtgcaggtgatcctgctgccccagcccccacgctacctggccagcctgcggggccacgtggccgctgtgtaccagatcgcctggagcgctgacagccggctgctggtgtctggcagcagtgacagcaccctgaaggtgtgggatgtgaaggcccagaagctggccatggacctgcccggccatgctgatgaggtgtatgctgtggactggagcccagatggccagagggtggccagcggcggcaaggacaagtgcctgcgcatctggaggaggtag

SEQ ID NO: 317742 - DNA, 915 bp, Artificial Sequence
  derived and/or modified sequence
tgaagcagcaaggacggcagcgtgcggatctgggacaccaccgccggtagatgcgagcgtatcctgaccggacacacccagagtgtgacgtgcctgaggtggggtggagacggacttctttactctgcgtcccaggacagaacaatcaaagtgtggcgcgcacacgacggcgtgctatgtagaacattgcagggacacgggcactgggttaatactatggccttgagcaccgattatgcgctgagaaccggagcattcgagccggcagaagcttccgtgaaccctcaggacctccagggatccttgcaggagcttaaagagagagccctctcaagatacaacctggtgcggggccagggacccgagaggctggtctctgggtctgacgactttaccctgttcttatggtcccccgccgaggacaagaaaccactcacgcggatgaccggacatcaggctctgattaatcaggttctcttcagcccagatagcagaatagttgcgtctgcgagttttgataaatctataaagctgtgggacggcaggactggaaaggatgactttcatagcgtaacatggtgctccagtggatcttcagccgcggcacggtcatggctcataacaaccagcgcatcttgggtgcaagttatccttttgccccagccacctcggtacttagcctctctgcggggccatgttgcagccgtgtaccagattgcctggtccgcagactcccgtctgcttgtcagtggctcatccgactccactctcaaggtgtgggatgtgaaggcccaaaagctggcgatggaccttcccggacacgctgatgaggtctatgctgtggattggagccctgatggacagcgagtagcctctggaggcaaggataagtgcttgcgcatatggaggcgctag

SEQ ID NO: 317743 - DNA, 915 bp, Artificial Sequence
  derived and/or modified sequence
tagtcaagtaaagacggaagcgtgcgcatctgggacaccaccgccggacgctgcgagaggatattgactgggcatacacaatccgtgacatgtttgagatggggcggtgacggactgctgtattccgcatcccaggatcggacaatcaaagtgtggcgtgctcatgatggcgtactgtgtcggaccctccaggggcacggccattgggtgaatacgatggccttatccactgattacgctctccgtaccggtgctttcgagccagccgaggcatctgtgaatccccaagatcttcagggctctctgcaggagctcaaagaaagggctctgtctcgctataatttagtgagaggacagggccctgaacggctggtatctggctctgacgacttcacactgttcttgtggtccccggcagaggacaagaagccactgacccgaatgaccggtcaccaggctctgattaaccaggttctgttctctccagattcccggatcgtggcctctgccagtttcgataagagcattaaactgtgggatggaagaactgggaaggatgactttcattctgtcacgtggtgtagttcaggctccagtgctgccgcaaggagttggctgataacaaccagcgctagctgggtccaggttatcctgttgcctcagcctcccaggtacctggcttccttgagagggcacgtggctgcagtataccagatagcatggtcggctgattcccggctgctggtgtccggctcttctgactccaccctgaaggtctgggacgtcaaggcacagaaacttgcgatggatctgcccggtcatgccgacgaggtctacgccgtggactggtcccctgacgggcagcgggttgcatccggcggtaaggataagtgcttacgaatttggcgccgatag

SEQ ID NO: 317744 - DNA, 915 bp, Artificial Sequence
  derived and/or modified sequence
tgaagcagcaaggacggcagcgtgagaatctgggacaccaccgccggcagatgcgagagaatcctgaccggccacacccagagcgtgacctgcctgagatggggcggcgacggcctgctgtacagcgccagccaggacagaaccatcaaggtgtggagagcccacgacggcgtgctgtgcagaaccctgcagggccacggccactgggtgaacaccatggccctgagcaccgactacgccctgagaaccggcgccttcgagcccgccgaggccagcgtgaacccccaggacctgcagggcagcctgcaggagctgaaggagagagccctgagcagatacaacctggtgagaggccagggccccgagagactggtgagcggcagcgacgacttcaccctgttcctgtggagccccgccgaggacaagaagcccctgaccagaatgaccggccaccaggccctgatcaaccaggtgctgttcagccccgacagcagaatcgtggccagcgccagcttcgacaagagcatcaagctgtgggacggcagaaccggcaaggacgacttccacagcgtgacctggtgcagcagcggcagcagcgccgccgccagaagctggctgatcaccaccagcgccagctgggtgcaggtgatcctgctgccccagccccccagatacctggccagcctgagaggccacgtggccgccgtgtaccagatcgcctggagcgccgacagcagactgctggtgagcggcagcagcgacagcaccctgaaggtgtgggacgtgaaggcccagaagctggccatggacctgcccggccacgccgacgaggtgtacgccgtggactggagccccgacggccagagagtggccagcggcggcaaggacaagtgcctgagaatctggagaagatag

SEQ ID NO: 317745 - protein, 2153 aa, Artificial Sequence
  derived and/or modified sequence
MWGLLIWTLLALHQIRAARAQDDVSPYFKTEPVRTQVHLEGNRLVLTCMAEGSWPLEFKWLHNNRELTKFSLEYRYMITSLDRTHAGFYRCIVRNRMGALLQRQTEVQVAYMGSFEEGEKHQSVSHGEAAVIRAPRIASFPQPQVTWFRDGRKIPPSSRIAITLENTLVILSTVAPDAGRYYVQAVNDKNGDNKTSQPITLTVENVGGPADPIAPTIIIPPKNTSVVAGTSEVTLECVANARPLIKLHIIWKKDGVLLSGGISDHNRRLTIPNPTGSDAGYYECEAVLRSSSVPSVVRGAYLSVLEPPQFVKEPERHITAEMEKVVDIPCQAKGVPPPSITWYKDAAVVEVEKLTRFRQRNDGGLQISGLVPDDTGMFQCFARNAAGEVQTSTYLAVTSIAPNITRGPLDSTVIDGMSVVLACETSGAPRPAITWQKGERILASGSVQLPRFTPLESGSLLISPTHISDAGTYTCLATNSRGVDEASADLVVWARTRITKPPQDQSVIKGTQASMVCGVTHDPRVTIRYIWEKDGATLGTESHPRIRLDRNGSLHISQTWSGDIGTYTCRVISAGGNDSRSAHLRVRQLPHAPEHPVATLSTVERRAINLTWTKPFDGNSPLIRYILEMSENNAPWTVLLASVDPKATSVTVKGLVPARSYQFRLCAVNDVGKGQFSKDTERVSLPEEPPTAPPQNVIASGRTNQSIMIQWQPPPESHQNGILKGYIIRYCLAGLPVGYQFKNITDADVNNLLLEDLIIWTNYEIEVAAYNSAGLGVYSSKVTEWTLQGVPTVPPGNVHAEATNSTTIRFTWNAPSPQFINGINQGYKLIAWEPEQEEEVTMVTARPNFQDSIHVGFVSGLKKFTEYFTSVLCFTTPGDGPRSTPQLVRTHEDVPGPVGHLSFSEILDTSLKVSWQEPGEKNGILTGYRISWEEYNRTNTRVTHYLPNVTLEYRVTGLTALTTYTIEVAAMTSKGQGQVSASTISSGVPPELPGPPTNLGISNIGPRSVTLQFRPGYDGKTSISRWLVEAQVGVVGEGEEWLLIHQLSNEPDARSMEVPDLNPFTCYSFRMRQVNIVGTSPPSQPSRKIQTLQAPPDMAPANVSLRTASETSLWLRWMPLPEMEYNGNPESVGYKIKYSRSDGHGKTLSHVVQDRVERDYTIEDLEEWTEYRVQVQAFNAIGSGPWSQTVVGRTRESVPSSGPTNVSALATTSSSMLVRWSEVPEADRNGLVLGYKVMYKEKDSDTQPRFWLVEGNSSRSAQLTGLGKYVLYEVQVLAFTRIGDGSPSHPPILERTLDDVPGPPMGILFPEVRTTSVRLIWQPPAAPNGIILAYQITHRLNTTTANTATVEVLAPSARQYTATGLKPESVYLFRITAQTRKGWGEAAEALVVTTEKRDRPQPPSRPMVQQEDVRARSVLLSWEPGSDGLSPVRYYTIQTRELPSGRWALHSASVSHNASSFIVDRLKPFTSYKFRVKATNDIGDSEFSEESESLTTLQAAPDEAPTILSVTPHTTTSVLIRWQPPAEDKINGILLGFRIRYRELLYEGLRGFTLRGINNPGATWAELTYLNKHRRYEIRMSVYNAVGEGPSSPPQEVFVGEAVPTAAPRNVVVHGATATQLDVTWEPPPLDSQNGDIQGYKIYFWEAQRGNLTERVKTLFLAENSVKLKNLTGYTAYMVSVAAFNAAGDGPRSTPTQGQTQQAAPSAPSSVKFSELTTTSVNVSWEAPQFPNGILEGYRLVYEPCSPVDGVSKIVTVDVKGNSPLWLKVKDLAEGVTYRFRIRAKTFTYGPEIEANVTTGPGEGAPGPPGVPIIVRYSSAIAIHWSSGDPGKGPITRYVIEARPSDEGLWDILIKDIPKEVSSYTFSMDILKPGVSYDFRVIAVNDYGFGTPSSPSQSVPAQKANPFYEEWWFLVVIALVGLIFILLLVFVLIIRGQSKKYAKKTDSGNSAKSGALGHSEMMSLDESSFPALELNNRRLSVKNSFCRKNGLYTRSPPRPSPGSLHYSDEDVTKYNDLIPAESSSLTEKPSEISDSQGSDSEYEVDSNHQKAHSFVNHYISDPTYYNSWRRQQKGISRAQAYSYTESDSGEPDHTTVTNSTSTQQGSLFRPKASRTPTPQNPPNPPSQQSTLYRPPSSLAPGSRAPIAGFSSFV

SEQ ID NO: 317746 - DNA, 6462 bp, Artificial Sequence
  derived and/or modified sequence
atgtggggcctgctgatctggaccctgctggccctgcaccagatcagagccgccagagcccaggacgacgtgagcccctacttcaagaccgagcccgtgagaacccaggtgcacctggagggcaacagactggtgctgacctgcatggccgagggcagctggcccctggagttcaagtggctgcacaacaacagagagctgaccaagttcagcctggagtacagatacatgatcaccagcctggacagaacccacgccggcttctacagatgcatcgtgagaaacagaatgggcgccctgctgcagagacagaccgaggtgcaggtggcctacatgggcagcttcgaggagggcgagaagcaccagagcgtgagccacggcgaggccgccgtgatcagagcccccagaatcgccagcttcccccagccccaggtgacctggttcagagacggcagaaagatcccccccagcagcagaatcgccatcaccctggagaacaccctggtgatcctgagcaccgtggcccccgacgccggcagatactacgtgcaggccgtgaacgacaagaacggcgacaacaagaccagccagcccatcaccctgaccgtggagaacgtgggcggccccgccgaccccatcgcccccaccatcatcatcccccccaagaacaccagcgtggtggccggcaccagcgaggtgaccctggagtgcgtggccaacgccagacccctgatcaagctgcacatcatctggaagaaggacggcgtgctgctgagcggcggcatcagcgaccacaacagaagactgaccatccccaaccccaccggcagcgacgccggctactacgagtgcgaggccgtgctgagaagcagcagcgtgcccagcgtggtgagaggcgcctacctgagcgtgctggagcccccccagttcgtgaaggagcccgagagacacatcaccgccgagatggagaaggtggtggacatcccctgccaggccaagggcgtgcccccccccagcatcacctggtacaaggacgccgccgtggtggaggtggagaagctgaccagattcagacagagaaacgacggcggcctgcagatcagcggcctggtgcccgacgacaccggcatgttccagtgcttcgccagaaacgccgccggcgaggtgcagaccagcacctacctggccgtgaccagcatcgcccccaacatcaccagaggccccctggacagcaccgtgatcgacggcatgagcgtggtgctggcctgcgagaccagcggcgcccccagacccgccatcacctggcagaagggcgagagaatcctggccagcggcagcgtgcagctgcccagattcacccccctggagagcggcagcctgctgatcagccccacccacatcagcgacgccggcacctacacctgcctggccaccaacagcagaggcgtggacgaggccagcgccgacctggtggtgtgggccagaaccagaatcaccaagcccccccaggaccagagcgtgatcaagggcacccaggccagcatggtgtgcggcgtgacccacgaccccagagtgaccatcagatacatctgggagaaggacggcgccaccctgggcaccgagagccaccccagaatcagactggacagaaacggcagcctgcacatcagccagacctggagcggcgacatcggcacctacacctgcagagtgatcagcgccggcggcaacgacagcagaagcgcccacctgagagtgagacagctgccccacgcccccgagcaccccgtggccaccctgagcaccgtggagagaagagccatcaacctgacctggaccaagcccttcgacggcaacagccccctgatcagatacatcctggagatgagcgagaacaacgccccctggaccgtgctgctggccagcgtggaccccaaggccaccagcgtgaccgtgaagggcctggtgcccgccagaagctaccagttcagactgtgcgccgtgaacgacgtgggcaagggccagttcagcaaggacaccgagagagtgagcctgcccgaggagccccccaccgcccccccccagaacgtgatcgccagcggcagaaccaaccagagcatcatgatccagtggcagcccccccccgagagccaccagaacggcatcctgaagggctacatcatcagatactgcctggccggcctgcccgtgggctaccagttcaagaacatcaccgacgccgacgtgaacaacctgctgctggaggacctgatcatctggaccaactacgagatcgaggtggccgcctacaacagcgccggcctgggcgtgtacagcagcaaggtgaccgagtggaccctgcagggcgtgcccaccgtgccccccggcaacgtgcacgccgaggccaccaacagcaccaccatcagattcacctggaacgcccccagcccccagttcatcaacggcatcaaccagggctacaagctgatcgcctgggagcccgagcaggaggaggaggtgaccatggtgaccgccagacccaacttccaggacagcatccacgtgggcttcgtgagcggcctgaagaagttcaccgagtacttcaccagcgtgctgtgcttcaccacccccggcgacggccccagaagcaccccccagctggtgagaacccacgaggacgtgcccggccccgtgggccacctgagcttcagcgagatcctggacaccagcctgaaggtgagctggcaggagcccggcgagaagaacggcatcctgaccggctacagaatcagctgggaggagtacaacagaaccaacaccagagtgacccactacctgcccaacgtgaccctggagtacagagtgaccggcctgaccgccctgaccacctacaccatcgaggtggccgccatgaccagcaagggccagggccaggtgagcgccagcaccatcagcagcggcgtgccccccgagctgcccggcccccccaccaacctgggcatcagcaacatcggccccagaagcgtgaccctgcagttcagacccggctacgacggcaagaccagcatcagcagatggctggtggaggcccaggtgggcgtggtgggcgagggcgaggagtggctgctgatccaccagctgagcaacgagcccgacgccagaagcatggaggtgcccgacctgaaccccttcacctgctacagcttcagaatgagacaggtgaacatcgtgggcaccagcccccccagccagcccagcagaaagatccagaccctgcaggccccccccgacatggcccccgccaacgtgagcctgagaaccgccagcgagaccagcctgtggctgagatggatgcccctgcccgagatggagtacaacggcaaccccgagagcgtgggctacaagatcaagtacagcagaagcgacggccacggcaagaccctgagccacgtggtgcaggacagagtggagagagactacaccatcgaggacctggaggagtggaccgagtacagagtgcaggtgcaggccttcaacgccatcggcagcggcccctggagccagaccgtggtgggcagaaccagagagagcgtgcccagcagcggccccaccaacgtgagcgccctggccaccaccagcagcagcatgctggtgagatggagcgaggtgcccgaggccgacagaaacggcctggtgctgggctacaaggtgatgtacaaggagaaggacagcgacacccagcccagattctggctggtggagggcaacagcagcagaagcgcccagctgaccggcctgggcaagtacgtgctgtacgaggtgcaggtgctggccttcaccagaatcggcgacggcagccccagccacccccccatcctggagagaaccctggacgacgtgcccggcccccccatgggcatcctgttccccgaggtgagaaccaccagcgtgagactgatctggcagccccccgccgcccccaacggcatcatcctggcctaccagatcacccacagactgaacaccaccaccgccaacaccgccaccgtggaggtgctggcccccagcgccagacagtacaccgccaccggcctgaagcccgagagcgtgtacctgttcagaatcaccgcccagaccagaaagggctggggcgaggccgccgaggccctggtggtgaccaccgagaagagagacagaccccagccccccagcagacccatggtgcagcaggaggacgtgagagccagaagcgtgctgctgagctgggagcccggcagcgacggcctgagccccgtgagatactacaccatccagaccagagagctgcccagcggcagatgggccctgcacagcgccagcgtgagccacaacgccagcagcttcatcgtggacagactgaagcccttcaccagctacaagttcagagtgaaggccaccaacgacatcggcgacagcgagttcagcgaggagagcgagagcctgaccaccctgcaggccgcccccgacgaggcccccaccatcctgagcgtgaccccccacaccaccaccagcgtgctgatcagatggcagccccccgccgaggacaagatcaacggcatcctgctgggcttcagaatcagatacagagagctgctgtacgagggcctgagaggcttcaccctgagaggcatcaacaaccccggcgccacctgggccgagctgacctacctgaacaagcacagaagatacgagatcagaatgagcgtgtacaacgccgtgggcgagggccccagcagccccccccaggaggtgttcgtgggcgaggccgtgcccaccgccgcccccagaaacgtggtggtgcacggcgccaccgccacccagctggacgtgacctgggagcccccccccctggacagccagaacggcgacatccagggctacaagatctacttctgggaggcccagagaggcaacctgaccgagagagtgaagaccctgttcctggccgagaacagcgtgaagctgaagaacctgaccggctacaccgcctacatggtgagcgtggccgccttcaacgccgccggcgacggccccagaagcacccccacccagggccagacccagcaggccgcccccagcgcccccagcagcgtgaagttcagcgagctgaccaccaccagcgtgaacgtgagctgggaggccccccagttccccaacggcatcctggagggctacagactggtgtacgagccctgcagccccgtggacggcgtgagcaagatcgtgaccgtggacgtgaagggcaacagccccctgtggctgaaggtgaaggacctggccgagggcgtgacctacagattcagaatcagagccaagaccttcacctacggccccgagatcgaggccaacgtgaccaccggccccggcgagggcgcccccggcccccccggcgtgcccatcatcgtgagatacagcagcgccatcgccatccactggagcagcggcgaccccggcaagggccccatcaccagatacgtgatcgaggccagacccagcgacgagggcctgtgggacatcctgatcaaggacatccccaaggaggtgagcagctacaccttcagcatggacatcctgaagcccggcgtgagctacgacttcagagtgatcgccgtgaacgactacggcttcggcacccccagcagccccagccagagcgtgcccgcccagaaggccaaccccttctacgaggagtggtggttcctggtggtgatcgccctggtgggcctgatcttcatcctgctgctggtgttcgtgctgatcatcagaggccagagcaagaagtacgccaagaagaccgacagcggcaacagcgccaagagcggcgccctgggccacagcgagatgatgagcctggacgagagcagcttccccgccctggagctgaacaacagaagactgagcgtgaagaacagcttctgcagaaagaacggcctgtacaccagaagcccccccagacccagccccggcagcctgcactacagcgacgaggacgtgaccaagtacaacgacctgatccccgccgagagcagcagcctgaccgagaagcccagcgagatcagcgacagccagggcagcgacagcgagtacgaggtggacagcaaccaccagaaggcccacagcttcgtgaaccactacatcagcgaccccacctactacaacagctggagaagacagcagaagggcatcagcagagcccaggcctacagctacaccgagagcgacagcggcgagcccgaccacaccaccgtgaccaacagcaccagcacccagcagggcagcctgttcagacccaaggccagcagaacccccaccccccagaacccccccaacccccccagccagcagagcaccctgtacagaccccccagcagcctggcccccggcagcagagcccccatcgccggcttcagcagcttcgtgtag

SEQ ID NO: 317747 - DNA, 6462 bp, Artificial Sequence
  derived and/or modified sequence
atgtggggcctgctcatttggactttactggccctgcatcaaattcgtgctgcccgcgctcaagacgatgtctccccatacttcaagacggaacccgttcgaactcaagtccatctggaagggaatcgactggtgctcacatgtatggctgagggcagctggcctttagagtttaaatggttacataataatagggaattgaccaaattttctctcgagtatcgatacatgattacatcactcgaccgcacccatgctggattctaccgctgtattgtgcggaaccgcatgggggccctgctgcagaggcagacggaggtacaggtcgcctacatggggagctttgaagagggcgaaaagcaccagagtgtgtcccatggagaagccgccgtcatcagggccccacggattgcctcatttcctcagcctcaagtgacttggttccgagatggcaggaagatcccaccatctagccggatcgccatcaccctagaaaacactctggtcatcttatctacagtagctccggacgccgggagatattatgtgcaggctgttaacgataaaaacggggataataagacctctcagcccattactcttacggttgagaatgtgggcggacccgccgatcctatcgcacccacaattatcatcccccctaagaatacatcagttgtggccggcacttcggaagtcacattggagtgtgtcgccaacgccagaccactgattaagctccatatcatctggaaaaaggatggggtcctgctgtccggcggtatctcggaccataaccgacggctgactatcccaaaccctaccggctcagacgcaggttactacgagtgcgaagctgttcttagatcatcctcagtgccgagcgtggtcaggggcgcttacctgtctgtgttggaacctccacagtttgtaaaagaacctgaacggcatattacggccgagatggaaaaagtcgtcgatatcccatgccaggctaaaggagtgccacccccctcaatcacttggtacaaagacgcagcggtagtggaagtggaaaagctcacacgttttagacaacggaacgacggggggttgcagatctccggcttggtccccgacgacaccggaatgttccagtgctttgcgaggaacgctgcaggcgaagtgcagaccagcacttacctggccgtgacctctatagcgcccaacattactcgcggcccgctggattctaccgtgattgacggtatgtcagtggttttggcttgtgagactagcggcgcaccacggcctgctatcacctggcagaaaggagagcgcatcctcgcttctggtagtgtgcaactgccccgattcactccgctggagtccggatcactgctcatttcaccaacacatatcagcgatgccggtacctacacctgcctcgctacaaactccaggggggtcgacgaggcttccgcagatttagtggtatgggccaggacccgaatcacaaagcccccccaggatcagtcggtgattaaaggtacacaagcaagtatggtgtgcggagttacccatgacccccgcgttacgattcgctacatctgggaaaaagacggcgctaccctggggacagagtcacacccgcggatccgtctggatcgtaacgggagcctgcatatctcacaaacgtggagcggggacatcgggacatatacatgtcgcgtcatctccgcaggaggaaacgattcgaggtccgcccatctgcgggtccggcagctcccacacgctcctgagcaccctgtcgcgacactgtctacagtagagcggcgggccatcaacctgacgtggacaaaaccttttgatggcaattcacccctaatacggtatatcctggagatgtctgaaaacaacgctccctggaccgtgctgctggccagtgtggacccaaaggcaacaagtgtcaccgttaaggggctggtccccgctcggtcttatcaattccggctgtgtgctgttaacgacgttggtaaaggccagttctccaaagacaccgagagagtgtccctgcccgaagaaccgcccactgcccctcctcagaacgtgatcgccagtgggagaacaaatcaatcaattatgatccagtggcagcccccaccagagagtcaccaaaatggcattcttaagggatacataatccggtattgtcttgctggccttccagtcggctaccagttcaaaaacatcacggatgctgacgtcaacaacctactccttgaagatctgatcatttggactaattacgagattgaagttgccgcctataattccgcgggcctcggggtttactcttcgaaagtgaccgagtggactctgcaaggcgtgcccaccgtcccaccgggtaacgtccacgcggaggcaaccaactctaccacaatcagattcacctggaacgcccccagcccccagttcatcaacggtatcaaccaaggatataagcttatcgcctgggaacccgagcaagaagaagaagtgacgatggtgactgctcggccaaattttcaggactcgattcacgtgggattcgtttccggcctgaagaagttcaccgaatactttacttcagtgctctgttttacaacacccggagatggccccaggtctactcctcagctcgtgaggacccatgaagacgttccaggacctgttggccacctgagttttagcgaaatcctggatacttccctgaaagtgtcttggcaggaaccaggtgaaaaaaatggcatccttacaggctataggatcagctgggaggagtacaatcggaccaacactcgtgtcacccactatcttccgaatgtcaccttggaatacagagtgaccgggctgaccgccttgaccacttataccattgaagtagccgccatgacaagtaagggccagggccaagtgtccgctagcaccatttccagcggggttccccccgaattacctggcccacctacaaacctcggaatttcaaacattgggcctaggtcggtcactctgcaattccgacccggctacgacgggaagacttccatctccagatggctggtggaggctcaggtaggagtagtgggcgaaggcgaagagtggctgctaattcaccaactttctaacgagccagatgcacgtagtatggaggtaccagatctaaatccgtttacttgctactcatttagaatgcgtcaggtaaacatcgtggggacatcaccaccgagccaaccatcacgcaaaatacagacgctacaggcacccccagatatggctccagcaaacgtttccctgagaactgcaagcgaaacctcactgtggctgagatggatgcctctgcctgagatggaatataatggaaatccggagtcagtcggctataagataaagtactcacgatcagatgggcacggtaagacccttagtcacgtggtgcaggacagggtggagcgagattacacaatagaggacctggaagaatggacagaatatcgtgtccaggttcaggcgtttaatgccattggcagcgggccatggagccagaccgtggttggccgcacccgggaatccgtcccgagttctggccccaccaacgtgagcgcgcttgctaccacatccagctctatgctcgtgaggtggtccgaagtacccgaggctgatagaaatgggttggtgcttggatataaagtgatgtacaaagagaaagattcagacacccaacccagattttggctggtggagggaaactcctccagatccgcccaactcactggtctaggcaagtacgtgctgtatgaggtacaagtacttgcattcacccgcattggggacgggtcccccagccatcccccaattctagagcggaccctggacgatgtgcccggtccacccatgggtattttgttccccgaagtccgtaccacctctgtaagattgatttggcagccacctgcggcacctaacgggattatcctcgcctatcaaatcacccacagactcaacacaactactgcgaacacagccaccgtcgaagtcttggctccatctgctagacaatacactgctacaggcctgaaacctgaaagtgtgtatttgtttagaattacggctcagactcggaagggctggggtgaggcagccgaggctctggtagtaacaactgagaaaagagatcgacctcagcccccatctcgccctatggtgcaacaggaggatgtccgcgcccgttccgttctgctcagctgggagcctggaagtgatggcctgagtcccgttcgatattacaccatccaaacccgtgagctgccgtcaggccgctgggccttgcattctgcttctgtctcgcacaacgcctcaagtttcattgtggacagactgaagccctttaccagctataagttccgggtgaaggccacgaacgacatcggcgattccgaattcagtgaggaaagtgagtctctgacaaccctccaggcagcccccgatgaagcccctactatactatcagtaactcctcataccaccacttccgtgctgatcaggtggcagccacccgcagaggataagattaacgggattctactgggctttcgaatccgttaccgcgagctgctgtacgagggactaagaggcttcaccctcaggggtatcaataaccccggcgctacttgggcggagttgacttatcttaacaagcacaggcggtatgaaatccgcatgagtgtctataacgctgtcggggagggaccaagctctccacctcaggaggtctttgtcggggaggccgtgccaacagcggcccccaggaatgtcgtggtgcatggtgcaacggctacgcaactcgacgtgacttgggaacctccccccctcgactcccagaacggggatattcaaggatacaaaatttatttttgggaggcccagaggggaaatctgacggaacgcgtgaagactctttttctggcagagaatagcgttaagttgaagaaccttacaggttacactgcgtacatggtgagcgtggccgctttcaatgccgccggagatggcccacgttctactcccactcagggtcagacccagcaggctgcccctagtgcaccaagctcagtcaagttctccgagctgaccaccacctccgtgaacgtaagctgggaggccccccagtttccaaatggcattttggaagggtaccgcttagtctatgaaccatgctctccagtcgacggtgtgagcaagatcgtgaccgttgacgtcaagggaaattcacccctttggctgaaggtgaaagacctcgcggagggggttacctatcgcttccgaattcgggccaaaaccttcacttatggccctgaaatcgaagccaatgttacaaccggccccggcgaaggagctccagggcccccaggtgtgcccatcatcgtgcgctatagttccgccatcgccatccattggtccagtggagatcccggaaagggtcccatcacgcggtatgtaatcgaagcccggcccagcgacgaaggcctgtgggatatccttatcaaggacatccccaaggaagtgtcttcttacacctttagcatggatatccttaaaccgggtgtcagctacgacttccgcgttatagcagtgaatgactatggtttcggtaccccctcaagcccgtcccagagcgtgcccgctcaaaaagcaaatccattttatgaggaatggtggttccttgtcgttattgcactcgtcggtcttattttcatcttgctccttgtgtttgtcctaatcatcagagggcagtctaaaaagtatgcaaagaagaccgactccggaaattctgccaaaagtggcgcgctcgggcactccgaaatgatgtccctggatgagtcttccttccctgcgctggaactgaacaaccgcagactgtcagtgaagaattcattctgcagaaaaaacggtctgtatacccgttcgcctcctcggccatcacccggaagtttacactactcagacgaggacgtcacgaaatataatgacctcatcccagccgagagcagtagtctgactgagaaaccttccgaaatctctgactcacagggtagcgattccgaatacgaggtggatagcaaccaccagaaagcccactcatttgtcaaccactacatttccgaccctacttattataattcctggcggagacagcagaaagggatttctcgagctcaagcatatagctacaccgagtccgactccggagagccagaccacacaacggtcaccaacagtacttcaacccagcaagggagcttgttcaggccaaaagcctcccgcacacccaccccgcagaatccaccaaaccccccctcccagcagtctacattgtaccggccacctagcagtcttgctcccgggtctagagccccaatcgcgggcttcagttcgtttgtgtag

SEQ ID NO: 317748 - DNA, 6462 bp, Artificial Sequence
  derived and/or modified sequence
atgtggggcctgctgatctggaccctgctggccctgcaccagatccgggccgcccgggcccaggatgatgtgagcccctacttcaagacagagcctgtgaggacccaggtgcacctggagggcaaccggctggtgctgacctgcatggccgagggctcctggcccctggagttcaagtggctgcacaacaaccgggagctgaccaagttcagcctggagtaccgctacatgatcaccagcctggacaggacccacgccggcttctaccgctgcatcgtgaggaacaggatgggcgccctgctgcagaggcagacagaggtgcaggtggcctacatgggcagctttgaggagggggagaagcaccagagcgtgagccacggggaggccgccgtcatccgggcccccagaattgccagcttcccccagccccaggtgacctggttcagagatggcaggaagatcccccccagcagccgcatcgccatcaccctggagaacaccctggtgatcctgagcacagtggccccagatgctggccgctactacgtgcaggccgtgaatgacaagaatggagacaacaagaccagccagcccatcaccctgactgtggagaatgtgggcggccctgctgaccccatcgcccccaccatcatcatcccccccaagaacacctctgtggtggccggcaccagcgaggtgaccctggagtgtgtggccaatgcccggcccctcatcaagctgcacatcatctggaagaaggatggagtgctgctgagcggcggcatcagtgaccacaacagaaggctgaccatccccaaccccactggaagtgatgctggctactatgaatgtgaggccgtgctgcggagcagctctgtgcccagcgtggtgcggggggcctacctgtctgtgctggagcccccccagtttgtgaaggagcctgagcggcacatcacagctgagatggagaaggtggtggacatcccctgccaggccaagggcgtgcccccacccagcatcacctggtacaaggatgctgctgtggtggaggtggagaagctgacccgcttccggcagagaaatgatggcggcctgcagatcagcggcctggtgcctgatgacaccggcatgttccagtgctttgccagaaatgctgctggggaggtgcagaccagcacctacctggccgtgaccagcatcgcccccaacatcacccggggccccctggacagcacagtgattgatggcatgtctgtggtgctggcctgtgagaccagcggggcccccaggcctgccatcacctggcagaagggggagcgcatcctggccagcggctctgtgcagctgccccgcttcacccccctggagagcggcagcctgctgatcagccccacccacatcagtgatgctggcacctacacctgcctggccaccaacagccggggcgtggatgaggccagcgctgacctggtggtgtgggcccggacccgcatcaccaagccaccccaggaccagagcgtcatcaagggcacccaggcctccatggtgtgtggggtgacccatgacccccgggtgaccatccgctacatctgggagaaggatggagccaccctgggcacagagagccacccccgcatccggctggacagaaatggcagcctgcacatcagccagacctggagcggggacatcggcacctacacctgcagggtcatctctgctggaggaaatgacagccgcagcgcccacctgcgggtgcggcagctgccccacgcccctgagcaccctgtggccaccctgagcacagtggagcggcgggccatcaacctgacctggaccaagccctttgatggcaacagccccctcatccgctacatcctggagatgtctgaaaataatgccccctggacagtgctgctggcctctgtggaccccaaggccacctctgtgacagtgaagggcctggtgcctgcccggagctaccagttccggctgtgtgctgtgaatgatgtgggcaagggccagttcagcaaggacacagagcgggtgtccctgcctgaggagcccccaacagccccaccccagaatgtcatcgccagcggccgcaccaaccagagcatcatgatccagtggcagcccccacctgagagccaccagaatggcatcctgaagggctacatcatccgctactgcctggccggcctgcctgtgggctaccagttcaagaacatcacagatgctgatgtgaacaacctgctgctggaggacctgatcatctggaccaactatgaaattgaggtggccgcctacaacagcgctggcctgggcgtgtacagcagcaaggtgacagagtggaccctgcagggcgtgcccaccgtgcccccaggaaatgtgcacgccgaggccaccaacagcaccaccatccgcttcacctggaatgcccccagcccccagttcatcaatggcatcaaccagggctacaagctgattgcctgggagcctgagcaggaggaggaggtgaccatggtgacagcccggcccaacttccaggacagcatccacgtgggctttgtgtctggcctgaagaagttcacagagtacttcacctctgtgctgtgcttcaccaccccaggagatggccccaggagcaccccccagctggtgaggacccatgaagatgtgcccggccctgtgggccacctgtccttcagcgagatcctggacaccagcctgaaggtgtcctggcaggagcccggggagaagaatggcatcctgaccggctaccgcatctcctgggaggagtacaacagaaccaacaccagggtgacccactacctgcccaacgtgaccctggagtacagagtgacaggcctgacagccctgaccacctacaccatcgaggtggccgccatgaccagcaagggccagggccaggtgtctgccagcaccatcagcagcggcgtgcccccagagctgcccggcccccccaccaacctgggcatcagcaacatcggccccaggtctgtgaccctgcagttccggcccggctatgatggcaagaccagcatcagccgctggctggtggaggcccaggtgggcgtggtgggggagggggaggagtggctgctgatccaccagctgagcaatgaaccagatgcccgctccatggaggtgcctgacctgaaccccttcacctgctacagcttcaggatgaggcaggtgaacatcgtgggcaccagcccccccagccagcccagcaggaagatccagaccctgcaggcccccccagacatggccccagccaacgtgtccctgaggacagccagcgagaccagcctgtggctgcgctggatgcccctgcctgagatggagtacaacggcaaccctgagagcgtgggctacaagatcaagtacagcagaagtgatggccacggcaagaccctgagccacgtggtgcaggacagagtggagcgggactacaccatcgaggacctggaggagtggacagagtacagagtgcaggtgcaggccttcaatgccatcggcagcggcccctggagccagacagtggtgggccgcacccgggagagcgtgcccagcagcggccccaccaacgtgtctgccctggccaccaccagcagctccatgctggtgcgctggagcgaggtgcctgaggccgacagaaatggcctggtgctgggctacaaggtgatgtacaaggagaaggacagcgacacccagccccgcttctggctggtggagggcaacagcagccgcagcgcccagctgaccggcctgggcaagtatgtgctgtatgaggtgcaggtgctggccttcaccagaattggagatggcagccccagccacccccccatcctggagaggaccctggatgatgtgcccggcccccccatgggcatcctcttccctgaggtgaggaccacctctgtgcggctcatctggcagcccccagctgcccccaacggcatcatcctggcctaccagatcacccaccggctgaacaccaccacagccaacacagccaccgtggaggtgctggcccccagcgcccggcagtacacagccaccggcctgaagccagagagcgtgtacctgttccgcatcacagcccagaccaggaagggctggggcgaggccgctgaggccctggtggtgaccacagagaagagggaccggccccagccccccagccggcccatggtgcagcaggaggatgtgcgggcccggtctgtgctgctgtcctgggagcccggcagtgatggcctgagccctgtgcgctactacaccatccagacccgggagctgcccagcggccgctgggccctgcacagcgcctctgtgagccacaatgccagcagcttcatcgtggaccggctgaagcccttcaccagctacaagttccgggtgaaggccaccaatgacatcggggacagcgagttcagcgaggagagcgagagcctgaccaccctgcaggccgccccagatgaggcccccaccatcctgtctgtgaccccccacaccaccacctctgtgctgatccgctggcagcccccagctgaggacaagatcaatggcatcctgctgggcttccgcatccgctaccgggagctgctgtatgagggcctgcggggcttcaccctgcggggcatcaacaaccctggggccacctgggccgagctgacctacctgaacaagcaccggcgctatgagatccgcatgtctgtgtacaatgctgtgggggagggccccagcagccccccccaggaggtgtttgtgggggaggccgtgcccacagctgcccccagaaatgtggtggtgcacggggccacagccacccagctggatgtgacctgggagcccccacccctggacagccagaatggagacatccagggctacaagatctacttctgggaggcccagaggggcaacctgacagagcgggtgaagaccctcttcctggctgaaaattctgtgaagctgaagaacctgaccggctacacagcctacatggtgtctgtggccgccttcaatgctgctggagatggccccaggagcacccccacccagggccagacccagcaggccgcccccagcgcccccagctctgtgaagttcagcgagctgaccaccacctctgtgaatgtgtcctgggaggccccccagttccccaacggcatcctggagggctaccgcctggtgtatgagccctgcagccctgtggatggagtgtccaagatcgtgacagtggatgtgaagggcaacagccccctgtggctgaaggtgaaggacctggccgagggcgtgacctaccgcttccgcatccgggccaagaccttcacctacggccctgagattgaggccaacgtgaccactggacctggagagggcgcccctggccccccaggagtgcccatcatcgtgcgctacagcagcgccatcgccatccactggagcagcggggaccccgggaagggccccatcacccgctacgtgattgaggcccggcccagtgatgagggcctgtgggacatcctgatcaaggacatccccaaggaggtgtcctcctacaccttctccatggacatcctgaagccaggagtgtcctatgacttccgggtgattgctgtgaatgactatggcttcggcacccccagcagccccagccagagcgtgcctgcccagaaggccaaccccttctatgaggagtggtggttcctggtggtgattgccctggtgggcctcatcttcatcctgctgctggtgtttgtgctgatcatccggggccagagcaagaagtatgccaagaagacagattctggcaacagcgccaagagcggggccctgggccacagcgagatgatgagcctggatgagagcagcttccctgccctggagctgaacaacagaaggctgtctgtgaagaacagcttctgcaggaagaatggcctgtacaccaggagccccccccggcccagccctggcagcctgcactacagtgatgaagatgtgaccaagtacaatgacctgatcccagctgagagcagcagcctgacagagaagcccagcgagatcagtgacagccagggcagtgacagtgaatatgaggtggacagcaaccaccagaaggcccacagctttgtgaaccactacatcagtgaccccacctactacaacagctggaggcggcagcagaagggcatcagccgggcccaggcctacagctacacagaaagtgacagcggggagccagaccacaccaccgtgaccaacagcaccagcacccagcagggcagcctcttccggcccaaggccagcaggacccccaccccccagaacccccccaacccccccagccagcagagcaccctgtaccggccccccagcagcctggcccctggcagccgggcccccatcgccggcttcagcagctttgtgtag

SEQ ID NO: 317749 - DNA, 6462 bp, Artificial Sequence
  derived and/or modified sequence
atgtggggcctgctgatctggaccctgctggccctgcaccagatcagggccgctcgggcccaggacgatgttagtccatattttaaaaccgaaccggtaagaactcaggtgcatctagaggggaacagactggtgcttacttgtatggctgaaggcagttggcctttggagttcaagtggcttcacaacaatagggaactgaccaaattctccctggagtacagatacatgatcacatctctggatagaacccatgccggcttctatcgatgcatcgttagaaatagaatgggtgctctccttcagcggcaaaccgaggtgcaggtggcctatatgggctcatttgaggagggagaaaagcaccagtctgtctctcatggagaggccgctgtgatccgtgctcccaggatcgcaagctttccgcagccccaggtcacatggtttagagatggacgtaaaatccctcctagcagcaggatagcaatcacactggagaacaccttagtgattctgagcacagtggcacccgatgctggacggtattatgtgcaggccgtcaatgataagaatggggacaacaaaacttctcagccgataactctcactgtggagaacgttggaggccccgccgacccaatagcaccaacaattataattccacccaaaaatacctccgtcgtggctggcaccagcgaagtcactctagagtgcgtggctaatgcccggcccctcataaaactgcacataatatggaagaaagatggtgtgttactgtccggaggtatctcggaccataatcgccgactcaccatcccaaatcccaccggcagtgatgccggttattatgaatgcgaggccgttctccgttctagctctgtgccttccgtagtacgcggagcctacctgtcagttttggagccacctcagttcgtgaaggagccagagagacacattacagcagagatggagaaagtggtggacattccgtgccaggcaaaaggtgtgccgccgccaagtatcacatggtataaagacgctgccgtggtggaggtcgaaaagcttacacgtttccgccagaggaatgacgggggattacaaattagcggactcgtgcccgatgacaccggcatgtttcagtgtttcgccagaaatgctgctggcgaggtccagacgtccacctacctggctgtcaccagcattgcccccaacattaccaggggacccttagactcaactgtgatcgacggcatgagtgtggttctcgcctgcgaaacaagcggcgccccgagacccgccatcacctggcagaagggagagagaattttggcgtctggtagcgtccaactgccaagattcacccctttggaatccggttctctgctgatcagccccacccatataagcgatgcagggacctatacgtgcctggctactaattctcgaggagtggatgaagcctcagccgacctggtggtgtgggccaggactcggataactaaacccccacaggatcagagcgtaatcaaggggactcaggcaagcatggtgtgcggtgtcacacacgatccaagggtaaccataaggtatatttgggagaaggacggcgccaccctcggtacagagtcccaccctagaattcggctcgatcggaatggcagccttcacattagccagacatggtccggggacatcgggacttatacttgtcgtgtgatctccgcaggggggaatgacagtagatccgctcaccttcgggtgcgtcagttgcctcacgcccccgagcacccggtcgcgacgttaagcacagtagaacggagagccattaacctgacctggacaaaaccctttgatggtaatagccccttaataagatacatccttgaaatgtccgagaacaacgccccctggactgttctgctcgctagcgtcgacccgaaggcaacctcagtgacggtcaaggggctcgttccagcaagatcttaccaattccggctgtgcgccgtgaacgatgtcgggaaaggccagttcagtaaggatacagaacgcgtcagcctgccagaggagccccccacggcaccaccacagaatgtcatagcctctggccggacaaaccagagcataatgatccagtggcagcctccaccagagagccaccaaaatgggatattgaaaggctatataatacgatactgcctggccgggctccccgtgggctaccaatttaagaacattaccgacgctgacgtcaataacctactattagaggatctgataatttggacaaattatgaaatcgaggtggcggcatacaactctgcagggctgggggtttactccagcaaggtgactgaatggacattgcagggagtgccgaccgttcctccaggcaatgtgcacgctgaggcaacaaactcaaccaccattcggttcacatggaatgccccttccccccaatttatcaatgggataaaccagggatacaagttgattgcctgggaacctgaacaggaggaggaggttactatggtgactgcgcggccgaacttccaagatagcattcacgttggttttgtcagcggcctgaagaaattcactgaatacttcacaagcgtactctgtttcaccactccaggtgatggcccccgatccactcctcaactcgttaggacccatgaagatgtaccaggtcccgtggggcatttgtctttcagcgaaatcctggatacttcgctgaaggtttcttggcaagagccaggagaaaagaatggtatcctgaccggatataggatttcttgggaagagtataatcgaacgaatactcgcgtcacccattacttgccaaatgtcactctcgagtatcgggtcaccggtcttactgccctgaccacttatactatagaggtcgctgcaatgacttctaagggccagggacaggtctccgcctctacaataagttctggcgtgcccccggaattgcctgggcccccaaccaatctcgggattagtaacatcggtccccgctcggtaacactgcagtttcgtcctggctacgacggcaaaacttcgatttcaagatggctagtcgaggctcaggtgggtgtagtaggcgagggagaggaatggttattgattcatcagctgagcaatgaacctgacgcccgatctatggaagtcccagatttgaacccgtttacgtgctattcctttagaatgaggcaagtgaacatcgtcggaacgagccctccaagtcaacctagtcggaaaattcagaccctgcaggcgcctcccgatatggctccagccaacgttagcctgaggactgccagcgaaacatcgctctggctgcggtggatgccgctccctgaaatggagtacaatggtaatccggagagcgtgggctacaaaattaaatatagccgatctgacggccatggcaaaaccctatcgcatgtggttcaggatagggtggaacgcgactataccatagaggatctcgaggagtggactgagtaccgggttcaggtgcaggccttcaatgccattggatctggcccttggagccaaaccgtggtcggccgcactagggaatccgtccctagctctgggccgaccaacgttagcgctctggcgaccacatcttcttcaatgctcgtcagatggagcgaggtgcctgaggcagacaggaatggactggttctgggctacaaggtgatgtacaaggaaaaggattccgatactcaacctcgattttggctggtggaaggaaactcttctagaagcgcacagctgaccggtctaggcaagtacgtgctctacgaggttcaagtgctggccttcactagaataggcgatggctcaccatcgcacccacccatcctggagagaactctcgacgatgttcctggacctcctatgggaattcttttccctgaggtgcggactactagcgtgcggctgatttggcagccacctgccgctccaaatggcatcattctcgcataccagattacccacaggctgaacacaactactgccaatactgccaccgtcgaggtgctcgccccctcagcccggcaatacactgcaacggggcttaaaccagagtctgtctacctgttccgaatcaccgcccaaaccagaaagggctggggggaggctgccgaggctctggtagtgactactgagaaacgtgaccgacctcagcccccctctcggccaatggtgcaacaggaggacgttagggcaagatccgtcctgctatcttgggagcccgggtcagacggcctgagccccgtccgctattacaccatccagactcgggaactccctagcgggcgatgggccttgcacagcgccagtgttagccataatgcctctagcttcatcgtggacaggttgaaacctttcacatcttacaaatttagagtgaaggctactaacgacatcggagacagcgaatttagcgaagaatctgaatcgcttacaactctgcaggctgcacctgatgaggcacctacaatcctcagcgtgacaccacacactaccacaagtgtgttgattagatggcagcctcccgctgaggataagattaacggaatcctactcggatttcgaatcagatacagggaactgttgtatgagggcttaagaggatttaccctgcgtggtataaacaaccccggcgcaacatgggcggaacttacctaccttaataaacaccgcaggtatgaaatacggatgagtgtttataacgcagttggtgaaggccccagcagccctccccaggaggtgtttgtgggagaggctgtccccacggccgcacctaggaatgtggtggtacacggcgcaacagctacacaacttgatgtgacatgggagccacctccactggactcccagaacggggacatacaggggtataaaatctatttttgggaagcgcaacggggcaaccttacagagagggttaaaacactgttcctggccgagaactccgtcaaactcaagaatctaacaggttatactgcttacatggtgtccgtggccgctttcaacgcagccggtgatgggcctcggtcgaccccaacccaagggcaaacacagcaggccgccccttcggccccttccagtgtgaagttttccgagcttaccactacgagcgtgaatgttagttgggaggccccacagttccctaacggaattctggagggctacagactcgtgtatgaaccatgctcacctgtcgatggagtgtctaagatcgtcaccgtcgatgtcaaagggaattctcccctctggctcaaagtgaaggatctggccgaaggggtcacctaccgcttccgtatccgagcaaaaacattcacctatggaccagaaattgaggcgaatgtgaccacaggccccggagagggcgctcccgggccccccggcgtccctataatcgtgcggtattccagtgccatagccattcattggtcaagcggggaccctggtaagggccctattacccggtatgttattgaagcaaggccctccgacgaagggctttgggacattctgataaaagatatcccaaaggaggtttcatcctatacgtttagcatggatatactaaaacccggtgtttcctatgactttcgcgtgatcgcagttaacgattatggcttcggaacaccaagttcacccagccagtctgtgccggcacagaaggctaaccccttctacgaagaatggtggttccttgtggtaatcgctctggtaggactgatcttcatccttctgttagtattcgtcctgatcatccggggacaaagcaaaaaatatgcaaagaagactgatagtggcaattcagctaaaagtggggcgttaggccatagcgagatgatgtcactcgatgagagcagcttccccgccttggaacttaacaaccgacgactcagtgtaaaaaattcgttctgtaggaaaaatggtctttacactcggagcccccctcggcctagtccggggagtctacattattccgatgaggatgttaccaaatacaacgacttgattcccgctgaaagctcttcgttaaccgagaaaccttcagaaatctctgactcccaaggatctgactccgagtacgaggttgatagcaatcatcagaaagcacatagcttcgtgaatcactacatcagtgaccccacatattacaacagctggcgccgccagcagaaagggatctcacgagctcaggcctattcatacaccgagtctgactccggcgaacctgaccatactactgtgaccaattccacttcaacacagcaggggagcctttttcgccctaaggccagtcgaacacctacccctcagaacccaccgaatcccccctctcaacagagtaccctctaccgcccaccctcatcattggcacctggcagccgtgcccctatcgccgggttttcatcattcgtttag

SEQ ID NO: 317750 - DNA, 6461 bp, Artificial Sequence
  derived and/or modified sequence
atgtggggtctgctgatatggacgctgctggctttgcaccagattcgagcagcacgcgcacaggacgacgtgtcgccgtactttaagactgaaccagtgcgaacacaggtgcacctcgagggaaatcggctcgtgcttacctgtatggcggaaggtagttggccactagaattcaaatggctgcataataatagagaattaactaagttttctctagaatacagatacatgatcacctcccttgaccggacacatgcaggcttttatcgttgtattgtgaggaaccgtatgggagctttgctgcagcgccagactgaggtccaagtcgcttatatggggagtttcgaggaaggagagaagcatcaatctgtgtcccacggagaagctgccgtgataagagctcctcgcatagcctcatttcctcagccccaggtgacttggtttagggatgggaggaagatccccccatccagccggattgcaatcaccctcgaaaatactctggtgattcttagcacagtggcgcctgacgcaggccgttactatgtacaagctgttaacgataagaacggggataacaaaacctctcagccaatcacactcaccgtggagaacgtgggtggccctgccgatcccatagcccctactatcatcatacctcccaagaatacctctgttgttgcaggaacctcagaggtgaccctggaatgcgtcgccaatgcgcgtcctctcatcaagcttcacattatctggaagaaggacggcgtgcttttgtcaggcggtattagtgatcataatcgaaggctgactatcccaaaccctacagggagcgatgctggctactacgagtgcgaggctgtcctgcgctcctcctcagttccatcagtcgtcaggggcgcttacctctccgttctcgaacccccacagtttgttaaagaacccgaaaggcacatcaccgcggaaatggaaaaagtggtcgacatcccttgtcaggctaagggggtcccacccccttccatcacatggtacaaggatgcggcagtggtggaagtggaaaaactgacccgcttccgacagcgcaatgacggcggtttgcagatttccgggcttgtacctgacgacacaggtatgttccagtgttttgcacggaatgcggctggcgaagtccagacctccacatacctggctgtgacaagcatcgctcccaacattaccaggggccctctggacagtacagttatcgacggcatgagtgtggtgctcgcctgtgagacatctggggcaccgaggcccgcaatcacctggcagaagggggaaaggatcctggcatcaggctctgtgcagctgcctcggttcacccccctcgaatccggctctctccttatctcccctactcatatctccgatgctggcacctacacctgtttggccacgaactcacgcggagttgacgaagctagtgccgaccttgtcgtgtgggcaagaactcgtattactaagccccctcaggatcagagcgtgatcaaaggaacccaggcgtctatggtatgcggtgtcactcacgaccctagggtgaccatacggtacatctgggagaaagatggggctaccctggggaccgaaagtcacccacgcattcgcctggacagaaacgggagcctgcatatttcccagacctggagcggagatataggcacatatacatgtcgcgttatctccgccggaggcaacgacagccggtccgctcacctcagggtgcgacagttacctcatgccccagaacacccagttgcaaccctgtctaccgtggaaagacgcgctatcaaccttacatggacaaaaccctttgatggcaactcgcccttaatccgctacatattggaaatgtctgagaacaacgcgccatggacagtccttttagctagcgtggacccaaaggccacctcagtcactgtgaagggcctggtccccgcacgctcataccaattcaggttgtgcgccgttaatgacgtgggcaagggccagtttagcaaagacacggagagggtctcattacccgaagagccccctaccgcgccacctcagaatgtgatcgcgtctggaaggaccaaccagtcgatcatgattcagtggcagcctccccctgaatctcaccagaacggaatcctgaagggctacatcattcgttattgtctcgcaggtctgcctgtggggtaccagtttaagaatataacagatgccgacgtcaataatctgctcctggaggaccttattatctggacaaactacgagatcgaggtggccgcttataactcagccggtctgggggtctattcaagcaaggtaactgaatggacattacaaggcgtacctacggtacccccaggcaacgtccacgcagaagctaccaattccacaactattcgcttcacctggaacgccccaagcccgcagttcatcaacgggataaatcaaggctataagctgatagcctgggaacccgagcaagaggaagaggtaacaatggttacagccaggccaaactttcaggatagcattcacgtggggtttgtgtcagggctcaaaaaatttacggagtactttaccagcgtgctatgcttcaccacacctggagatggtcccaggagtactcctcagcttgtgcggacgcacgaggacgtgccagggcctgtaggccatcttagcttctcagaaattctggatacctccctgaaggtctcctggcaggagccaggagagaagaatgggatccttacaggctataggatcagttgggaagaatacaaccggaccaatacacgggtgacccattatctccctaatgtgacgttagaatacagggtaacggggctgacagctcttaccacctatacaatcgaggttgctgcaatgacgtcaaaaggtcaaggtcaggtatccgcttccaccatcagctctggcgttcctcccgaactccccggtccgccaacaaacctggggatcagcaacataggcccaaggagcgtgacactacagtttcgccctggatacgacgggaaaacctcaattagccgctggctggtggaagcccaagtgggagtcgtcggagagggggaagagtggctcctcattcatcaattgtctaacgaaccggacgccaggagcatggaggtgcctgacctgaatccttttacgtgttatagctttcggatgcgacaggtgaatatcgtggggacatctcctccgtctcagccttcccgtaaaatccagaccctccaggctccacccgatatggcccctgccaacgtgtctctcagaactgccagcgaaacatctttatggctccgctggatgcccttgccagagatggaatataatgggaatcccgaaagcgtgggatacaaaattaagtatagccgatccgatggtcacggcaagaccctgtctcatgtcgtccaggatagagttgagcgcgactacacaatcgaggacttagaagagtggacagaatacagggtccaagtccaggctttcaacgccattggctccggaccctggtcccagactgttgtggggcgaacacgtgaaagtgttccttcctccggccctactaacgtctcggccttggccacgacaagttcaagcatgttggttcggtggtcagaagtcccagaagcggatcgcaacggactggtgctgggttataaggttatgtataaagaaaaagatagcgatacccaacctagattttggctggttgagggcaactcatccagatccgcacaactcaccggcctcggcaaatatgtcctttatgaggtccaggtgctcgccttcacccggatcggagatgggagcccttcacatccgccaatactcgaacgcaccttagatgacgtgcctggacccccaatgggaattttgtttcccgaggtgcggaccacctctgtgagactgatctggcagcctccggcagctccaaacggaatcatactagcttaccagattactcatcgtttgaacaccactaccgctaacactgccaccgttgaagtactggcgccatcagctagacagtacacagccaccggactcaagcctgaatctgtctatctgtttcggataactgcccagactcgtaaggggtggggcgaggcggctgaagctctggtagtgactactgagaagcgcgatcgacctcagccaccctctcgaccaatggtgcagcaggaagacgtgcgagcccgatcagttctgttgtcatgggagccgggttctgatggactcagcccagtgcgctactacacaattcagacccgcgagctgccctcaggacgctgggctttgcattcagcgagcgtctctcataacgcctcctctttcattgtggaccggctgaaaccatttacgtcttataagtttcgggtgaaggcgaccaacgatatcggcgattccgagttctcggaggagtcagaaagtctgacgaccctccaggctgctcccgatgaagccccaaccatactctctgtaactcctcacacaacgaccagcgtcctgatccgttggcagccacctgcagaagataagattaacgggatcctactaggcttccggatacgctatagagaactgctgtatgagggcttacggggatttactctgcggggaattaataatcctggggctacttgggctgaattgacatatttaaataagcacaggcgttacgaaattagaatgagtgtgtacaacgcggttggggagggaccatcgtcccctccgcaagaggttttcgtgggggaggccgttccaacagccgctcctaggaatgtggtggttcacggggctaccgccacccagcttgatgtgacgtgggaacccccaccacttgattcccagaacggtgacatccagggatataaaatctacttctgggaggcccaaaggggcaatcttaccgaaagggtcaaaaccctcttcctggccgagaactccgtaaaactaaagaacctgaccggctataccgcctatatggtgtctgtagccgctttcaatgccgcaggcgacggaccccgttcaacgccaacacagggacagacacaacaagcagccccatctgctccaagttcggtgaaattcagtgaactgaccactacatccgtgaacgtgtcatgggaggctccgcagttccctaacggcattctggaagggtataggttggtgtacgagccttgctctcctgtcgacggcgtatcaaaaatcgttaccgtcgacgtgaaaggaaacagcccgctttggcttaaagtcaaagatcttgccgaaggcgtgacttatcgtttccggattagagctaaaactttcacatacgggcctgaaattgaggccaatgtaaccacaggtccaggcgagggggctcccggtcctcccggagtccccatcattgtgcgctattcatccgctatcgctatacattggagctccggagatcccggtaagggacctatcacccgatatgttattgaagctcggccaagtgacgagggcttgtgggacattctaatcaaggatatcccaaaagaggtcagctcctacaccttctcaatggatattttgaaacccggtgtaagctatgatttccgggtcatcgccgtcaacgattacggattcggcaccccttcctctccgtcccagagcgttcccgcacagaaagctaatccattttatgaggagtggtggtttctcgtggtgattgctctcgtgggccttatttttatcctgctactggtgttcgtcctgattatccggggacagtccaaaaagtatgctaaaaaaaccgatagcgggaattcagctaaaagcggagccttggggcactcagagatgatgtcccttgatgaaagctcattccctgccctggaactgaataaccggcgactgtctgtaaaaaactctttctgtcgtaagaatggcttgtacaccagaagccctccacggccatctccaggatctctgcactatagtgacgaggatgtgacaaaatacaacgacctcattccggctgaatccagttctctcacggaaaagcccagcgagataagcgacagccagggaagcgattccgagtacgaggtcgacagcaatcatcagaaggcccactccttcgtgaaccattatattagcgatcctacatactataactcatggcgtcgccagcagaagggaatcagccgggcacaggcctactcctacacagagagcgactccggagagcccgaccacacgacagtaacgaactccaccagcactcagcagggcagcctcttcaggccaaaagcctcacggactcccaccccacagaatccccctaatcctccaagtcagcagagtactctttatagacccccaagcagccttgcccctggcagtcgggcacccatagccggattttcctctttcgtata

SEQ ID NO: 317751 - DNA, 10664 bp, Artificial Sequence
  derived and/or modified sequence
atgtgggggcttttgatctggacactgctagctctgcatcagatccgcgcggccagagcccaagatgatgtgtccccgtatttcaagacagagcctgtgcggacacaggtgcacttggaaggaaaccgcctggtgcttacatgcatggccgagggcagctggccactggagttcaagtggctccacaacaacagggagctgaccaagttctccctggaatacagatacatgatcaccagcctggaccgcacccacgctggcttttaccgttgcatcgtgcggaaccgaatgggggccctgctgcagcggcaaaccgaggtccaggtggcctacatggggagctttgaggaaggtgagaagcaccagagcgtctcccacggagaagcagctgtcatccgtgccccgcgcatcgccagcttcccccagccacaggtgacctggttccgggacggccgcaagatcccgcccagcagccgcatagccatcacgctggagaacacccttgtcatcctgtcaacggtggcccctgacgcaggtcgctactatgtgcaggctgttaacgacaaaaacggggataacaagaccagccagcccatcacgctcaccgtggagaatgtaggggggcctgcagaccccatcgcacccaccatcatcatcccacctaaaaacaccagcgtggtggccggcacctcagaggttaccttggagtgtgtggccaatgccaggcccctgatcaagctacatatcatttggaagaaggacggggtattgctgtcgggcggcatcagtgaccacaaccgccggctcaccatccccaaccccaccggcagtgacgccggctactacgagtgtgaggctgtcctgcgcagcagcagcgtcccctctgttgtccggggcgcctacctctcagtgctggaaccgcctcagtttgtcaaggagccagaaagacacatcactgcggagatggagaaggtggtggacatcccctgtcaggccaaaggtgtgccgccgccctccatcacctggtacaaggacgcagccgtggtggaggtggagaagttgacccgcttccggcagcgcaacgacgggggcctgcagatcagcggcctggtgcccgatgataccggcatgttccagtgcttcgcccgcaatgcagccggcgaggtgcaaacttccacctacctggctgtcaccagcatcgcccctaacatcaccagaggccccctggacagcacggtgatcgatggcatgtcagtggtgctagcatgtgagacctcgggggcgccccgaccagctatcacttggcagaaaggggagcgcatcttggccagtggctctgtgcagctgcctcgcttcacacccctggagtcgggcagcctcctcatcagccccacacacatctccgatgcggggacctacacctgcctggccaccaactctcggggggtcgatgaggcctcagcagacctagtcgtttgggctcggacccgcatcaccaagcccccccaggatcagagtgtcatcaagggcacccaggcctccatggtgtgcggagtgacccacgacccccgagtaaccatcaggtacatctgggagaaggacggggccaccctgggcacggagagccatcctcgtatccgcctggacagaaacggctccctgcacatctcacagacgtggtcgggagacatcggcacgtacacctgccgggtgatctcagcaggaggcaacgactctcgcagtgcccacctgcgagtcaggcaactgccccacgcgcccgagcacccagtggccactctcagcaccgtggaaaggcgagccatcaacctgacgtggaccaagccctttgatggcaacagccccctgatccgctacattctggagatgtcggagaacaatgccccctggactgtactcctggccagtgtggaccccaaagctacctcagtgacagtcaagggcctggttcctgcacgctcctaccagttccgtctttgtgccgtcaacgacgtggggaaaggacagttcagcaaagacaccgagagggtctccctccccgaggagccccccacggcccctccacagaacgtcatcgccagcggtcgaaccaaccagtccatcatgatccagtggcagccgcctcctgagagccaccagaatggaattctcaagggttacatcatcaggtactgcctggccgggctgcccgtggggtaccagtttaagaacatcacggatgctgatgtgaacaacctgctgctggaggatctcatcatttggaccaactacgagatcgaggtggctgcttacaacagcgctgggctgggggtctacagcagtaaagtcaccgagtggacgctgcagggagttcccacggtccctccgggcaatgtgcacgcggaagccaccaattccacgaccatccgcttcacctggaacgcccccagcccccagttcatcaacggcatcaaccagggctacaagctgatcgcctgggagccggaacaggaagaggaggttaccatggtgaccgcccggcctaactttcaagacagcatccacgtgggcttcgtgtctggcctgaagaagttcaccgagtacttcacctcagtgctgtgtttcaccacccccggggacgggccacgcagcaccccgcagctggtgcgcacccatgaggatgtgcctgggcccgtgggacacctgagcttcagtgagatcctggacacatcgctgaaggtcagctggcaagagccgggagagaaaaatggcatcctcacagggtaccggatctcctgggaggagtacaatcgaaccaacacccgtgtgacccactacctgcccaacgtgaccctggagtaccgtgtcacgggcctcaccgcgctcaccacctacaccatcgaggtggccgccatgacctcaaagggccagggccaagtgtccgcctccaccatctcctctggggtgcccccagaactcccagggccccccaccaacctgggcatttccaacatcggcccccgctctgtgaccttgcagttcaggccaggctacgatgggaaaacctccatctcccgctggctggtggaagcccaggtaggcgtggttggggagggagaggagtggttgctgatccaccagctctccaatgagcccgatgcccgctccatggaggtgcccgacctcaaccccttcacctgctacagcttccgcatgcgccaggtgaacatcgtgggcaccagcccccccagtcagccttctagaaagatccagaccctgcaggcaccccctgacatggccccagccaatgtgtctctgcgcacagccagtgagaccagcctgtggctgcgctggatgcctctcccggagatggaatacaatgggaaccctgagtccgtgggctataagatcaagtacagccggtcagacgggcatggcaagacgctgagccacgtggtgcaggaccgtgtggagcgggactacaccatcgaggacctggaggagtggacagagtaccgcgtccaggtccaggccttcaacgccatcgggagcgggccctggagccagacggtggtgggcaggacccgggagtcagttccctcttccggccccaccaatgtgtctgcactggccaccacctccagcagcatgctggtgcgctggagcgaggtccccgaggctgatcgcaacgggctcgtgctgggctataaggtgatgtataaggagaaggactcggacacccagccccgattctggctggtggaaggcaactcgtctcgcagtgcccagctcaccggcttgggcaaatacgtgctctatgaagtccaggtgctggccttcacacgcatcggggacggcagccccagccaccctcccatcctggagcggacgctggatgatgtcccaggaccacccatgggcatcctgttcccagaggtgcggaccacgtctgtgcggctgatctggcagccccctgccgcccccaatggcatcattcttgcttaccagatcacacaccggctcaacaccaccacggccaacaccgccactgtggaggtgctggcacccagcgcccggcagtacacagccacgggcctcaagccagagtctgtctacctgttccgcatcacggcccagacccgcaagggctggggagaagctgccgaggccttggtggtgaccaccgagaagagagaccgtccgcagccccccagcaggccgatggtgcagcaggaggatgtgagagcacgcagcgtgctgctgtcctgggagccagggagcgacgggctctcccctgtgcgctactacaccatccagacccgcgagctgcccagcggcaggtgggcactgcactcggcctccgtgagccacaatgcctccagcttcattgtggacaggctgaagcccttcacgtcctacaagttccgagtgaaggcgaccaatgacattggcgacagcgagttcagcgaggagtcggagtcactgaccaccctgcaggctgcccccgatgaagcacccaccatcctctccgtgacgccccacaccaccacctccgtgctaatccgatggcagccgccagcagaggacaagatcaatggcatcctcctgggcttccggatccgataccgggagctgctctatgaaggactgaggggcttcacgcttcgaggcatcaacaacccaggggccacatgggctgagcttacctacctgaacaagcacaggcggtacgagatacggatgagcgtgtacaacgctgtgggtgaggggccctccagccccccgcaggaggtctttgttggggaggcagtgcccacagcagcacctcgtaacgtggtcgtccacggcgccacggccacacagctggacgtgacttgggagccacctccgctggacagccagaatggagacatccaggggtacaagatttatttctgggaagcccagcgggggaacctcacagagcgagtgaagacgcttttcctggctgagaacagcgtgaagctcaagaacttgactggctacacggcctacatggtcagcgtggccgccttcaacgccgctggggatgggcctcggagcacccccacccaaggccagacccagcaagcagcccccagcgctcccagctcggtcaagttcagtgagctgaccacaacctcagtgaatgtgtcctgggaagccccgcagttccccaatggcatcctggagggctacaggctggtgtacgagccctgcagccccgtggatggagtcagcaagatcgtgaccgtggacgtgaaggggaacagccccctgtggctgaaggtgaaggacctggcggagggggtgacctacaggttccgcatcagagccaagaccttcacctacgggccggagatcgaagccaacgtcaccacgggccccggagaaggtgccccaggaccgcctggcgtgcccatcatcgtgcggtacagctctgccatcgccattcactggtccagcggagacccgggcaaagggcccatcacccgctacgtcatcgaggccagaccttcagacgagggactatgggacatcctcatcaaagacatccccaaggaggtgagctcctacacgttcagcatggacatcctgaagccgggcgtgagctatgacttccgggtcatcgcggtcaacgactatggtttcggcacccccagcagcccctcccagtctgtgccagcccagaaagccaaccccttctatgaggagtggtggttcttggtggtcattgccctggtcggcctcatcttcatcctgcttctggtcttcgtgctcatcatccggggccagagcaagaagtacgccaagaagacagactcggggaacagtgccaagtctggagccctaggccacagcgagatgatgagcttggatgaaagcagcttccctgccctggaactcaacaacaggcggctctccgtcaagaactctttctgccgaaagaacggcctgtacaccaggtctccccccaggcccagcccaggcagcctgcactactcggatgaggatgtcaccaaatacaacgacctcatccctgcagagagcagcagcctgacggagaagccctcagaaatctccgactctcagggaagtgacagcgagtacgaggtcgactcaaaccaccagaaggcccactcctttgtcaaccactacatcagtgaccccacatactacaactcgtggcggcgacagcagaagggcatctcgagggcacaggcctacagctacacggagagcgactcgggtgagccagaccacaccaccgtcaccaacagcaccagcacccagcagggcagcctctttcggcccaaggccagtcggactccaacgccccagaacccccctaaccccccaagtcagcagagcaccctctaccgtccccccagcagcctggccccaggctcccgggctcccatagcaggattttcatcatttgtttgacatcagaagaggaaaaagcagaaagagaaatggcaccaaactcctccttcacccctcctctcactgcctgccagaaaacaaaaacaccaagaaaccaagtcaacttttcacctcctgagtttatttttccagagattccagggccagcaaagccggcgttcagaaggagggagaaaaccgtgagaggatgtgtgtggccagcagctcttcagctttgagatggtggggttcactgctcccttgggaattacacggagctggggaagtggctgtgtcactgctatggacacggagtggggcgggcatctggagagagagagggagcggaggctaaggactggaggccgccaggcaggcgtggccgagggaagaaaaagcttctggatgtccagccagctgcccccttccagcccctccaggacccctggacccactgccgctgctctctgcaaaaagaatgggcatcccggaggccacgcctatcttctctctctgctcctccttccctccatgcaccatcactgtggctggcaggcatcggacagcctcatccagaccccctgccctgtcttggcaacctctactgcccatctcccctgctcaacttctccaccaagcatttggtttatttagaaaaaggaagaaaaacaaaaaacaaaaaactaaagggtgagaatttgcttagcgccttccttgttcctgcatattttttaaaatattgaatccaaggaagagagcccaagggtaggggagaaaccccccacaactgacccctgcctccctgtgctggaattgactttcctgagcatggacaaggaaaggtgaagtctggggagcagaggtgtaaataaggcgactggccttggcactgtgggatgattaggtttaacgcattgtgggcaagataagaatgacactttgactgttctctttcttccaatccaggttccatccgtcctctctttaaaggggtagtcagcttcccaaggctggggagtggggcacagctgagggatctccctctgggcagacacgtcactctccactggatagatcctcaccacacacacacacacacacacatctcccatgcacttacaaggaacagggtctagggatcctctccagaacaaactcatctgggccctcctagccagacagcacactcactttcagatctgtgtccctctcactgccacccggcagcctcctaagcacagaggcacaggagcccagaggggtggcccaagtccctggtccagaggctggaatacccagagtttgctcagtcagcctagcacccagtttacaggcaaaaaggcaaagacaccctaacccccagtaacagcttccaggctgggctccgcctggccagggcggggaggggaaggggcaggtcaggaagctcagtccaaagtggacccagcatttgaattgcacgcccagcaggggcaggtcagatgggaccaagtgacaagaatagctgatgggagggaatgcttttacacacacacacacacacacacacacacatacacatacacaatctgctccaaggagtgttctgcaaaaagccacatccagtggccaggatcttcccgtccacttggtacttacggatgccagggtttagggagaagcctttctatctaactccatacattgtccaaggccctctgtgccctcagccagccctgtaaggccagcccaacacctgccccaccgctgagatgggtggcagatggcccacaggggcctgtctgattcagcgtgagccccttcgtggagcagggctccctctgtgcactgtgtacaggcgctgctggccctgcccaagagatgatgctctgttggggtgggtgagcagagttcaaggaagcccaagtaggagatttgggaaacatgccaaggtaagagagagcctggaccactctcctacagccccaagtcagtcactgtgctaatggtgaccgggaagggaagtcagggtctggggcccaaagaacgggcacacccagccatgagtttttcctgaagcacttgacccctgggaaatgtgaacggggagatgctggaagatggctcagcagacaggccagcccagctccagtgtccaaaaagcggtttctccaataaggaggcctgggaagggaagcacaatcttccccaaaggagaaccaagggctgaggttctgcccctccaggaagtaaggtgctctcggggcctccttggacttgtctgggggctgcagtggagtcagctggacacctgctccacccctgccacctccgcccccaccctctgcagcatctggcatctccatggcagcacatctgcagctgccggcctgtgatcgtgccgcacagctttcttttctttcctctcatcttttttttttttttttttttaaataacttcatccctttccctctctgctgagcatttaaccatttaaggaagttcccagtttgcattagggaattatttaagcccagcccagtgagggattatttgggaggaagcaggagtgagtaaaaacattgtgtctgtgtatatattgcacatgaggtcaattttcctttgcctttaatgaatcacctggtgcactaagatattccacccccccactccccacacgctcattcgcacccatgctgacacctacgtgtacatgcgggatggtgcccatgcacgcctgtgcttacacacatgcacacacaaatatgcacagaacacacatctgtatgtgtgttagcaaagagactcctgaactccctctgatggctgaagccatctctcccctgtgaggcacaggtggcctgggttgcttgcacttggggcgtggctgggatctattgtctgagagggtgaggacaccacgcaaatttagacaagcccatgagatcaggctgggcccatggtgaaagtcccacacttagtcaatacccactcatctggaatattgtctccacagccccagccacagctggaagcccaggcctgcagctgtggaactctagattttttcaggacacgtctctttgcccttgtttacatatctactggcacagccgaggctcccaaccgtcctcccagaaacctggccacattagaaaggggtggtgggccctgccctttgtagaaagagtgggaccctttctggcctgtgattttccgtgccagtgatgccagggcccctgcctgtgggactccacccaaagcaggttcacaccaggacacacctggcacctttggcattgcctccttgtgccctaagcaatctcccagtgttgcacccaggagcccatgctgggcacaccagggctttccccttcctggctgcgcctccagagttgacgtcagctccacacccacactgccaagacaaaccaaaaagatgctctgggctccagaaccaccatcctcctagggctccagagagtttgcaaacccaggctgcctccccttctgtccatccctcaccccccggcccccaaaactcctacccccaaacctggcactgccgtgatttagaggaaacaaggacacagcgggggctgcccccacctggtgcacgctgcctcaaggccttctgttgctgcccacgcctccctgggcagtgcttctaaaggtgccagagcctcaccacagtgccactctggctgggcaggggcttccctcagcttcccagagtgcacatctgaaggtgcctaccctgggtgaggggctggtgggcaggaaggtaaaggggagaccatctgagcagccgccacccgctccccagtgcctctgtatggccctatccagggacacccatgggcatgcgcacatggcaatcctgaccaccacctgagcacaggtgccccctcgggaccaccccccttctctttgtttccatcagaataaccaaaagcatttaaacgtgttacctttctccatccatctagactccagaaacaaaaatcaacacaaatctttattttttgatttaaaagatataacaaaaaattatggggagagtattcattatggcaggtgtctgtctgtaagaaaaaaatatatatctctatgtcatatagcgtgttagcaggtttattttttaaatgaaaggtaagaaagaaattgatttgaaatatataccacaagaagtcccgtgtcctgtcaaactgtcagtattttataaataaacttttttttttgg

SEQ ID NO: 317752 - DNA, 171 bp, Artificial Sequence
  derived and/or modified sequence
atggccatcctgaagatgggccccaagatcgtgctggagtggagcggcggccaccccagcaaggaccccagcagctactacctgatcatcctgcacaaggacaccagcagcaccctggtggactgccacttccagcaccacaacctgcacaaggtgggcttcctgtactag

SEQ ID NO: 317753 - DNA, 171 bp, Artificial Sequence
  derived and/or modified sequence
atggccattctaaagatgggccccaaaatagtcctagagtggtccgggggccaccctagcaaagaccctagttcttactacctaatcatcttgcataaagacacgtcttcaacccttgtagactgccactttcaacaccacaacctgcacaaagtgggattcttatactag

SEQ ID NO: 317754 - DNA, 171 bp, Artificial Sequence
  derived and/or modified sequence
atggccatcctgaagatgggccccaagatcgtgctggagtggagcggtggccatcctagtaaagatccgtcctcatattacctcataatactccacaaggacacctcgagtacccttgtggactgccattttcagcatcacaacttgcataaagtcggcttcctctattag

SEQ ID NO: 317755 - DNA, 171 bp, Artificial Sequence
  derived and/or modified sequence
atggccatcctgaagatgggtccaaagattgtgctggagtggtcaggaggacatcccagcaaggatccctccagctattacctgatcatcctgcacaaggatactagttcaacgctagtggattgtcacttccagcatcacaaccttcacaaagtggggttcctgtattag

SEQ ID NO: 317756 - protein, 145 aa, Artificial Sequence
  derived and/or modified sequence
MFTSPSEGKPGNMDRHHYEMFTKFGDDGFLIHLDNARGFGRHSHDEISILSPLSQCCMIKKKTLLHLQLLAQADYRLSDVMRESLLEDQLSPVLTEPHLLALDRRLQTILRTVEGCIVAHGQQSVIVDGPVEQLAPDSGQANLTS

SEQ ID NO: 317757 - protein, 430 aa, Artificial Sequence
  derived and/or modified sequence
MFDGYDSCSEDTSSSSSSEESEEEVAPLPSNLPIIKNNGQVYTYPDGKSGMATCEMCGMVGVRDAFYSKTKRFCSVSCSRSYSSNSKKASILARLQGKPPTKKAKVLQKQPLVAKLAAYAQYQATLQNQAKTKAAVSMEGFSWGNYINSNSFIAAPVTCFKHAPMGTCWGDISENVRVEVPNTDCSLPTKVFWIAGIVKLAGYNALLRYEGFENDSGLDFWCNICGSDIHPVGWCAASGKPLVPPRTIQHKYTNWKAFLVKRLTGAKTLPPDFSQKVSESMQYPFKPCMRVEVVDKRHLCRTRVAVVESVIGGRLRLVYEESEDRTDDFWCHMHSPLIHHIGWSRSIGHRFKRSDITKKQDGHFDTPPHLFAKVKEVDQSGEWFKEGMKLEAIDPLNLSTICVATIRKVTQNFLLNGLTTSGKLAPLQHQ

SEQ ID NO: 317758 - DNA, 1885 bp, Artificial Sequence
  derived and/or modified sequence
atcctggggccacccgagttaaaggggggaaatccgggggctgctgcacccgccaccggtctgggcccagccgggggccccctgtagtcgccgcagtcccggggagaggcacctgcccccagcccggggagggggcgccgcgggctcggggagcacggacaacccctacccatgaggccctgatggaaaacacaaaggatctgagtcggaagagacattagaggtcatccaaagcagccgtcccctctgcagcctctctgacaagtgactgaacattcttcacgatctgaaaggaaaagaagagattctttcgggatgtttgacggttatgatagctgcagtgaggacacaagcagcagctccagctccgaagagagtgaggaagaagtcgctcctttaccttctaatctcccgattatcaaaaacaatgggcaagtctacacatacccagatggtaaatctggcatggctacctgtgagatgtgtgggatggttggcgtccgagatgctttttactctaaaacaaagcgtttctgtagcgtttcatgttcaagaagttactcgtcaaactccaagaaggcaagcattttggccagacttcagggtaagcctccaacaaagaaagcaaaagttcttcagaaacaacctttagttgctaagctagccgcatatgctcagtatcaagctaccttgcaaaatcaagcaaagacaaaagcagcagtctccatggaaggtttcagctggggtaactacatcaatagcaatagctttatagcagctccggttacctgttttaaacatgcacctatggggacctgctggggtgatatctcagaaaatgtgagagtagaagttcccaatacagactgcagcctacctaccaaagtcttctggattgctggaattgtaaaattagcaggttacaatgcccttttaagatatgaaggatttgaaaatgactctggtctggacttctggtgcaatatatgtggttctgatatccatccagttggttggtgtgcagccagcggaaaacctcttgttcctcctagaactattcagcataaatatacaaactggaaagcttttctagtgaaacgacttactggtgccaaaacactgcctcctgatttctcccaaaaggtttcagagagtatgcagtatcctttcaaaccttgcatgagagtagaagtggttgacaagaggcatttgtgtcgaacacgagtagcagtggtggaaagtgtaattggaggaagattaagactagtgtatgaagaaagcgaagatagaacagatgacttctggtgccatatgcacagcccattaatacatcatattggttggtctcgaagcataggtcatcgattcaaaagatctgatattacaaagaaacaggatggacattttgatacaccaccacatttatttgctaaggtaaaagaagtagaccagagtggggaatggttcaaggaaggaatgaaattggaagctatagacccattaaatctttctacaatatgtgtcgcaaccattagaaaggttacacaaaacttccttttaaatggtttgactacctcagggaaactggctccattgcagcaccagtaaaactatttaataaggatgttccaaatcacggatttcgtgtaggaatgaaattagaagcagtagatctcatggagccacgtttaatatgtgtagccacagtaactcgaattattcatcgtctcttgaggatacattttgatggatgggaagaagagtatgatcagtgggtagactgtgagtcacctgacctctatcctgtagggtggtgtcagttaactggatatcaactacagcctccagcatcacagtcatcaagagaaaaccaatcagcttcatc

SEQ ID NO: 317759 - DNA, 1293 bp, Artificial Sequence
  derived and/or modified sequence
atgtttgatggctatgactcttgttcggaagatacatctagttcttcttcctctgaagagtctgaagaagaagttgccccattgcctagtaacttgccaataattaaaaataatggtcaggtctatacgtatcccgacggaaagagtggcatggctacatgcgagatgtgcggtatggtgggcgtacgcgacgctttctactcaaagaccaagcgtttctgcagcgtcagctgttccagatcttatagttccaacagcaagaaggccagtatcttggcacggttgcagggtaagccccctacaaagaaggccaaggtgcttcaaaagcagcctctagtagccaagctcgccgcatacgcccagtatcaagcaacccttcagaatcaagccaagaccaaagctgctgtcagcatggagggctttagctgggggaattacatcaattccaatagcttcattgcggcacctgtgacttgttttaagcatgcaccaatgggcacctgttggggagatatctctgagaacgtgcgagtggaggtacccaatactgattgtagtctcccaacaaaggtcttctggatagcgggtatagtcaaactggctggatataatgcattgttgcgctacgaggggttcgaaaatgacagcggtctcgatttctggtgcaatatctgcggctctgatattcatcccgtgggttggtgcgccgcaagtgggaagcccctggtgccccctaggaccattcaacacaaatacactaattggaaagcgttcctggtcaaaagactgaccggcgccaaaaccctaccccctgatttcagccagaaagtgtcagaaagcatgcagtatccctttaagccttgcatgcgggttgaagttgtggacaaaaggcacctgtgccggacacgtgtagctgtagtggagagtgtgatcggcggccgcctgaggctcgtctacgaggaatcggaagatcggaccgacgatttttggtgtcacatgcatagccccttgattcaccacatcggctggagtaggtcaattggccatcggttcaaaagaagcgatattacaaaaaaacaagacgggcactttgacacaccaccacatctgtttgccaaagtcaaggaggtggaccagtccggcgagtggttcaaggagggcatgaagctagaggccatcgatcctcttaacctgtcaactatatgtgtcgcaactatccgaaaggtcacccagaacttcttgctgaacgggctgactactagtggtaaattggcacctctgcagcaccagtag

SEQ ID NO: 317760 - DNA, 1293 bp, Artificial Sequence
  derived and/or modified sequence
atgtttgatggctatgacagctgcagcgaggacaccagcagcagcagcagcagcgaggagagcgaggaggaggtggcccccctgcccagcaacctgcccatcatcaagaacaacggccaggtgtacacctacccagatggcaagagcggcatggccacctgtgagatgtgtggcatggtgggcgtgagagatgccttctacagcaagaccaagcgcttctgcagcgtgtcctgcagccgcagctacagcagcaacagcaagaaggccagcatcctggcccggctgcagggcaagccacccaccaagaaggccaaggtgctgcagaagcagcccctggtggccaagctggccgcctatgcccagtaccaggccaccctgcagaaccaggccaagaccaaggctgctgtgtccatggagggcttctcctggggcaactacatcaacagcaacagcttcatcgccgcccctgtgacctgcttcaagcacgcccccatgggcacctgctggggagacatcagtgaaaatgtgcgggtggaggtgcccaacacagactgcagcctgcccaccaaggtgttctggattgctggcatcgtgaagctggccggctacaatgccctgctgcgctatgagggctttgaaaatgacagcggcctggacttctggtgcaacatctgtggcagtgacatccaccctgtgggctggtgtgccgccagcggcaagcccctggtgccccccaggaccatccagcacaagtacaccaactggaaggccttcctggtgaagaggctgaccggggccaagaccctgcccccagacttcagccagaaggtgtctgagagcatgcagtaccccttcaagccctgcatgagggtggaggtggtggacaagaggcacctgtgcaggaccagggtggccgtggtggagagcgtgattggaggccgcctgcggctggtgtatgaggagagcgaggacagaacagatgacttctggtgccacatgcacagccccctcatccaccacatcggctggagccgcagcatcggccaccgcttcaagagaagtgacatcaccaagaagcaggacggccactttgacaccccaccccacctgtttgccaaggtgaaggaggtggaccagagcggggagtggttcaaggagggcatgaagctggaggccatcgaccccctgaacctgagcaccatctgtgtggccaccatcaggaaggtgacccagaacttcctgctgaatggcctgaccaccagcggcaagctggcccccctgcagcaccagtag

SEQ ID NO: 317761 - DNA, 1293 bp, Artificial Sequence
  derived and/or modified sequence
atgttcgacggctacgacagctgcagcgaggacaccagcagcagctcatccagtgaagaatctgaggaggaagtggcaccccttccttcaaatctgccaataatcaagaacaatggccaggtttacacctaccccgacggaaagtcggggatggcaacttgtgagatgtgtggcatggtgggggtacgggacgccttttactccaaaactaagcgcttttgtagtgtgtcatgttcccgatcttattcctctaactccaaaaaggcttcaatactggcgcgtctccagggcaaacctcccacgaagaaagcaaaagtgctgcagaaacagcctctcgtcgctaaactggcagcctatgcacagtaccaagcaactctgcagaaccaagcgaaaacaaaggcggcagtaagcatggagggattcagctggggcaattatatcaattccaattcatttatcgctgcgccagttacctgctttaaacacgccccaatggggacatgttggggagatatatctgagaatgtgcgggtggaagtgccgaataccgattgttccctccctacaaaggtcttttggattgcgggaatcgttaagctcgctggctacaacgctctcctccgctacgaggggttcgagaatgatagcggacttgacttttggtgtaatatatgcggcagcgacatccacccagtgggctggtgcgcggcctctggaaagccattggtgccaccccgcaccattcaacacaagtacacgaactggaaagcttttctagtgaaaaggttgacaggcgcgaagaccctgccccccgacttttctcaaaaggtgagtgaatcaatgcagtacccctttaaaccttgtatgagagtggaggtggtggataaacgccacctttgtagaaccagggtcgccgtggtggagtcagttatcggggggcggcttcggctggtctacgaagaatcggaagaccgaaccgacgacttctggtgccacatgcactctcccttaatccaccacattggttggagccgatctattggacacagatttaaacggtcagatattactaaaaagcaggatgggcactttgacacgccaccacatctgttcgcaaaggtgaaagaggtagaccagagcggggagtggtttaaggaggggatgaagctggaggccatcgacccattgaatctgtccaccatttgtgtcgccaccattagaaaagtgactcagaattttctcctcaacggtctcaccactagcggcaaactcgccccactacagcaccaatag

SEQ ID NO: 317762 - DNA, 1293 bp, Artificial Sequence
  derived and/or modified sequence
atgttcgatggttatgatagctgtagcgaagatacctccagctcctccagtagtgaggaaagtgaggaggaagtggcgcctcttccctcaaatctgcctataataaaaaacaacggacaggtgtatacttatccggacgggaagtctggaatggcgacatgcgagatgtgtggtatggttggcgtgagagatgctttctactctaaaactaaaaggttctgtagcgtttcatgttcccgcagttacagcagcaatagcaaaaaagcatctattctcgcccgtctccagggaaagcctcccacaaagaaggcaaaagtcttacagaagcagcccctggtggcaaaacttgctgcctacgctcagtaccaggcgaccctccagaatcaggccaagaccaaggccgcagttagtatggaaggatttagttggggaaattacatcaattccaacagctttattgcagcacctgtcacctgcttcaaacatgcacccatgggcacgtgttggggggatatttctgaaaacgtgcgggtggaagtgcccaataccgactgctccttgcccaccaaagtcttttggatcgccggaatcgtgaaactagcgggttataatgccctgctgcggtatgagggctttgaaaatgattccggattggacttttggtgtaacatttgcggcagcgatatacacccagtgggctggtgtgccgcttccggcaaaccccttgtccccccaaggacaattcagcacaagtatactaactggaaggcctttctcgtcaaacgactgaccggggcaaaaacgctaccaccagacttcagccagaaggtgtcagaatccatgcagtaccccttcaaaccctgtatgagggtcgaagtggtggataaacgtcatctgtgtcgaactcgagttgctgtggttgaatcagttatcggcggtaggctgcggctcgtttatgaagagtccgaggaccggactgatgatttctggtgccacatgcacagccccttaatacatcacatcggatggtctagatcaattggtcacagattcaagagaagtgatattacaaaaaaacaggacggacatttcgacactccgcctcacctctttgcaaaggtgaaagaagtggaccagtcaggagaatggttcaaggaaggaatgaaattagaggccatcgacccgctgaacctgagtacgatttgtgtcgccacaatcagaaaagtgacccagaactttctgctgaacggtctgaccactagcggcaagctcgcacccttgcagcatcagtag

SEQ ID NO: 317763 - DNA, 1293 bp, Artificial Sequence
  derived and/or modified sequence
atgttcgacggctacgacagctgcagcgaggacaccagcagcagcagcagcagcgaggagagcgaggaggaggtggcccccctgcccagcaacctgcccatcatcaagaacaacggccaggtgtacacctaccccgacggcaagagcggcatggccacctgcgagatgtgcggcatggtgggcgtgagagacgccttctacagcaagaccaagagattctgcagcgtgagctgcagcagaagctacagcagcaacagcaagaaggccagcatcctggccagactgcagggcaagccccccaccaagaaggccaaggtgctgcagaagcagcccctggtggccaagctggccgcctacgcccagtaccaggccaccctgcagaaccaggccaagaccaaggccgccgtgagcatggagggcttcagctggggcaactacatcaacagcaacagcttcatcgccgcccccgtgacctgcttcaagcacgcccccatgggcacctgctggggcgacatcagcgagaacgtgagagtggaggtgcccaacaccgactgcagcctgcccaccaaggtgttctggatcgccggcatcgtgaagctggccggctacaacgccctgctgagatacgagggcttcgagaacgacagcggcctggacttctggtgcaacatctgcggcagcgacatccaccccgtgggctggtgcgccgccagcggcaagcccctggtgccccccagaaccatccagcacaagtacaccaactggaaggccttcctggtgaagagactgaccggcgccaagaccctgccccccgacttcagccagaaggtgagcgagagcatgcagtaccccttcaagccctgcatgagagtggaggtggtggacaagagacacctgtgcagaaccagagtggccgtggtggagagcgtgatcggcggcagactgagactggtgtacgaggagagcgaggacagaaccgacgacttctggtgccacatgcacagccccctgatccaccacatcggctggagcagaagcatcggccacagattcaagagaagcgacatcaccaagaagcaggacggccacttcgacacccccccccacctgttcgccaaggtgaaggaggtggaccagagcggcgagtggttcaaggagggcatgaagctggaggccatcgaccccctgaacctgagcaccatctgcgtggccaccatcagaaaggtgacccagaacttcctgctgaacggcctgaccaccagcggcaagctggcccccctgcagcaccagtag

SEQ ID NO: 317764 - protein, 99 aa, Artificial Sequence
  derived and/or modified sequence
ALDVAVKTFPPERHVAVKCFGKKKEKKNNANSPASVSNPTVTKHAFGMEEELQREGSIETLSNSSGSTSGSIPRNFDGYRSPLPTNESQPLSLFPTGFP

SEQ ID NO: 317765 - protein, 283 aa, Artificial Sequence
  derived and/or modified sequence
PPCSLISDCCAGNQRDSVGVGPSEPGCYPCPGPNMNPIALGSRWLAYAENKLIRCHQSRGGACGDNIQSYTATVISAAKTLKSGLTMVGKVVTQLTGTLPSGVTEDDVAIHSNSRRSPLVPGIITVIDTETVGEGQVLVSEDSDSDGIVAHFPAHEKPVCCMAFNTSGMLLVTTDTLGHDFHVFQILTHPWSSSQCAVHHLYTLHRGETEAKVQDICFSHDCRWVVVSTLRGTSHVFPINPYGGQPCVRTHMSPRVVNRMSRFQKSAGLEEIEQELTSKQGGR

SEQ ID NO: 317766 - DNA, 852 bp, Artificial Sequence
  derived and/or modified sequence
cccccctgcagcctgatcagcgactgctgcgccggcaaccagagagacagcgtgggcgtgggccccagcgagcccggctgctacccctgccccggccccaacatgaaccccatcgccctgggcagcagatggctggcctacgccgagaacaagctgatcagatgccaccagagcagaggcggcgcctgcggcgacaacatccagagctacaccgccaccgtgatcagcgccgccaagaccctgaagagcggcctgaccatggtgggcaaggtggtgacccagctgaccggcaccctgcccagcggcgtgaccgaggacgacgtggccatccacagcaacagcagaagaagccccctggtgcccggcatcatcaccgtgatcgacaccgagaccgtgggcgagggccaggtgctggtgagcgaggacagcgacagcgacggcatcgtggcccacttccccgcccacgagaagcccgtgtgctgcatggccttcaacaccagcggcatgctgctggtgaccaccgacaccctgggccacgacttccacgtgttccagatcctgacccacccctggagcagcagccagtgcgccgtgcaccacctgtacaccctgcacagaggcgagaccgaggccaaggtgcaggacatctgcttcagccacgactgcagatgggtggtggtgagcaccctgagaggcaccagccacgtgttccccatcaacccctacggcggccagccctgcgtgagaacccacatgagccccagagtggtgaacagaatgagcagattccagaagagcgccggcctggaggagatcgagcaggagctgaccagcaagcagggcggcagatag

SEQ ID NO: 317767 - DNA, 852 bp, Artificial Sequence
  derived and/or modified sequence
cccccatgcagcctcatttcagattgttgcgccggcaatcagagggatagcgtcggcgtgggcccctccgaacccggctgttacccgtgtcctggaccaaatatgaacccgatagccctgggctcccgctggctcgcgtatgccgagaataagttaatccggtgtcatcagtcacgagggggagcctgcggcgataatatacagtcatataccgccactgtaattagtgcagctaaaaccctgaagagtggattgactatggtaggcaaggtggtcacacaattaacaggaacccttcctagcggggtaaccgaagacgacgtggccatccattctaactctagacggtctcctctggtgcctgggataatcacagtcatagacaccgagactgtgggagagggccaggtccttgttagtgaggacagcgatagcgatgggatagtagctcattttcccgcacacgaaaaaccggtctgctgcatggcgtttaacactagtggaatgcttctcgtaacaacagatacactcggacacgattttcacgtgttccagatcctgacccatccttggagttcatcgcagtgcgctgttcaccatctctataccctccaccggggcgagactgaagccaaagtgcaagatatctgcttttcacatgattgcagatgggttgtcgtgtctaccctgcgtgggacttcacatgtcttccccatcaacccctacggagggcagccctgtgttcgcacacatatgtcacccagggttgtgaatcggatgtcaagattccagaaaagcgccggcctggaggaaatagagcaggaactgacctctaaacagggtgggcgttag

SEQ ID NO: 317768 - DNA, 852 bp, Artificial Sequence
  derived and/or modified sequence
cctccctgcagcctcatcagtgactgctgtgccggcaaccagagggacagcgtgggcgtgggccccagcgagcccggctgctacccctgccccggccccaacatgaaccccatcgccctgggcagccgctggctggcctatgcagagaacaagctgatccgctgccaccagagccggggcggggcctgtggggacaacatccagagctacacagccaccgtcatctctgctgccaagaccctgaagagcggcctgaccatggtgggcaaggtggtgacccagctgaccggcaccctgcccagcggcgtgacagaagatgatgtggccatccacagcaacagcagaagaagccccctggtgcccggcatcatcaccgtgattgacacagaaacagtgggggagggccaggtgctggtgtctgaagattctgacagtgatggcatcgtggcccacttccctgcccacgagaagcctgtgtgctgcatggccttcaacaccagcggcatgctgctggtgaccacagacaccctgggccatgacttccacgtgttccagatcctgacccacccctggagcagcagccagtgtgctgtgcaccacctgtacaccctgcacagaggagaaacagaggccaaggtgcaggacatctgcttcagccatgactgccgctgggtggtggtgtccaccctgcggggcaccagccacgtgttccccatcaacccctacggcggccagccctgtgtgaggacccacatgagcccccgggtggtgaacaggatgagccgcttccagaagtctgctggcctggaggagattgagcaggagctgaccagcaagcagggcggccgctag

SEQ ID NO: 317769 - DNA, 852 bp, Artificial Sequence
  derived and/or modified sequence
cccccctgcagcctgatcagcgactgctgcgccggcaaccagcgggactcagtgggcgtcggccctagcgagccaggatgctacccttgtcccggccccaacatgaaccctattgccctgggatcccgatggctggcctacgctgagaataagctcatcagatgccaccagtccagaggcggggcctgtggagataatatccaatcttataccgcgactgtgatctcagccgcgaagaccctgaaatccggactcactatggtcggtaaagttgtgacccaacttactggcacgctcccatcgggagttactgaagatgatgtggctatccactccaactccagaaggagtcctctcgtgccaggaattataaccgtgatagataccgaaaccgtgggagaaggtcaagtcctcgtaagcgaagattccgatagtgacggtatagtggctcactttcctgcccatgaaaagcctgtgtgctgtatggccttcaacacttccggaatgttactcgtgacaaccgatactctgggccacgacttccacgtcttccagatacttacacatccgtggagcagttctcaatgcgctgtgcatcatttgtacactcttcataggggtgaaacagaagctaaagtgcaggacatctgtttcagccatgattgccgctgggtggttgtctccaccctgcggggcacgtcccatgttttcccaattaacccatatgggggacagccttgcgttcgcacgcacatgagtcctcgcgtggtgaacaggatgtccaggtttcaaaagtctgccggtctagaggagattgagcaggaattaacaagtaaacagggagggaggtag

SEQ ID NO: 317770 - DNA, 852 bp, Artificial Sequence
  derived and/or modified sequence
cccccatgcagtctgatcagcgactgttgcgccggtaaccagcgcgactccgttggcgtggggccaagtgagccgggttgctacccttgccccggtccaaacatgaatccaattgcactcggcagtcgctggctggcctacgccgagaataaactaatccgctgccaccagtctcggggaggagcctgtggcgacaatattcagtcctataccgctactgtgataagtgccgctaagaccctgaaatcagggcttactatggtaggtaaggtcgtcacacagttgactgggacactgccttcgggggtaacggaggacgatgtagccatccacagcaatagtcggcgaagccccctcgttcctggaataataaccgtcattgacacagagacggtaggagagggtcaggtgctagtgtccgaggatagcgatagtgacgggatcgtggctcacttccccgctcacgagaagcctgtgtgttgtatggcctttaacacatccggaatgctcttggtgactacagacaccctgggacacgatttccatgtcttccaaatcctgacacacccctggtcctcatcgcagtgcgcggtgcaccatttgtatacattacaccggggagaaacagaggccaaggtccaggacatatgcttttcacacgactgccggtgggtggtcgtgtcaacgctgcggggaacaagtcacgttttccccataaatccctatggcggtcagccatgtgtccggacccacatgagcccgagggtcgtgaaccggatgagccgatttcagaagtccgcaggcctcgaggaaatagaacaggaattgacctctaagcagggaggtcggtag

SEQ ID NO: 317771 - protein, 458 aa, Artificial Sequence
  derived and/or modified sequence
MNEAMATDSPRRPSRCTGGVVVRPQAVTEQSYMESVVTFLQDVVPQVYCCGDNIQSYTATVISAAKTLKSGLTMVGKVVTQLTGTLPSGVTEDDVAIHSNSRRSPLVPGIITVIDTETVGEGQVLVSEDSDSDGIVAHFPAHEKPVCCMAFNTSGMLLVTTDTLGHDFHVFQILTHPWSSSQCAVHHLYTLHRGETEAKVQDICFSHDCRWVVVSTLRGTSHVFPINPYGGQPCVRTHMSPRVVNRMSRFQKSAGLEEIEQELTSKQGGRCSPVPGLSSSPSGSPLHGKLNSQDSYNNFTNNNPGNPRLSPLPSLMVVMPLAQIKQPMTLGTITKRTGKVKPPPQISPSKSMGGEFCVAAIFGTSRSWFANNAGLKREKDQSKQVVVESLYIISCYGTLVEHMMEPQPLNGMNCSHRLMQTTLCSSLQMQYSIISSCLLAWFPLEVLGPLLDMGLTTV

SEQ ID NO: 317772 - DNA, 1377 bp, Artificial Sequence
  derived and/or modified sequence
atgaacgaggccatggccaccgacagccccagaagacccagcagatgcaccggcggcgtggtggtgagaccccaggccgtgaccgagcagagctacatggagagcgtggtgaccttcctgcaggacgtggtgccccaggtgtactgctgcggcgacaacatccagagctacaccgccaccgtgatcagcgccgccaagaccctgaagagcggcctgaccatggtgggcaaggtggtgacccagctgaccggcaccctgcccagcggcgtgaccgaggacgacgtggccatccacagcaacagcagaagaagccccctggtgcccggcatcatcaccgtgatcgacaccgagaccgtgggcgagggccaggtgctggtgagcgaggacagcgacagcgacggcatcgtggcccacttccccgcccacgagaagcccgtgtgctgcatggccttcaacaccagcggcatgctgctggtgaccaccgacaccctgggccacgacttccacgtgttccagatcctgacccacccctggagcagcagccagtgcgccgtgcaccacctgtacaccctgcacagaggcgagaccgaggccaaggtgcaggacatctgcttcagccacgactgcagatgggtggtggtgagcaccctgagaggcaccagccacgtgttccccatcaacccctacggcggccagccctgcgtgagaacccacatgagccccagagtggtgaacagaatgagcagattccagaagagcgccggcctggaggagatcgagcaggagctgaccagcaagcagggcggcagatgcagccccgtgcccggcctgagcagcagccccagcggcagccccctgcacggcaagctgaacagccaggacagctacaacaacttcaccaacaacaaccccggcaaccccagactgagccccctgcccagcctgatggtggtgatgcccctggcccagatcaagcagcccatgaccctgggcaccatcaccaagagaaccggcaaggtgaagccccccccccagatcagccccagcaagagcatgggcggcgagttctgcgtggccgccatcttcggcaccagcagaagctggttcgccaacaacgccggcctgaagagagagaaggaccagagcaagcaggtggtggtggagagcctgtacatcatcagctgctacggcaccctggtggagcacatgatggagccccagcccctgaacggcatgaactgcagccacagactgatgcagaccaccctgtgcagcagcctgcagatgcagtacagcatcatcagcagctgcctgctggcctggttccccctggaggtgctgggccccctgctggacatgggcctgaccaccgtgtag

SEQ ID NO: 317773 - DNA, 1377 bp, Artificial Sequence
  derived and/or modified sequence
atgaatgaagctatggctacagattccccaagaagacccagtcgttgtactggtggagttgtggttcgcccccaggctgtcacagagcagtcctacatggaaagtgttgtgacttttctgcaggatgttgtgccacaggtatattgttgtggagacaacattcagtcttatactgccacagtcattagtgctgctaaaacattgaaaagtggcctgacaatggtagggaaagtggtgactcagctgacaggcacactgccttcaggtgtgacagaagatgatgttgccatccacagtaattcacggcggagtcctttggtcccaggcatcatcacagttattgacaccgaaaccgttggagagggccaggtgcttgtgagtgaggattctgacagtgatggcattgtggcccacttccctgcccatgagaagccagtgtgctgcatggcttttaatacaagtggaatgcttctagtcacaacagacacccttggccatgactttcatgtcttccaaattctgactcatccttggtcctcatcacaatgtgctgtccaccatctgtatactcttcacaggggagaaactgaagccaaagtacaggacatctgcttcagccatgactgtcgctgggttgtggtcagtactctccggggtacttcccacgttttccccatcaacccttatggtggccagccttgtgttcgtacacatatgtcaccacgagtagtgaatcgcatgagccgtttccagaaaagtgctggactggaagagattgaacaagaactgacgtctaagcaaggaggtcgctgtagccctgttccaggtctatcaagcagcccttctgggtcacccttgcatgggaaactgaacagccaagactcctataacaattttaccaacaacaaccctggcaaccctcggctctctcctcttcccagcttgatggtagtgatgcctcttgcacaaatcaagcagccaatgacattggggaccatcaccaaacgaaccggcaaagttaaacctcctccacaaatttcacccagcaaatcgatgggcggagaattttgtgtggctgctatcttcggaacatccaggtcatggtttgcaaataatgcaggtctgaaaagagaaaaagatcagtccaaacaagttgtagttgagtccctgtacattatcagttgctatggcaccttagtggaacacatgatggagccgcaacccctcaatggaatgaattgcagccaccgtttaatgcaaaccaccctctgctcctcgctgcagatgcagtacagtattatcagttcctgcttgctggcctggttccccctggaagtcctgggcccattactcgacatgggtcttacgacagtttag

SEQ ID NO: 317774 - DNA, 1377 bp, Artificial Sequence
  derived and/or modified sequence
atgaacgaggccatggcaacggactcgccccggcgacctagtcgctgtacaggaggagtagtagtcaggcctcaggctgtgacggaacagagctatatggaatccgtggtcacatttctgcaggacgtagtgccacaggtttattgctgtggggacaacattcagtcatacacagcaacagtgatcagcgccgccaagaccctcaagtctggcctcaccatggtagggaaggtcgtaacccagttgacaggcacactcccatccggagtgaccgaagacgacgtcgccatacatagcaattctcggaggagtccattagtgcccggtatcatcacagtcattgatactgaaacagtcggtgagggtcaggtattggtgtcagaagacagcgatagtgacggaatcgtagcgcactttcccgctcacgaaaagcccgtttgttgcatggcctttaacacttctggcatgctcctggttacgaccgacacgctggggcatgacttccatgtgttccagatcctcacccacccttggtcaagctcccaatgcgccgtgcatcacctgtatacacttcacagaggagagactgaagccaaagtccaggatatctgtttttcacacgattgtaggtgggttgtggtgtcaactctacgtggaacatcacacgttttcccgatcaacccgtacgggggtcagccttgtgttagaacgcatatgagccctagggtagtgaaccgaatgagccggttccagaaatcagccggcctggaggaaattgagcaggagctcacatcaaaacagggagggcgttgtagtccagttcctggactgtctagtagcccctccggctcaccccttcacggcaagttgaatagccaggactcatataacaatttcaccaataataatcccggcaacccaaggctgagtccactacccagtttgatggtggtcatgcccttggcccaaatcaaacagccaatgacgctgggtaccatcaccaagcgcacaggcaaagtcaagccccccccgcagataagccctagcaagagtatggggggggagttctgcgtggctgctatttttgggacatcacgatcctggttcgctaataatgcggggctcaagagggagaaggatcaatccaagcaggttgttgttgagagcctctacataatcagctgctacgggacgctagtagaacatatgatggagcctcagcctctgaacggtatgaactgcagtcatcgcttgatgcagaccaccctgtgcagctctctccagatgcagtactctatcatcagctcctgcttgctggcttggttcccacttgaggtattgggtcctctgcttgacatgggcttgacaactgtctag

SEQ ID NO: 317775 - DNA, 1377 bp, Artificial Sequence
  derived and/or modified sequence
atgaatgaggccatggccacagacagcccccggcggcccagccgctgcacaggaggagtggtggtgcggccccaggccgtgacagagcagagctacatggagagcgtggtgaccttcctgcaggatgtggtgccccaggtgtactgctgcggggacaacatccagagctacacagccaccgtcatctctgctgccaagaccctgaagagcggcctgaccatggtgggcaaggtggtgacccagctgaccggcaccctgcccagcggcgtgacagaagatgatgtggccatccacagcaacagccgccgcagccccctggtgcccggcatcatcaccgtcatcgacacagagaccgtgggggagggccaggtgctggtgtctgaggacagcgacagtgatggcatcgtggcccacttccctgcccacgagaagcctgtgtgctgcatggccttcaacaccagcggcatgctgctggtgaccacagacaccctgggccatgacttccacgtgttccagatcctgacccacccctggagcagcagccagtgtgctgtgcaccacctgtacaccctgcacagaggagaaacagaggccaaggtgcaggacatctgcttcagccatgactgccgctgggtggtggtgtccaccctgcggggcaccagccacgtgttccccatcaacccctatggaggccagccctgtgtgaggacccacatgagcccccgggtggtgaacaggatgagccgcttccagaagtctgctggcctggaggagattgagcaggagctgaccagcaagcagggcggccgctgcagccctgtgcccggcctgagcagcagccccagcggcagccccctgcacggcaagctgaacagccaggacagctacaacaacttcaccaacaacaaccctggcaacccccggctgagccccctgcccagcctgatggtggtgatgcccctggcccagatcaagcagcccatgaccctgggcaccatcaccaagaggacaggcaaggtgaagcccccaccccagatcagccccagcaagtccatgggcggggagttctgtgtggccgccatcttcggcaccagccgctcctggtttgccaacaatgccggcctgaagcgggagaaggaccagagcaagcaggtggtggtggagagcctgtacatcatcagctgctacggcaccctggtggagcacatgatggagccccagcccctgaatggcatgaactgcagccaccggctgatgcagaccaccctgtgcagcagcctgcagatgcagtacagcatcatcagcagctgcctgctggcctggttccccctggaggtgctgggccccctgctggacatgggcctgaccaccgtgtag

SEQ ID NO: 317776 - DNA, 1377 bp, Artificial Sequence
  derived and/or modified sequence
atgaacgaggccatggccaccgacagcccccggcggcccagccggtgcaccgggggcgtggtcgtacgcccacaggccgtgaccgagcaaagctatatggaatctgttgtcaccttcctgcaggatgttgttcctcaggtttattgttgtggcgacaatatccagtcatacaccgccacagtcatttcagcagccaaaacactgaagagcgggttaaccatggtcgggaaagttgtcacacagctaaccggaactctgcctagcggtgttacagaggatgatgtcgccatccactcaaactctcgtcgctctcctctggtgcctggtatcattacagtcattgacacagaaactgtgggtgaagggcaagtgctggtgtctgaggactcagacagcgatggtatcgtcgctcattttcctgctcacgaaaagccagtgtgttgcatggcctttaatactagcggtatgctgctggtgacgacggacactctcgggcacgacttccacgtgttccagattctaacccatccttggagctctagccagtgcgctgtccatcacctgtacacgctgcaccggggggaaaccgaggctaaggttcaggacatctgtttctcgcacgactgtcgctgggtggtggtgagcaccctgcggggtacctcacacgtgttcccgattaacccgtatggcggccaaccctgtgtcaggacacatatgagtccaagggttgtgaatagaatgagcaggtttcagaaaagcgccgggttagaagagatagagcaggagctcactagcaagcagggaggacggtgctcacccgtcccgggcctatcgtcctcaccttcaggctctccccttcatggcaaattgaactcacaggactcatacaacaacttcaccaataacaatccaggaaatccacgcctctcgccccttccatccctcatggtggtaatgccactagcccagattaagcagcctatgaccttaggcaccattactaagaggacgggtaaagtgaagccacctccccagatttcgcctagcaagagtatgggaggggagttttgtgttgccgcaatctttggtacaagccgtagctggtttgcaaataacgccggcctgaagcgagaaaaggatcagtctaagcaggtcgtagtagagtccctgtatatcatctcctgttacggaactcttgtcgaacatatgatggaaccacagccactgaacgggatgaactgtagtcatcgcctgatgcagactaccctctgctcctccctgcagatgcagtactctatcattagttcttgtctactggcatggtttcctctagaagttctgggccctctgctggatatggggctgacgacggtctag

SEQ ID NO: 317777 - DNA, 1377 bp, Artificial Sequence
  derived and/or modified sequence
atgaacgaggctatggctacggatagtcctcggaggccttctagatgcaccgggggtgttgtggtcagaccgcaggccgttaccgaacaatcatatatggaatcagtagtgacctttctccaggacgttgtgccgcaagtgtactgttgcggtgacaatatccaatcctacaccgccaccgtcatatccgcggctaagaccctgaaaagtggcctgaccatggtgggaaaagtggtgactcagctcaccgggaccctccctagcggtgtgaccgaagatgacgttgctatccattcaaactcccgcaggagccctttagttcctggaatcatcactgtcatcgatacagaaactgtaggcgagggtcaagttcttgtctctgaagattctgactccgatggcatcgttgcacatttccctgcacatgaaaaacccgtgtgttgcatggcgtttaacacaagcggcatgcttcttgtcactaccgacactctaggtcatgacttccatgtctttcagatcctgactcatccctggagttccagccaatgtgcagttcatcacctttataccttacaccgcggagagaccgaagcaaaagtgcaggacatctgcttttctcatgactgcagatgggtcgtggtgtcgacccttagaggaacatcccatgtctttcccataaatccctatggcggacagccttgcgtgcgcacccacatgtctccgagagtagtcaaccgcatgagtcgatttcagaaatctgctggactagaggaaattgaacaagagctgacctctaagcagggcggaagatgttctcctgtcccaggccttagctcaagcccttccggctcacccttgcacggcaagctaaactcacaggacagttataacaacttcaccaataacaaccccggtaatccgaggctgtcaccactccctagcctgatggttgtaatgcctttggcacagattaagcagcccatgaccctgggaaccattaccaaacgcaccggcaaggtaaagcccccaccacagattagtccgtctaaatctatgggaggagagttctgtgtcgccgctatattcggcaccagtagaagttggttcgctaataatgcaggactgaaacgcgagaaagaccaaagcaaacaggtcgtggtggagtctctttatataattagttgctacggtaccctagttgaacacatgatggagccccagccactaaatgggatgaactgctcgcatagacttatgcaaactacactctgcagtagcctgcaaatgcagtactcaatcattagcagttgtttactggcttggtttcccttggaggttctaggacccctcctagacatgggcctcactactgtgtag

SEQ ID NO: 317778 - protein, 457 aa, Artificial Sequence
  derived and/or modified sequence
  misc_feature (1)..(1): Xaa can be any naturally occurring amino acid
XMAETVWSTDTGEAVYRSRDPVRNLRLRVHLQRITSSNFLHYQPAAELGKDLIDLATFRPQPTASGHRPEEDEEEEIVIGWQEKLFSQFEVDLYQNETACQSPLDYQYRQEILKLENSGGKKNRRIFTYTDSDRYTNLEEHCQRMTTAASEVPSFLVERMANVRRRRQDRRGMEGGILKSRIVTWEPSEEFVRNNHVINTPLQTMHIMADLGPYKKLGYKKYEHVLCTLKVDSNGVITVKPDFTGLKGPYRIETEGEKQELWKYTIDNVSPHAQPEEEERERRVFKDLYGRHKEYLSSLVGTDFEMTVPGALRLFVNGEVVSAQGYEYDNLYVHFFVELPTAHWSSPAFQQLSGVTQTCTTKSLAMDKVAHFSYPFTFEAFFLHEDESSDALPEWPVLYCEVLSLDFWQRYRVEGYGAVVLPATPGPSWNRAPFRKGCGVCWTVWKGSASRVPFTMC

SEQ ID NO: 317779 - DNA, 1374 bp, Artificial Sequence
  derived and/or modified sequence
tgaatggcggaaaccgtctggagcacagacactggcgaagccgtgtatcggtctcgcgaccccgtgaggaacttgaggctcagggtgcatctgcagcgtattacatcctccaacttcttacattaccagccagcagccgagctcggcaaggatttaatcgacctcgcgacatttagaccacagcccactgcctcggggcaccgaccagaggaggacgaagaggaggagattgttatcggatggcaggagaaattgttcagtcaatttgaagtggacctgtatcagaatgaaacagcctgtcagtcaccactcgactatcagtatcgtcaggagatcctgaaacttgagaatagtgggggcaagaagaatcggaggatcttcacatacacggattctgatcggtataccaacctagaagaacattgccaacgaatgactaccgccgctagtgaggttccatcctttctggtagagaggatggctaacgtgaggcggcgtaggcaagacagacggggaatggagggtggcattctcaaatctaggatcgtgacttgggagccctcagaggaattcgtaaggaataaccatgtaatcaacacgccactccaaaccatgcatatcatggccgatttaggaccatataagaagctgggatacaagaagtatgaacacgtgctctgcacactgaaggtggactctaatggcgttataactgtgaagcctgactttaccgggcttaaggggccctatcgaatcgagacagaaggcgagaagcaggaactgtggaaatatacaattgataacgtgagcccgcatgcccagcccgaggaggaagaacgagagcgccgcgtgttcaaggacctgtatggacggcataaggaatatctgtctagcctggtcggtactgactttgaaatgaccgtcccaggagcacttcgcctctttgtgaatggcgaggtggtgtctgcccaagggtatgaatatgataatctgtatgtccacttcttcgtagaactccccaccgcccattggagttctcctgcctttcaacagctctccggggtaacccagacatgtactacaaaatccctggcaatggataaggtggcacacttttcttatcccttcaccttcgaagctttttttctgcatgaggacgagtctagcgacgctctgcctgaatggccagtgctctactgtgaggtgctttctttggacttctggcagcgctaccgagtggagggctatggtgctgtcgttcttccagcaacaccaggcccttcttggaaccgtgcaccatttagaaaaggctgcggagtgtgttggacagtgtggaagggatctgcgtcgcgtgtgccattcaccatgtgttag

SEQ ID NO: 317780 - DNA, 1374 bp, Artificial Sequence
  derived and/or modified sequence
tgaatggccgagaccgtgtggagcacagacacaggagaggccgtgtaccgcagccgggaccctgtgaggaacctgcggctgcgggtgcacctgcagaggatcaccagcagcaacttcctgcactaccagcctgctgctgagctgggcaaggacctgattgacctggccaccttccggccccagcccacagccagcggccacaggccagaagaagatgaggaggaggagatcgtgattggctggcaggagaagctgttcagccagtttgaggtggacctgtaccagaatgaaacagcctgccagagccccctggactaccagtaccggcaggagatcctgaagctggagaacagcggcggcaagaagaacagacgcatcttcacctacacagacagcgaccgctacaccaacctggaggagcactgccagaggatgaccacagctgccagcgaggtgcccagcttcctggtggagaggatggccaacgtgagaagaagacggcaggaccggcggggcatggagggcggcatcctgaagagccgcatcgtgacctgggagcccagcgaggagtttgtgaggaacaaccacgtgatcaacacccccctgcagaccatgcacatcatggctgacctgggcccctacaagaagctgggctacaagaagtatgagcacgtgctgtgcaccctgaaggtggacagcaatggagtcatcaccgtgaagccagacttcaccggcctgaagggcccctaccgcatcgagacagaaggagagaagcaggagctgtggaagtacaccatcgacaacgtgagcccccacgcccagcctgaggaggaggagcgggagcggcgggtcttcaaggacctgtatggccgccacaaggagtacctgagcagcctggtgggcacagactttgagatgacagtgcctggggccctgcggctgtttgtgaatggagaggtggtgtctgcccagggctatgaatatgacaacctgtatgtgcacttctttgtggagctgcccacagcccactggagcagccctgccttccagcagctgtctggagtgacccagacctgcaccaccaagagcctggccatggacaaggtggcccacttctcctaccccttcacctttgaggccttcttcctgcatgaagatgagagcagtgatgccctgcctgagtggcctgtgctgtactgtgaggtgctgagcctggacttctggcagcgctacagagtggagggctacggggctgtggtgctgcctgccaccccaggccccagctggaacagagcccccttcaggaagggctgcggcgtgtgctggacagtgtggaagggcagcgccagccgggtgcccttcaccatgtgctag

SEQ ID NO: 317781 - DNA, 2091 bp, Artificial Sequence
  derived and/or modified sequence
tcatggcggagaccgtctggagcactgacaccggggaggcagtgtatcgctcccgggaccccgtgcgcaacttgcgcctccgagtccacctgcaaagaatcacatcaagcaactttcttcattatcagcctgctgccgagctcgggaaggacctcatagacttggccacttttaggcctcagccaactgccagtggacaccgcccagaggaagacgaagaggaggagattgtgattgggtggcaggagaagctctttagccagtttgaagtagatctgtaccaaaatgaaacagcctgtcagagtcctttggattatcagtaccgtcaggagatcctgaagctggagaattcgggtggcaagaaaaaccgacgaatctttacctacactgactctgatagatacaccaatttggaggagcactgtcagagaatgaccactgcagccagcgaggtgccttcattcttggtcgagcgaatggcaaatgtcaggcgtcgccggcaggacaggcgagggatggagggcggcatcctcaagtcacgcatcgtcacctgggagccctcagaagagtttgtcaggaacaaccacgtcattaacacccctcttcagacaatgcacatcatggcagacctggggccctataaaaagcttggctataagaagtatgaacatgtcctgtgtactctgaaggtggatagcaatggtgtgatcacagtaaagcctgacttcacgggcctcaaaggaccctacaggattgagacggagggggagaagcaggagctgtggaaatatacgatcgacaatgtttccccccacgcacagccggaggaggaggagcgggaacggcgagtgttcaaggatctttatggccggcacaaggagtatctcagcagcctcgtaggcaccgactttgagatgactgtcccaggtgccctccggctctttgtaaatggagaggtcgtttcagcccaaggctatgagtatgacaatctctacgtccacttctttgtagaattgccaactgctcactggtcaagcccagcattccagcagctctcaggagtaacacagacctgcaccaccaagtccctggcaatggacaaggtggctcacttctcctacccattcacgtttgaagccttcttcctccatgaggatgaatcttctgatgcactcccggagtggcctgtgctctactgtgaggtcctctcgctggacttctggcagaggtaccgtgtggaaggctatggggctgtggtgctgcctgccactccagggccttcatggaatcgagctcccttcagaaaaggatgcggagtgtgttggaccgtctggaagggttcagccagcagagttccattcacaatgtgctagaggccttccgtcgagcccggcgccgcatgcaggaggcccgggaaagcctcccgcaggacctagtgagcccctctggaaccctggtctcctagctcacagcagccctggcccacagtgcaagaggacaagatgggggatatctgaggccagtgctctcctgcctcttcgtctttctgattagagaccacgttggtctgctgagaaccagaaaagctgggaaattcccggctggcccctctgcctagccttctgcagggtcttctccctaccctgtggaaataaagccagagaccctgtggccccccctttatatttgcagccactgtcaatgggcatcacagcaaggcaggctttttgatctgaagctgtttggggtgaccccatagtgagtctggccttgactcacttttctggcttgtctcacagtagcaggggatctgctgttctccaccctttaaaaatggagcctttcatcttccaagaccaaagaaggaaggaaggtggacggtgagagggtcttaaatccccagcctgtgagtctcagcctctttccagggaagcctcattctactgcttggggcttgctgaggttgagatatgagttatttctgagtaagtgaaggctgaaggcagtgctgagtcctttctgctagctgggtggtatcttttactgtgtttttttgtttgtttgtttttttgttttttgttacataaaccc

SEQ ID NO: 317782 - DNA, 1374 bp, Artificial Sequence
  derived and/or modified sequence
tgaatggccgagaccgtgtggagcaccgacaccggcgaggccgtgtataggtcaagagatccagtgaggaacctgcggctgcgtgtgcacttgcaaagaattacatcttctaacttcctccactaccagccggcggctgaacttggcaaggatctcatcgatctggcaacgttcaggcctcagccaaccgcttccggccacaggcccgaggaggatgaggaagaggaaatcgtaatcggatggcaggagaagcttttttcacagtttgaggtggacctgtaccagaacgaaacagcttgtcagtcgcccttggattatcagtaccgccaggaaatattgaagctggagaatagcggtggcaagaaaaataggcgcatcttcacatatactgacagcgaccggtacacaaacctggaggaacactgtcagagaatgacaacagccgcgtcagaggtgccaagcttccttgtagaacggatggccaatgttagacgccgcaggcaggaccgtagaggaatggaaggggggatcctgaaatcccgcatcgtgacttgggaaccatccgaggagtttgttcgcaacaaccacgtgattaacacaccgttacagacaatgcacatcatggccgaccttgggccatacaaaaagttgggatataaaaaatatgaacatgtcttgtgtaccctgaaggtcgattcaaacggtgtgatcacggtgaagcctgactttaccgggctcaagggcccttaccggattgagaccgaaggggagaaacaggaactttggaaatatactatcgataacgtgtccccacatgcacagccagaagaggaagaaagagaacgcagggtgtttaaggacctgtacggtagacataaggaatacctgtcctctcttgtgggaactgactttgagatgacggtgcctggggctctccggctgtttgttaacggcgaggtggtgtcggcgcagggctatgagtacgataatctctacgtgcatttctttgtagagttacctaccgcccactggagttcaccggcctttcagcagctgtctggagtgacacagacctgtacaaccaaatccttggccatggataaagtggctcacttttcgtatccatttacattcgaagccttcttcctgcatgaagatgaatcaagcgacgcgctaccggaatggccagtgctgtattgtgaggtattgagcctggatttctggcagaggtaccgcgtggagggctacggggcggtggtcctgcctgcgactcctggcccatcctggaaccgagcacctttcaggaaggggtgtggggtttgctggactgtgtggaaaggctccgcaagcagggtgcctttcacaatgtgctag

SEQ ID NO: 317783 - DNA, 1374 bp, Artificial Sequence
  derived and/or modified sequence
taaatggctgagacagtttggagtacagatactggagaggcagtgtacaggagtagggaccccgtgcggaacctgaggcttcgcgtacatctgcaacgaataacttcctctaattttctgcactatcagccagcagctgagttaggaaaagatcttattgatctcgctacatttcgaccacagcctactgcctccggccatcgccctgaggaggatgaggaggaagagattgtcattggctggcaggaaaagttgttctcccagttcgaagtggatctctaccagaacgagactgcatgtcagtcacctttggattatcagtatcggcaggagatactaaagctggagaactctgggggaaagaaaaacaggagaatattcacctacactgattccgacaggtataccaatctcgaagagcactgccagaggatgacgacagccgcatctgaagtgccttcctttttagtcgagaggatggcaaacgtgcgccgtcgcaggcaagacagaagaggtatggaggggggtattctaaagagtagaattgtgacctgggaaccatccgaagagttcgtgagaaataaccacgtgataaacacccccctgcagacaatgcatatcatggcggatctgggaccatataaaaagctcggatacaagaaatacgaacacgtcttatgcactctgaaggttgacagcaatggagtgatcactgttaaacccgatttcaccggcctgaagggaccatatcgcatcgaaactgagggcgaaaagcaggagctctggaagtatactattgacaatgtttctccgcacgctcagccagaagaggaggagcgggagagacgggtgtttaaagatctttatggcaggcacaaggagtatctgagctcgctggttgggaccgattttgaaatgacggtaccaggcgctctgcggttatttgtgaacggtgaggttgtcagtgcgcaaggatatgaatacgataacctatacgtgcatttttttgtggaactaccgacagcccactggtcatctcccgcttttcagcagctgagcggagtcacccagacatgcacgacaaaaagtttggcgatggataaagtggcccatttttcctatccttttaccttcgaggctttctttctgcacgaagacgagtcctccgatgctctgcctgaatggccagtgctatactgcgaagtactctctctggatttctggcagaggtacagggtcgaggggtacggagcagtcgtgctacccgctactcccggaccatcttggaaccgggcaccctttcggaagggctgtggcgtgtgctggacggtctggaaaggcagcgcttcacgcgttccattcacgatgtgttag

SEQ ID NO: 317784 - DNA, 1374 bp, Artificial Sequence
  derived and/or modified sequence
tgaatggccgagaccgtgtggagcaccgacaccggcgaggccgtgtacagaagcagagaccccgtgagaaacctgagactgagagtgcacctgcagagaatcaccagcagcaacttcctgcactaccagcccgccgccgagctgggcaaggacctgatcgacctggccaccttcagaccccagcccaccgccagcggccacagacccgaggaggacgaggaggaggagatcgtgatcggctggcaggagaagctgttcagccagttcgaggtggacctgtaccagaacgagaccgcctgccagagccccctggactaccagtacagacaggagatcctgaagctggagaacagcggcggcaagaagaacagaagaatcttcacctacaccgacagcgacagatacaccaacctggaggagcactgccagagaatgaccaccgccgccagcgaggtgcccagcttcctggtggagagaatggccaacgtgagaagaagaagacaggacagaagaggcatggagggcggcatcctgaagagcagaatcgtgacctgggagcccagcgaggagttcgtgagaaacaaccacgtgatcaacacccccctgcagaccatgcacatcatggccgacctgggcccctacaagaagctgggctacaagaagtacgagcacgtgctgtgcaccctgaaggtggacagcaacggcgtgatcaccgtgaagcccgacttcaccggcctgaagggcccctacagaatcgagaccgagggcgagaagcaggagctgtggaagtacaccatcgacaacgtgagcccccacgcccagcccgaggaggaggagagagagagaagagtgttcaaggacctgtacggcagacacaaggagtacctgagcagcctggtgggcaccgacttcgagatgaccgtgcccggcgccctgagactgttcgtgaacggcgaggtggtgagcgcccagggctacgagtacgacaacctgtacgtgcacttcttcgtggagctgcccaccgcccactggagcagccccgccttccagcagctgagcggcgtgacccagacctgcaccaccaagagcctggccatggacaaggtggcccacttcagctaccccttcaccttcgaggccttcttcctgcacgaggacgagagcagcgacgccctgcccgagtggcccgtgctgtactgcgaggtgctgagcctggacttctggcagagatacagagtggagggctacggcgccgtggtgctgcccgccacccccggccccagctggaacagagcccccttcagaaagggctgcggcgtgtgctggaccgtgtggaagggcagcgccagcagagtgcccttcaccatgtgctag

SEQ ID NO: 317785 - DNA, 501 bp, Artificial Sequence
  derived and/or modified sequence
atgctgctgctcaagggctttggtaaggatggcttcagattcttcactaactttgagagccgcaaagggaaagagctggacagtaatccctttgccagcctggtgttctactgggaacctctgaatagacaggtgcgtgtagagggccctgtcaagaaattgccagaggaagaagccgaatgctatttccactcaagaccgaagtcttcacagattggcgccgtagtttctcatcaaagcagcgtgatccctgatcgcgaatatctgcggaagaaaaatgaggagctggagcagctctatcaggaccaagaagtcccgaagcccaaaagttgggggggctacgtgctatacccccaggtgatggagttttggcaggggcaaactaaccgcttgcacgacaggatagtcttcaggagggggctgcccactggcgacagcccgctggggccgatgactcaccgtggagaagaagattggctgtacgagagactggctccctag

SEQ ID NO: 317786 - DNA, 501 bp, Artificial Sequence
  derived and/or modified sequence
atgctgctgctgaagggctttgggaaggatggcttccgcttcttcaccaactttgagagcaggaagggcaaggagctggacagcaacccctttgccagcctggtgttctactgggagcccctgaaccggcaggtgcgggtggagggccctgtgaagaagctgcctgaggaggaggccgagtgctacttccacagccggcccaagagcagccagatcggggctgtggtgagccaccagagcagcgtcatcccagaccgggagtacctgaggaagaagaatgaggagctggagcagctgtaccaggaccaggaggtgcccaagcccaagtcctggggcggctacgtgctgtacccccaggtgatggagttctggcagggccagaccaaccggctgcatgacagaattgtgttccggcggggcctgcccactggagacagccccctgggccccatgacccacagaggagaggaggactggctgtatgagcggctggccccctag

SEQ ID NO: 317787 - DNA, 501 bp, Artificial Sequence
  derived and/or modified sequence
atgctgctgctgaagggcttcggcaaggacggcttccggttcttcacgaacttcgagtctagaaaaggcaaagaactagacagcaatccctttgcaagtctggtcttctattgggagccactgaatcgtcaggtgcgggttgaggggccggttaaaaaattgcccgaggaggaggcagagtgttacttccactccagacctaagtctagtcaaatcggcgcagttgtctcccatcaatcaagtgtgatcccagacagagagtatcttagaaaaaagaacgaggagctagagcaactctatcaagatcaggaggtcccaaaacccaaaagctggggaggatacgtactctacccacaggtgatggagttttggcaaggacagacaaacagattgcatgacagaatagtcttcagaagaggattgccaactggtgattcgcccctgggccctatgacccaccgcggcgaagaagactggctatatgagcggctggccccatag

SEQ ID NO: 317788 - DNA, 501 bp, Artificial Sequence
  derived and/or modified sequence
atgctgctgctgaagggattcggtaaggacgggtttagattcttcactaatttcgagtcccggaaaggaaaggagctggacagcaatccctttgcctcgctagtgttctactgggagccattgaataggcaggtaagagtggagggacctgttaagaaactccctgaggaggaggcagagtgttacttccactccaggcccaaatccagtcaaatcggggcagtggtctcacaccagtcttctgtgatacctgatagggaatacttaaggaagaaaaatgaagaactcgagcagctctaccaggaccaggaagtaccgaagcctaagtcttggggaggttacgtcttgtatccacaagttatggaattctggcaggggcaaaccaatagattgcatgaccgtattgttttcaggagagggctacccactggggactctccactggggcctatgacgcaccgcggagaggaggattggttatacgagcgactggcaccatag

SEQ ID NO: 317789 - DNA, 501 bp, Artificial Sequence
  derived and/or modified sequence
atgctgctgctgaagggcttcggcaaggacggcttcagattcttcaccaacttcgagagcagaaagggcaaggagctggacagcaaccccttcgccagcctggtgttctactgggagcccctgaacagacaggtgagagtggagggccccgtgaagaagctgcccgaggaggaggccgagtgctacttccacagcagacccaagagcagccagatcggcgccgtggtgagccaccagagcagcgtgatccccgacagagagtacctgagaaagaagaacgaggagctggagcagctgtaccaggaccaggaggtgcccaagcccaagagctggggcggctacgtgctgtacccccaggtgatggagttctggcagggccagaccaacagactgcacgacagaatcgtgttcagaagaggcctgcccaccggcgacagccccctgggccccatgacccacagaggcgaggaggactggctgtacgagagactggccccctag

SEQ ID NO: 317790 - protein, 95 aa, Artificial Sequence
  derived and/or modified sequence
MAAARLCLSLLLLSTCVALLLQPLLGAQGAPLEPVYPGDNATPEQMAQYAADLRRYINMLTRPRYGKRHKEDTLAFSEWGSPHAAVPRELSPLDL

SEQ ID NO: 317791 - protein, 616 aa, Artificial Sequence
  derived and/or modified sequence
AEVVIIRVQSPDGVKRITATKRETAATFLKKVAKEFGFQNNGFSVYINRNKTGEITASSNKSLNLLKIKHGDLLFLFPSSLAGPSSEMETSVPPGFKVFGAPNVVEDEIDQYLSKQDGKIYRSRDPQLCRHGPLGKCVHCVPLEPFDEDYLNHLEPPVKHMSFHAYIRKLTGGADKGKFVALENISCKIKSGCEGHLPWPNGICTKCQPSAITLNRQKYRHVDNIMFENHTVADRFLDFWRKTGNQHFGYLYGRYTEHKDIPLGIRAEVAAIYEPPQIGTQNSLELLEDPKAEVVDEIAAKLGLRKVGWIFTDLVSEDTRKGTVRYSRNKDTYFLSSEECITAGDFQNKHPNMCRLSPDGHFGSKFVTAVATGGPDNQVHFEGYQVSNQCMALVRDECLLPCKDAPELGYAKESSSEQYVPDVFYKDVDKFGNEITQLARPLPVEYLIIDITTTFPKDPVYTFSISQNPFPIENRDVLGETQDFHSLATYLSQNTSSVFLDTISDFHLLLFLVTNEVMPLQDSISLLLEAVRTRNEELAQTWKRSEQWATIEQLCSEYPHPLPRHPVAGAGEQPTLHSSPLPVVPWIPHPAASWQVPSAMQRVETRPPCQARGRLR

SEQ ID NO: 317792 - protein, 456 aa, Artificial Sequence
  derived and/or modified sequence
MSFHAYIRKLTGGADKGKFVALENISCKIKSGCEGHLPWPNGICTKCQPSAITLNRQKYRHVDNIMFENHTVADRFLDFWRKTGNQHFGYLYGRYTEHKDIPLGIRAEVAAIYEPPQIGTQNSLELLEDPKAEVVDEIAAKLGLRKVGWIFTDLVSEDTRKGTVRYSRNKDTYFLSSEECITAGDFQNKHPNMCRLSPDGHFGSKFVTAVATGGPDNQVHFEGYQVSNQCMALVRDECLLPCKDAPELGYAKESSSEQYVPDVFYKDVDKFGNEITQLARPLPVEYLIIDITTTFPKDPVYTFSISQNPFPIENRDVLGETQDFHSLATYLSQNTSSVFLDTISDFHLLLFLVTNEVMPLQDSISLLLEAVRTRNEELAQTWKRSEQWATIEQLCSEYPHPLPRHPVAGAGEQPTLHSSPLPVVPWIPHPAASWQVPSAMQRVETRPPCQARGRLR

SEQ ID NO: 317793 - DNA, 1851 bp, Artificial Sequence
  derived and/or modified sequence
gccgaggtggtgatcatcagagtgcagagccccgacggcgtgaagagaatcaccgccaccaagagagagaccgccgccaccttcctgaagaaggtggccaaggagttcggcttccagaacaacggcttcagcgtgtacatcaacagaaacaagaccggcgagatcaccgccagcagcaacaagagcctgaacctgctgaagatcaagcacggcgacctgctgttcctgttccccagcagcctggccggccccagcagcgagatggagaccagcgtgccccccggcttcaaggtgttcggcgcccccaacgtggtggaggacgagatcgaccagtacctgagcaagcaggacggcaagatctacagaagcagagacccccagctgtgcagacacggccccctgggcaagtgcgtgcactgcgtgcccctggagcccttcgacgaggactacctgaaccacctggagccccccgtgaagcacatgagcttccacgcctacatcagaaagctgaccggcggcgccgacaagggcaagttcgtggccctggagaacatcagctgcaagatcaagagcggctgcgagggccacctgccctggcccaacggcatctgcaccaagtgccagcccagcgccatcaccctgaacagacagaagtacagacacgtggacaacatcatgttcgagaaccacaccgtggccgacagattcctggacttctggagaaagaccggcaaccagcacttcggctacctgtacggcagatacaccgagcacaaggacatccccctgggcatcagagccgaggtggccgccatctacgagcccccccagatcggcacccagaacagcctggagctgctggaggaccccaaggccgaggtggtggacgagatcgccgccaagctgggcctgagaaaggtgggctggatcttcaccgacctggtgagcgaggacaccagaaagggcaccgtgagatacagcagaaacaaggacacctacttcctgagcagcgaggagtgcatcaccgccggcgacttccagaacaagcaccccaacatgtgcagactgagccccgacggccacttcggcagcaagttcgtgaccgccgtggccaccggcggccccgacaaccaggtgcacttcgagggctaccaggtgagcaaccagtgcatggccctggtgagagacgagtgcctgctgccctgcaaggacgcccccgagctgggctacgccaaggagagcagcagcgagcagtacgtgcccgacgtgttctacaaggacgtggacaagttcggcaacgagatcacccagctggccagacccctgcccgtggagtacctgatcatcgacatcaccaccaccttccccaaggaccccgtgtacaccttcagcatcagccagaaccccttccccatcgagaacagagacgtgctgggcgagacccaggacttccacagcctggccacctacctgagccagaacaccagcagcgtgttcctggacaccatcagcgacttccacctgctgctgttcctggtgaccaacgaggtgatgcccctgcaggacagcatcagcctgctgctggaggccgtgagaaccagaaacgaggagctggcccagacctggaagagaagcgagcagtgggccaccatcgagcagctgtgcagcgagtacccccaccccctgcccagacaccccgtggccggcgccggcgagcagcccaccctgcacagcagccccctgcccgtggtgccctggatcccccaccccgccgccagctggcaggtgcccagcgccatgcagagagtggagaccagacccccctgccaggccagaggcagactgagatag

SEQ ID NO: 317794 - DNA, 1371 bp, Artificial Sequence
  derived and/or modified sequence
atgagcttccacgcctacatcagaaagctgaccggcggcgccgacaagggcaagttcgtggccctggagaacatcagctgcaagatcaagagcggctgcgagggccacctgccctggcccaacggcatctgcaccaagtgccagcccagcgccatcaccctgaacagacagaagtacagacacgtggacaacatcatgttcgagaaccacaccgtggccgacagattcctggacttctggagaaagaccggcaaccagcacttcggctacctgtacggcagatacaccgagcacaaggacatccccctgggcatcagagccgaggtggccgccatctacgagcccccccagatcggcacccagaacagcctggagctgctggaggaccccaaggccgaggtggtggacgagatcgccgccaagctgggcctgagaaaggtgggctggatcttcaccgacctggtgagcgaggacaccagaaagggcaccgtgagatacagcagaaacaaggacacctacttcctgagcagcgaggagtgcatcaccgccggcgacttccagaacaagcaccccaacatgtgcagactgagccccgacggccacttcggcagcaagttcgtgaccgccgtggccaccggcggccccgacaaccaggtgcacttcgagggctaccaggtgagcaaccagtgcatggccctggtgagagacgagtgcctgctgccctgcaaggacgcccccgagctgggctacgccaaggagagcagcagcgagcagtacgtgcccgacgtgttctacaaggacgtggacaagttcggcaacgagatcacccagctggccagacccctgcccgtggagtacctgatcatcgacatcaccaccaccttccccaaggaccccgtgtacaccttcagcatcagccagaaccccttccccatcgagaacagagacgtgctgggcgagacccaggacttccacagcctggccacctacctgagccagaacaccagcagcgtgttcctggacaccatcagcgacttccacctgctgctgttcctggtgaccaacgaggtgatgcccctgcaggacagcatcagcctgctgctggaggccgtgagaaccagaaacgaggagctggcccagacctggaagagaagcgagcagtgggccaccatcgagcagctgtgcagcgagtacccccaccccctgcccagacaccccgtggccggcgccggcgagcagcccaccctgcacagcagccccctgcccgtggtgccctggatcccccaccccgccgccagctggcaggtgcccagcgccatgcagagagtggagaccagacccccctgccaggccagaggcagactgagatag

SEQ ID NO: 317795 - DNA, 1851 bp, Artificial Sequence
  derived and/or modified sequence
gccgaagtcgtgattattcgcgtccagagtccagatggagtaaagcgtattacggccacgaaaagagaaacggccgctactttcttgaagaaagttgccaaggaattcggatttcagaacaacgggttttcagtatatatcaatcggaacaaaaccggcgaaattacagcctcctccaacaaaagtctaaatctgctgaagataaagcacggtgatctgttattcttattcccatcatccctcgccggccccagttcagaaatggagacctctgtgccccccggtttcaaagtttttggcgctccaaacgtggtagaggacgaaattgaccagtatctgtctaagcaggacgggaaaatttataggtctagagacccccaactgtgtcgacacggccctttaggcaagtgcgttcattgtgtaccgctggaacccttcgacgaggattacctaaaccatctcgaaccaccggtgaaacacatgagcttccacgcgtatataagaaaactgacaggcggcgccgataaaggaaagtttgttgcattggagaacatcagctgcaaaattaagagtggctgcgaaggtcatctcccctggccaaacggcatatgcacgaagtgtcaaccgtccgcgatcactctgaatagacaaaagtataggcacgtcgacaatatcatgttcgagaaccataccgtggccgatcggtttctggatttttggcgaaaaacagggaaccagcactttggatatttatacgggagatacaccgaacataaggatatccccttaggcatcagggccgaggtcgctgcgatttacgaacctccccagatcggcacgcagaattctctggagctgctggaggacccaaaggccgaggttgttgacgaaattgccgctaaattgggactgcggaaagtagggtggatcttcaccgaccttgtcagcgaggacacgcgcaagggcacggtaaggtatagtcggaacaaggatacttatttcctgagctcagaggaatgtatcactgcaggcgattttcagaataaacatcccaacatgtgcaggctttccccagacgggcattttgggtccaaatttgtgacagccgtggcgactgggggcccagacaatcaggttcacttcgaggggtaccaggtgtccaatcagtgcatggcccttgtgcgcgacgagtgcctgctgccttgcaaggacgcccccgagctgggctacgccaaagagtcctcaagcgagcagtacgtccctgatgtgttctataaggatgtggataagtttggaaacgagattacccaactagccagacctctcccagtcgaatacctgatcatcgatataaccactacattccctaaagatcctgtctatacgttctccatttctcagaatccttttcctatcgagaatagagatgttcttggagagactcaagacttccacagcctagccacataccttagccagaacaccagctcggtgtttttggacacaatctctgacttccacctcctgctgttcctcgtgaccaatgaggttatgcctctacaggacagcatttccctcctcctcgaagccgtgaggacacggaacgaagaactagcccagacctggaagagatcagagcagtgggcgactatagagcagctgtgcagcgagtacccccaccctcttccccgccacccagtcgcgggcgcaggagaacagccaacgctgcactcctcgcctctgccagtggtgccatggattccacaccccgctgcctcatggcaggtgccttcagcaatgcagcgggtggagactcgcccaccttgccaggcacggggacgcttgaggtag

SEQ ID NO: 317796 - DNA, 1371 bp, Artificial Sequence
  derived and/or modified sequence
atgagtttccacgcctatatccgtaagctgacaggcggagctgacaagggaaagttcgtcgctttggaaaacatctcctgcaagatcaagtcaggctgtgaagggcatttgccctggcctaacgggatttgtacaaagtgtcaaccgtccgcgatcaccttgaaccggcaaaagtatcggcacgtggataatatcatgttcgagaatcatacagttgcagaccggtttcttgatttctggcggaaaaccgggaatcaacacttcggctacctgtatggaaggtacacggaacacaaagacatccccctagggattcgagcagaggtcgccgcgatctacgaacctccccaaatcggcacccaaaacagtctggaactgcttgaggatccgaaggctgaggtggtggacgagatagcagccaagctgggcctgcgcaaggtggggtggattttcaccgacctggttagcgaggatacaaggaaaggcactgtgcggtattctcggaacaaggacacatactttctgtcatctgaggaatgcatcacagccggggacttccaaaataagcatcctaatatgtgtcgtctctccccagacggacatttcggatcaaagtttgttactgccgttgcaacgggcggaccagataaccaggtccacttcgaaggttaccaagtatcgaaccagtgtatggcactcgtccgggatgagtgcctactcccatgcaaagacgcgcctgagttaggctatgccaaagagagcagcagcgagcagtatgtgcctgacgtcttttataaggacgtggataaattcggcaacgagattacccagctcgctcgacctttacctgttgagtacctgatcattgacataactaccacctttcctaaggaccccgtgtacaccttcagcatctcccaaaacccattccccatcgagaacagagacgttctaggcgagactcaggacttccactcacttgccacatacctctctcagaatactagttctgtattcctagatactatctcagacttccacctattactatttctcgtgacaaacgaagttatgccccttcaggattctatttccctgctgttggaggccgtgcgaactcgcaatgaggagctcgcccagacctggaagcgctcagaacagtgggccaccattgagcagttgtgctccgagtacccccatccactccctcgccatcccgtggccggagccggtgaacagccaacacttcacagctccccactgcccgttgtcccttggatcccacaccctgccgcaagttggcaggtgccctcagctatgcagagagtagaaacccgtcccccatgccaagctagaggccgtctcaggtag

SEQ ID NO: 317797 - DNA, 1851 bp, Artificial Sequence
  derived and/or modified sequence
gctgaggtggtgatcatccgggtgcagagcccagatggagtgaagaggatcacagccaccaagcgggagacagctgccaccttcctgaagaaggtggccaaggagtttggcttccagaacaacggcttctctgtgtacatcaacagaaacaagacaggagagatcacagccagcagcaacaagagcctgaacctgctgaagatcaagcacggggacctgctcttcctgttccccagcagcctggccggccccagcagcgagatggagacctctgtgcccccaggcttcaaggtgtttggagccccaaatgtggtggaggatgaaattgaccagtacctgagcaagcaggacggcaagatctaccgcagccgggacccccagctgtgcagacatggccccctgggcaaatgtgtgcactgtgtgcccctggagccctttgatgaggactacctgaaccacctggagccccctgtgaagcacatgtccttccacgcctacatcaggaagctgactggaggagctgacaagggcaagtttgtggccctggagaacatcagctgcaagatcaagagcggctgtgagggccacctgccctggcccaacggcatctgcaccaagtgccagcccagcgccatcaccctgaaccggcagaagtacagacatgtggacaacatcatgtttgagaaccacacagtggccgaccgcttcctggacttctggaggaagacaggcaaccagcacttcggctacctgtatggccgctacacagagcacaaggacatccccctgggcatccgggcagaggtggccgccatctatgagcccccccagatcggcacccagaacagcctggagctgctggaggaccccaaggccgaggtggtggatgaaattgctgccaagctgggcctgaggaaggtgggctggatcttcacagacctggtgtctgaggacaccaggaaaggaacagtgcgctacagcaggaacaaggacacctacttcctgagcagcgaggagtgcatcacagctggggacttccagaacaagcaccccaacatgtgccgcctgagcccagatggccacttcggcagcaagtttgtgacagctgtggccaccggcggccctgacaaccaggtgcactttgagggctaccaggtgagcaaccagtgcatggccctggtgagagatgaatgtctgctgccctgcaaggatgcccctgagctgggctacgccaaggagagcagcagcgagcagtatgtgcctgatgtgttctacaaggatgtggacaagtttggaaatgagatcacccagctggcccggcccctgcctgtggagtacctgatcatcgacatcaccaccaccttccccaaggaccctgtgtacaccttcagcatcagccagaaccccttccccattgaaaatagagatgtgctgggggagacccaggacttccacagcctggccacctacctgagccagaacaccagctctgtgttcctggacaccatcagtgacttccacctgctgctcttcctggtgaccaatgaggtgatgcccctgcaggacagcatcagcctgctgctggaggccgtgaggaccagaaatgaggagctggcccagacctggaagaggtctgagcagtgggccaccatcgagcagctgtgcagcgagtacccccaccccctgcccaggcaccctgtggccggggccggggagcagcccaccctgcacagcagccccctgcctgtggtgccctggatcccccaccctgctgcctcctggcaggtgcccagcgccatgcagagggtggagaccaggcctccctgccaggcccggggccgcctgaggtag

SEQ ID NO: 317798 - DNA, 1371 bp, Artificial Sequence
  derived and/or modified sequence
atgtccttccacgcctacatcaggaagctgactggaggagctgacaagggcaagtttgtggccctggagaacatcagctgcaagatcaagagcggctgtgagggccacctgccctggcccaacggcatctgcaccaagtgccagcccagcgccatcaccctgaaccggcagaagtacagacatgtggacaacatcatgtttgagaaccacacagtggccgaccgcttcctggacttctggaggaagacaggcaaccagcacttcggctacctgtatggccgctacacagagcacaaggacatccccctgggcatccgggcagaggtggccgccatctatgagcccccccagatcggcacccagaacagcctggagctgctggaggaccccaaggccgaggtggtggatgaaattgctgccaagctgggcctgaggaaggtgggctggatcttcacagacctggtgtctgaggacaccaggaaaggaacagtgcgctacagcaggaacaaggacacctacttcctgagcagcgaggagtgcatcacagctggggacttccagaacaagcaccccaacatgtgccgcctgagcccagatggccacttcggcagcaagtttgtgacagctgtggccaccggcggccctgacaaccaggtgcactttgagggctaccaggtgagcaaccagtgcatggccctggtgagagatgaatgtctgctgccctgcaaggatgcccctgagctgggctacgccaaggagagcagcagcgagcagtatgtgcctgatgtgttctacaaggatgtggacaagtttggaaatgagatcacccagctggcccggcccctgcctgtggagtacctgatcatcgacatcaccaccaccttccccaaggaccctgtgtacaccttcagcatcagccagaaccccttccccattgaaaatagagatgtgctgggggagacccaggacttccacagcctggccacctacctgagccagaacaccagctctgtgttcctggacaccatcagtgacttccacctgctgctcttcctggtgaccaatgaggtgatgcccctgcaggacagcatcagcctgctgctggaggccgtgaggaccagaaatgaggagctggcccagacctggaagaggtctgagcagtgggccaccatcgagcagctgtgcagcgagtacccccaccccctgcccaggcaccctgtggccggggccggggagcagcccaccctgcacagcagccccctgcctgtggtgccctggatcccccaccctgctgcctcctggcaggtgcccagcgccatgcagagggtggagaccaggcctccctgccaggcccggggccgcctgaggtag

SEQ ID NO: 317799 - DNA, 5389 bp, Artificial Sequence
  derived and/or modified sequence
gcagaggttgtgataattcgtgtccagtccccggatggagtgaagcggatcacagcaacaaagagagaaacagcagcaacatttttgaaaaaggttgcaaaggagtttggcttccaaaataatggcttctcggtttacatcaatagaaacaagaccggagagataacagcctcctccaacaaatccctcaacttgctaaaaatcaagcatggcgatttgttgttcctgtttccctcgagccttgctgggccctcatctgaaatggagacgtcagttccaccgggcttcaaagtctttggcgctcccaacgtggtggaggatgagattgatcagtacctcagcaaacaggacgggaagatttacagaagccgagacccacagctatgccgccacggccctttggggaaatgcgtgcactgcgtccctctagagccattcgatgaggactatctaaaccatctcgagcctcccgtgaagcacatgtccttccacgcctacatccggaagctgactggaggggctgacaaggggaagtttgttgccctggagaacatcagctgcaagattaagtcagggtgcgaggggcacctcccgtggccgaatggcatctgtactaagtgccagccgagcgccatcacgctgaacagacagaagtacaggcatgtggacaatatcatgtttgagaatcacaccgtcgctgaccgctttcttgacttctggagaaagacagggaaccagcattttgggtacttatacggacggtacacggagcacaaagacattccccttggcatcagggctgaagtggctgcgatttatgagccacctcagattggtacacagaacagcttggagcttcttgaggatccaaaagctgaagtggtcgatgaaattgctgccaaacttggcctgcggaaggttggctggatatttacagacctcgtctcagaagatacccgaaagggtaccgtccgctacagtcgaaataaggacacctatttcctaagttcagaagagtgcatcactgcaggagacttccagaacaagcatcccaacatgtgccggctctctccagacggacattttggatccaagtttgttactgcagtggctacaggtggtcctgacaaccaagtccactttgaagggtaccaggtgtccaatcagtgtatggcactggtccgtgatgagtgtttgctgccatgcaaggacgccccggagcttggctacgccaaggagtctagcagtgagcagtacgtgcctgatgtgttttataaggacgtagacaagtttggcaacgagatcacccagctggcccggcccctgcctgtggagtatctcatcatagacatcacaacaactttccccaaggatccagtttacactttttctatttcgcaaaatccatttcctattgaaaaccgggatgtattgggtgagacacaggacttccatagcttggccacctatttgtctcagaatacctcatctgtgttcttggataccatctcagatttccacctcttgctgttcctggtcaccaatgaagttatgcctctgcaggacagcatcagcttgctgctggaggccgtgcggaccagaaatgaggagctcgcccagacatggaagaggtctgagcagtgggccaccatcgagcagctgtgcagtgagtacccccaccccctgccccggcaccccgtggctggggccggagagcagcccactctgcacagctccccactgccggtggtgccctggattccgcacccagctgcatcctggcaggtgccatcggcaatgcaacgagtagagactcggcctccctgccaggcacgtggcaggctccggtgatggagcagacatgttgtccaggccgtacgtcttaggtacacagccctgtaaattttataaacctgtacatcagagatactaatctccaggcatcctaggagcactttgaacatcattgtcttaagagaatcagaaactttatggaagcgccggaagcgtgggaccttttggtctccttgagaatttccctttagtgcttaaagctgtaaggaggagaagcctgcagcatccatgttgttgctggtggacactacggaacggaccgcaggcattgcgtgtcttccggaccctcagtcaccaggtcctgaacgattccccactcgtgagaaccttctgtcagcattgctgcagggactcctcacgcaccgtggtgcctcgtgcagcccgagtgccctgagtccctgcagctgagagcaccagagtgcccgggagctacggccctggacaaatgctagaatccttctgttaacacagccttcaaaagacacatcaaacacctttataccatttcctgtttttttttttttttttgagacggagtttggctcttgtcacccaggctggagtgtggtggcgtgatcttgcctcactgcaacctccacctcctgggttcaaacgattctcctgcctcagcctcctgagtagctgggactacaggcatgtgccaccatgcctggataatttttgtattcttagtagagccagggtttcaccatgttagccaggctggtctcgaactcctgaccttgtgatctgcttgcctctgcctcccagagtgttgggattacaggtgtgagccaccacgcccagccgaggttttcttttcacacaattctttgtttattatttttatttttgtagagacagggtctcactctattgccgaggctggagtgcagttgcacaatcgtaactcactgcagcctcaaactccaggctcaagtgatctttctgcttcagcctgctgagtaactgggaccacaggcttgcaacaccacacccagctaattcttggggctttgttgttgctttttatttgtttgttttttaaaaataattttaacttattttagattcacagggtacatgtgcaggtttgtcacctgggtatattgcctgatgctgaggttggggtatgattgatcacatcacccaggtactacacatagtacctaatagtttttcagcccgccctgctctttgtgtgtgtgtgtgtgtgtgtgtgtgtgtgtgtgttttgagctggagcctcaccctgtctcccaggctggagtgcagtggcgcaatcttagctcactgcaaactctgcctcctgggttgaagcaattcccctccctcagcctcccgagtagctgggattacagatgtgtaccaccacacctggcgttgccatctttatgtacgtgagtacccatgtttagctcccacttataaatgaaaacatgtagtatttggtttgctgttcctgcattagtttgcttagaataatggccttcaactgcatccatgttgctgcaaaggacatgatttcattcctttttatggctgcaaaattttttaatatttttgtatcaatgaggtctcactgtgttgcccagactggtctcaaactttggcctcaagcattccttgcacctcagcctcacaaagtcctgagattatacctgggagccactgcacccagccctttgatgcagttctaacaatgacaccagtcttttttttttttttcttttttgtttcccttttagagacagggtttcactctgttgcctaggctggagtgcagtggagtgatcatagctcactacagccttcaattcctgagctcaagcgatcctcctgcatcagctttcggagtacctaggagtataaacatgagccactacacccaactaatgtttttggttggtgttttttttttttctttaagagatagggttggccgggcccggtggctggctcacacctgtaatcccagcactttgggaggctgaggcaggtggatcacaacgtcaagggattgagaccatcctggccaacatggtgaaaccccatttctgttaaaactacaaaaattagctgggcatggtggcgagcgcctgtaatcccagctactcaggaggctgaggcaggagaatcacttgacccaggaagcgtaggttgtagtgagctgagatcgtgccactgtactccagcctgggcgacagagcaagactctgtctcaaaaaaaaaaaaaagatgtggtcttgccatgttgcccaggctggtctcaaactcctaggctcaagtgatcttcctgccttggttcccaaagtgctgagattacagctgtgagccactgcacctgaccttttttttttcccccctccttttttttttgagacaggttctcactctgtcacccaggctgaagtgcagtggcatttgaggtcagtctcaccttgacctccccaggctcaaacaatcctcccgcctcagcctcctgagcagctgggactacaagcatgtgccaccatccctggctgattttttaaatttgttgtagagatgaggtctcactatgttgcccaggctggtcttgaactcttgggcccaagcgatcctcccgcctcagtgctgagattgcagtggtaagccaccatgtccagccaactctttaataataggcagttctgactggtgtaagttctgactggtatctcactgtggttttaatttgcatctctgatgattagtgatgttgggcattttttcatgggttttttgtttgtttgttttgagacaaagtcttgttctgttgcccaggctggagtgcagtagtgtgatctcagctcactgcagcctccacctcccgggttcaagccattgtccagcctctgcctcctaagtagctggaattacaggtggctgccaccacacccagctaatttttttagttttagtagagacagggtttctccatgttggccaggctggtctcaaactcctgacctcaagtgatccacccacctcggcttcccaaagtgctgggattataggtgtgagccaccgcgcccggccctcatgggttgttttgttttgttttgagacggaatctcaccctgtcacccaggctgcagtgcaatctcatgatctccacttactgcaacctccacgtcctgggttcaagtgatactcctgcctcagcctcccgagtagctgggactacaggcgtgcacccacgcctggctaatttttatatttttagtagagatggggtttcaccatgttggtcaggctggtctggaactcctgacctcaggtgatccacctgcctcggtctcccaaagtgctgggattacagacgtgtatacacaagacacaaagatcagctcaggatgggtcataggcctaatggtaaaaggtaaaactatgaagcaggctgggcatgatgtctcatagctataatcctaacactctaggaggccaaagctggaggacactgtagcccagaagtgtgagaccagcccacacagcatagtgaagccccgtctgt

SEQ ID NO: 317800 - DNA, 2365 bp, Artificial Sequence
  derived and/or modified sequence
gcggagccgggcgggcgaagctggagcggcggtggcggcggcgtagggaggccggggccggggctgaggccgcggccgggtctgcgaggcccttggggcggcaggcggcggcggcccggggctcgagcccggaggcaggagcagccgccatggccgagagcatcataattcgtgtccagtccccggatggagtgaagcggatcacagcaacaaagagagaaacagcagcaacatttttgaaaaaggttgcaaaggagtttggcttccaaaataatggcttctcggtttacatcaatagaaacaagaccggagagataacagcctcctccaacaaatccctcaacttgctaaaaatcaagcatggcgatttgttgttcctgtttccctcgagccttgctgggccctcatctgaaatggagacgtcagttccaccgggcttcaaagtctttggcgctcccaacgtggtggaggatgagattgatcagtacctcagcaaacaggacgggaagatttacagaagccgagacccacagctccattcgatgaggactatctaaaccatctcgagcctcccgtgaagcacatgtccttccacgcctacatccggaagctgactggaggggctgacaaggggaagtttgttgccctggagaacatcagctgcaagattaagtcagggtgcgaggggcacctcccgtggccgaatggcatctgtactaagtgccagccgagcgccatcacgctgaacagacagaagtacaggcatgtggacaatatcatgtttgagaatcacaccgtcgctgaccgctttcttgacttctggagaaagacagggaaccagcattttgggtacttatacggacggtacacggagcacaaagacattccccttggcatcagggctgaagtggctgcgatttatgagccacctcagattggtacacagaacagcttggagcttcttgaggatccaaaagctgaagtggtcgatgaaattgctgccaaacttggcctgcggaaggttggctggatatttacagacctcgtctcagaagatacccgaaagggtaccgtccgctacagtcgaaataaggacacctatttcctaagttcagaagagtgcatcactgcaggagacttccagaacaagcatcccaacatgtgccggctctctccagacggacattttggatccaagtttgttactgcagtggctacaggtggtcctgacaaccaagtccactttgaagggtaccaggtgtccaatcagtgtatggcactggtccgtgatgagtgtttgctgccatgcaaggacgccccggagcttggctacgccaaggagtctagcagtgagcagtacgtgcctgatgtgttttataaggacgtagacaagtttggcaacgagatcacccagctggcccggcccctgcctgtggagtatctcatcatagacatcacaacaactttccccaaggatccagtttacactttttctatttcgcaaaatccatttcctattgaaaaccgggatgtattgggtgagacacaggacttccatagcttggccacctatttgtctcagaatacctcatctgtgttcttggataccatctcagatttccacctcttgctgttcctggtcaccaatgaagttatgcctctgcaggacagcatcagcttgctgctggaggccgtgcggaccagaaatgaggagctcgcccagacatggaagaggtctgagcagtgggccaccatcgagcagctgtgcagtgagtacccccaccccctgccccggcaccccgtggctggggccggagagcagcccactctgcacagctccccactgccggtggtgccctggattccgcacccagctgcatcctggcaggtgccatcggcaatgcaacgagtagagactcggcctccctgccaggcacgtggcaggctccggtgatggagcagacatgttgtccaggccgtacgtcttaggtacacagccctgtaaattttataaacctgtacatcagagatactaatctccaggcatcctaggagcactttgaacatcattgtcttaagagaatcagaaactttatggaagcgccggaagcgtgggaccttttggtctccttgagaatttccctttagtgcttaaagctgtaaggaggagaagcctgcagcatccatgttgttgctggtggacactacggaacggaccgcaggcattgcgtgtcttccggaccctcagtcaccaggtcctgaacgattccccactcgtgagaaccttctgtcagcattgctgcagggactcctcacgcaccgtggtgcctcgtgcagcccgagtgccctgagtccctgcagctga

SEQ ID NO: 317801 - DNA, 1851 bp, Artificial Sequence
  derived and/or modified sequence
gccgaggtggtgatcatccgggtgcagagccccgacggcgtgaagcggatcacggcaactaaacgtgaaactgccgctacttttttgaagaaggtggccaaagaattcggattccagaacaatgggtttagcgtctatataaatcgcaataagaccggcgagataacagcttctagcaacaaatctcttaatttacttaagatcaaacatggcgacctactctttctgtttccgagtagcctggctggtccctcatccgagatggaaaccagcgtacccccaggctttaaggttttcggtgctccaaacgtggtcgaggatgagatagaccaatacctgagtaagcaggacggcaagatctatcggtcaagagatccacagctgtgtcgccatggcccccttggcaaatgtgtgcattgtgtgcccctcgaaccgttcgacgaggattacctgaatcatctggaaccacctgttaagcacatgtcattccatgcttacatacgtaagctaaccggaggcgccgacaagggtaagttcgttgccctggagaacattagttgcaaaatcaagagtggctgtgagggccacctcccatggccaaatggtatctgcacgaaatgtcagccttctgctattaccctaaatagacagaagtaccggcatgtggataacattatgttcgagaaccataccgtcgccgacaggtttctagacttctggcgaaagacaggtaatcaacactttggatatctgtatgggcgttacacagaacacaaagacatcccattggggattagggcagaagttgcggctatctatgagcctcctcagatcggcacacaaaactctcttgagttattggaggaccctaaggctgaggtcgtcgatgagatcgctgctaagttgggcctgcggaaggtgggatggatcttcaccgatctcgtctcagaggatacacgtaaaggaaccgtgcgatactcacgaaacaaggacacgtactttctgtccagcgaagagtgtatcacagccggcgatttccaaaataaacaccctaacatgtgcagactgtcgcctgacggccactttgggagcaagttcgtcacggctgtggcaaccggagggcccgataaccaagtacactttgagggctatcaggtctctaaccaatgtatggctctggtcagagacgagtgcctgttaccttgtaaggatgcgccagaacttggctacgcaaaagaaagcagttccgagcagtacgtgcccgacgtcttctataaggatgtggacaaatttggcaacgagataacccagctggcccgacccctgcccgtcgaatatcttatcatcgacattacaacgacctttcccaaggatccagtgtacactttctcaatatcccagaatccatttccaatcgagaatcgggacgttcttggagaaactcaagattttcacagcctggcgacatatctaagccagaatacttccagtgtgttcctggataccatctccgattttcacctcctgctgtttcttgtgaccaatgaagtgatgcctctccaggatagtatatccctgctgctggaagccgtcaggaccagaaatgaggagctggctcagacatggaagcgctccgagcagtgggccaccatcgagcaactgtgtagcgaatacccccacccccttcctcgtcatccagtcgccggagccggcgagcaacccaccctccattcaagtccactgcctgtggtgccttggatcccacatccagcagcctcgtggcaagtgccgagtgctatgcagcgggttgagacccggccaccctgccaggcgcgcggcaggttacgctag

SEQ ID NO: 317802 - DNA, 1371 bp, Artificial Sequence
  derived and/or modified sequence
atgagcttccacgcctacatccggaagctgaccggcggcgccgacaagggaaagttcgtagcgctcgagaatattagttgcaagatcaaatccgggtgtgaggggcatttaccttggcccaatggaatttgtaccaagtgtcagcccagtgcaatcacactcaatcgccagaagtacagacacgtggacaatattatgtttgaaaatcacacagttgccgacaggtttctcgatttctggcgaaagactggtaaccagcacttcggctatctgtatggccggtacacggagcacaaagacatccccctgggaattcgcgccgaagtcgcggctatttacgagcccccccaaatcggaactcagaactccctagaattactggaagaccccaaggctgaagtcgtggatgagattgccgctaaactgggcctgcgtaaagtggggtggattttcacggatcttgtatcggaagatactagaaagggtactgtaaggtactcgcgtaataaagatacatactttctgtcctcagaggaatgcatcaccgccggcgacttccaaaacaaacaccccaatatgtgccgactatcgcctgacgggcacttcggaagtaaattcgtaactgccgtcgctaccggcggaccggataaccaggtacattttgaaggctatcaagtttccaaccaatgcatggctttagtcagggatgaatgcctactgccttgtaaagatgcgcctgagctggggtacgctaaagagagctcatccgaacaatacgtgcccgatgtcttttacaaggatgtagataagttcggcaatgagatcacacagctggcaagacccctgccagttgagtacctgattatagacatcaccacaacatttcccaaggatcccgtgtacactttttccatcagtcagaacccttttccgattgaaaacagagatgttctcggagaaacccaggattttcactccttggcaacgtacctcagtcagaatacctcatctgtctttctggacactatcagtgatttccatttactgctgtttctagtcacaaatgaagtaatgccactgcaagacagtatctctctgctcttggaggcagttcgtaccaggaacgaagagctggctcaaacatggaagagatctgagcaatgggccacaatagaacaactatgttcagagtatccacaccccctgccaagacatcctgtggctggagctggcgaacaacctacgctgcactcaagtcccttgccagtggttccttggattccccatcctgctgcgagctggcaggtaccttcagccatgcaacgagtggagacgcgccctccctgccaagccagagggaggctgcgatag

SEQ ID NO: 317803 - DNA, 1851 bp, Artificial Sequence
  derived and/or modified sequence
gccgaggtggtaattattagggtacagtcaccagatggagttaaaaggatcacagccactaagcgggaaactgccgctaccttcctgaaaaaggtagctaaagagttcggattccagaacaatggctttagcgtctacatcaatcggaacaagaccggggagattactgctagctccaacaagtcactgaacctactgaaaataaagcatggcgatctgctatttctctttcctagttctctggcaggacccagctccgagatggagacaagcgtgccccctgggtttaaggtctttggggcacccaatgtcgtggaggacgaaatagatcagtacctgtctaaacaggacggcaaaatttaccggagccgggatccgcagctatgcaggcatgggccattgggaaaatgtgttcactgtgtccctctagaacccttcgatgaggattatctcaaccacctcgagccgccagtaaagcacatgtcgttccacgcctacattcggaaactgacaggcggagccgataagggtaagtttgtggccctggaaaatatcagttgtaagattaagtctggatgcgaaggccacttgccttggcctaatggaatttgcacgaagtgccagccatccgcgattacactcaaccggcagaagtaccgtcacgtagacaacattatgttcgagaaccacacagttgctgataggtttctcgacttttggagaaagactggtaatcagcactttggatacctctatggccgatacactgagcacaaggatatccctctgggtatcagggccgaggtagcagcaatttacgagcctccccaaatcgggacccaaaactctctggaactgctggaagacccaaaggccgaggtagttgacgaaatcgcggcaaagctcggcctgcggaaggttggatggatcttcaccgacttagtctcggaggacacacgaaaaggcaccgtacggtacagtcggaataaagacacctatttcctttcctcggaagagtgtattacagcaggtgatttccaaaacaaacaccccaatatgtgccgcctctcgccagacggccattttgggagtaaattcgttactgccgttgctacaggcggacctgacaaccaggtgcattttgagggttaccaggttagtaaccaatgcatggcactggtccgggacgagtgcctgctgccttgtaaggatgctcccgaattgggctacgccaaagagagctccagtgagcagtacgtcccagacgtgttctataaagacgttgacaaatttggcaatgagataacacagctagccagacctctgcccgtcgaatacttaatcattgacattacaacaacctttcccaaggaccccgtatataccttcagcatctctcagaaccccttcccgatcgagaatcgggacgtcctcggagagactcaggactttcatagcctggcaacctaccttagccagaacacaagctctgtttttctcgacacgataagtgatttccatctgcttttgtttctggtgacaaacgaagtgatgcctcttcaggatagcatcagtctgctgttagaggccgttaggacaaggaacgaagagctcgctcagacatggaaaagaagcgaacagtgggcaactatcgagcagctctgctccgaatatcctcatccattgcccagacatcctgtcgccggagcaggtgagcagcccacgttgcacagctccccgttgccagtggtgccctggatcccccatcctgcggcttcatggcaagtgcccagtgccatgcagcgggtggagactcgacctccctgtcaagccagaggtcggctgaggtag

SEQ ID NO: 317804 - DNA, 1371 bp, Artificial Sequence
  derived and/or modified sequence
atgagcttccacgcctacatccgaaaacttaccgggggagccgataaagggaagttcgtggctttggagaacattagttgtaaaatcaagtctgggtgcgaggggcatctcccttggcctaacggcatttgtacaaaatgccagcctagtgccatcacactgaataggcagaaataccgacacgttgacaatattatgtttgagaaccacacggttgctgatagattcttggacttctggcggaaaacaggaaaccagcatttcggttacctgtacggaagatacaccgagcataaggatatacccctgggaattcgagccgaagttgccgcaatctacgagcctccacagatcgggacccagaatagcttagagctcctagaagatcctaaggccgaagtggtggatgaaattgctgcgaagttaggcttgcgcaaagtgggatggatctttacggatctagtaagcgaggatacaaggaaggggacagttagatatagccgcaataaagatacttacttcctttcctccgaagaatgtataactgcgggtgatttccagaacaagcatcctaacatgtgcaggctatctcctgacggacatttcggttctaaattcgttactgctgtagcgactggcggtcccgataatcaggtccattttgaaggatatcaagtatccaaccagtgtatggctctagttagggacgaatgcctgctcccgtgtaaggatgcaccagagcttgggtacgctaaggagagctcctctgagcagtacgtgcctgacgtcttctataaggatgtagacaagtttggaaacgaaatcacccagcttgccaggcctctgccagtcgaatacctaatcattgacataaccacaacttttccaaaagaccccgtttacactttcagcatttcgcaaaatccttttccaatcgagaatcgtgacgttctgggggagacgcaggatttccactcccttgccacttacctttcccagaatacgtcaagcgtgttcctcgacactattagcgacttccatctgttgctgttcctggtaacaaatgaggtcatgcccctccaagatagcattagcttactgctggaggcagtacgcactcgtaacgaagagctcgcacagacctggaaacgcagtgaacagtgggctacaattgaacagttgtgctccgagtaccctcaccccctcccccgacatcccgtcgcaggggcaggggaacagcccacactccacagctcccctctacccgtggtgccttggataccccaccccgcagcctcatggcaggtcccttcggctatgcagcgtgtggagaccaggccaccctgccaagccaggggcaggctgcggtag

SEQ ID NO: 317805 - protein, 457 aa, Artificial Sequence
  derived and/or modified sequence
SPEDPRSKHKFKIHTYGSPTFCDHCGSLLYGLIHQGMKCDTCDMNVHKQCVINVPSLCGMDHTEKRGRIYLKAEVADEKLHVTVRDAKNLIPMDPNGLSDPYVKLKLIPDPKNESKQKTKTIRSTLNPQWNESFTFKLKPSDKDRRLSVEIWDWDRTTRNDFMGSLSFGVSELMKMPASGWYKLLNQEEGEYYNVPIPEGDEEGNMELRQKFEKAKLGPAGNKVISPSEDRKQPSNNLDRVKLTDFNFLMVLGKGSFGKVMLADRKGTEELYAIKILKKDVVIQDDDVECTMVEKRVLALLDKPPFLTQLHSCFQTVDRLYFVMEYVNGGDLMYHIQQVGKFKEPQAVFYAAEISIGLFFLHKRGIIYRDLKLDNVMLDSEGHIKIADFGMCKEHMMDGVTTRTFCGTPDYIAPEIIAYQPYGKSVDWWAYGVLLYEMLAGQVMFCYIFMFVYCCVM

SEQ ID NO: 317806 - DNA, 5675 bp, Artificial Sequence
  derived and/or modified sequence
tcacctgaggaccccaggagcaagcacaagttcaaaatccacacttacggaagccccaccttctgcgatcactgtgggtcactgctctatggacttatccatcaagggatgaaatgtgacacctgcgatatgaacgttcacaagcaatgcgtcatcaatgtccccagcctctgcggaatggatcacactgagaagagggggcggatttacctaaaggctgaggttgctgatgaaaagctccatgtcacagtacgagatgcaaaaaatctaatccctatggatccaaacgggctttcagatccttatgtgaagctgaaacttattcctgatcccaagaatgaaagcaagcaaaaaaccaaaaccatccgctccacactaaatccgcagtggaatgagtcctttacattcaaattgaaaccttcagacaaagaccgacgactgtctgtagaaatctgggactgggatcgaacaacaaggaatgacttcatgggatccctttcctttggagtttcggagctgatgaagatgccggccagtggatggtacaagttgcttaaccaagaagaaggtgagtactacaacgtacccattccggaaggggacgaggaaggaaacatggaactcaggcagaaattcgagaaagccaaacttggccctgctggcaacaaagtcatcagtccctctgaagacaggaaacaaccttccaacaaccttgaccgagtgaaactcacggacttcaatttcctcatggtgttgggaaaggggagttttggaaaggtgatgcttgccgacaggaagggcacagaagaactgtatgcaatcaaaatcctgaagaaggatgtggtgattcaggatgatgacgtggagtgcaccatggtagaaaagcgagtcttggccctgcttgacaaacccccgttcttgacgcagctgcactcctgcttccagacagtggatcggctgtacttcgtcatggaatatgtcaacggtggggacctcatgtaccacattcagcaagtaggaaaatttaaggaaccacaagcagtattctatgcggcagagatttccatcggattgttctttcttcataaaagaggaatcatttatagggatctgaagttagataacgtcatgttggattcagaaggacatatcaaaattgctgactttgggatgtgcaaggaacacatgatggatggagtcacgaccaggaccttctgtgggactccagattatatcgccccagagataatcgcttatcagccgtatggaaaatctgtggactggtgggcctatggcgtcctgttgtatgaaatgcttgccgggcaggtaatgttttgctacattttcatgtttgtttattgctgtgttatgtgaatacttcagctctggttgggcctcgagagcaagacctgacgttttagtgcagctggtgttggcgtgacttccctgacccaggcgaaagagggagaaacgcccccttcaaagtggatcacgttcagtatgcacagaaattatctctggtcatagaaactccaaattgaaagctacaacctggagtgtagacagtgtcagtttcacgttatgaaatgtacatgttggccaggcgcggtggctcatggctataatcccagcactttcagaagccaaggcaggcggatcgcctgaggtcaggagttcgagaccaccctggccaacatggcgaaaccccatctctactaaaaatacaaaaattagccaggcgtggtggtgcacatctgtaaactcagctacttgagctactgaggcatgagaattgcttaagcctgagaggcggaggctgcagtgagccaagatcgtgccactgcactgcagcctgggcaacagagtgagacggtctcaaaaaagaaaaaaatgtgcacgttgatgacagcagtggcctctaagttttcagtatcttaaaactggggttgggttatatggttccctgcaagtttgtctgcaaagattgccccagctgctgccaatgtgtgtaattagtattattatttaaggaagaagacagttaccttgaagaagtgttttaatagtttctccccatctcctcctatctcacccttggcaattcgttgtaattttcactgaagtccagtgaggctgaacatccagttaaggaaggtaaattagctttctcttatgatgtgacatgtaccagataaccatgtgccttattgcctaacatggcactttctaatataatggccttaatatctgtgtcatcagggtgaatcgtactatctgccacttctaggcctggcccctaagacatcctttatgactgtcctcatgctctaggctgaaattaggaggaattagtggagaaatctgagaccctacaagatggtggggcactgacccacaggttcattcaaggacacaggtttctcctgtccgtcagccctactaccttttagggtctcagatttctccgctaattcctcctcctttcagccgagcacagatcagttacataggatatcttaggggccggcctagaaatggcatgtatcacttctgcctaggttccactggccacttggccccagtgggacacaaagaggcaggaagtatagcatatctgagagctcagcaggggaagcaggcttggtaatcacgaagcaggcttggtaatcacccagcagatctctgccttatactaaacatgattctgccgtgggcagctttttataattcccagcactcacatgctagtgccaagacctgtgactctccatagccagaagccttagtcagagacaatggaaagagatggccatgctgtgcgacagagccacccccaaagacatctttgtttctggggaaaaagtcttcccttcccacatgttacgtccattgactcatttattcattcactcaccacgtatttattcactgaatgcttacaatgtgcatggccataaggatgaacaaaacagacgagaatccttaacttcgtgaagcttacagcttagaggaggagagacagcagacaggttagataaggaaaatgtataacacagcagaggtaagctaggaagaaaagtaataaagcaggaaagaagatagtgttgggggaggttgaaattggccagagaggataaggttaagacctaaaggaagtatggggttgtctgtgtgcatatctgttgaaagggcattccaggcagagggagccaccacgcgaaggccctaaggccagggaatgtgcagccacgtttaagaaatggaagctcccagcagggctagagcagaattgagctagagagggagggagtaggaggcctgaggccagagaggaagaggctctggatcctgttgttagcagtggtgcatccccatgaggctgcagcaacctcagttcttgcctcctcagaagaaagaatttgactgtggggcatcaggtagagtgagagcctaagacaagctgtttctgttttgttttgttttgtttttgagatggagttttgctctgttgcccaggctggagtcggtggcgcgatctcagctcactgcaccctccgcctcccaggttcaagcaattttctgcctcagcctccttagtagctgggattacaggcacctgccaacacgcttggctaatttttgtatttttagtaaagacggggtttcaccatcttggccaggctggtcctgagctcctgacctcgtgatccacccgcctcagcctcccaaagtgctgggattacaggcatgagccactgcacctggcctaagacaagttttagagaggaatgaaagttcatggaaaagctttcaagcaggagcaaaaggaagtaaagtacacttggaagagggccaagccggcgacttgagagatctagtgcactctttgacttttgacttggggttttatgcattggtgttcttccagggtcttacatctcttctcccctgattcttcccttgggttgggctgtctgcgtgcgcagtggcctgctagtgcttgggaggggcggcatgtgcagtgtgtttactggagttacgtgtgtgctcagctgaggcattcttcccttaccagtcagatgtcctagaaggtggtgtaccagttaaactccgccatgttgccttttcatgcgcgtgcttgagcccactcgcccaactcctgaaatcttattgggaagctgctgctcaccagtttcaggtgtttccctttattgggagactgcctttccttggtgctggctgcgaccaattattattttacagagagagagttaaccacctgatggtcgcctgacattcctggtgggtagggggagccctctcctgccctgcccatgtccgaacagccacctgttgtaacactgtgaccatgaacgtcatctccagatcagcggctttgcctctaggatgggaggctgtggatgatctctcctttatgtgtctttcattatatttcctaaatactgaaatggtcttgtagacattgaaagacataaagctttagcctgcatttgatcattatttctcaatggtgttaaggcttgactgacatcaaaagagtggtttattatttatttagttcccctccccccaccccaaatcaaagcattcctcttaggccaaatacgtccgggtgtaaacacagaaaggcagttcgtacacagtcaccatcagtgagtcaatggctggagaaacaggagttgtctgctcctcaagttaatttccccctctttaaaatttttacagtaaaattcggctctgaattacaggccccctaagagtcctgcttttcatgaagtcacaaaaagccaagtccccctcttgatcccacttgaatgttcagctcttgagtctggaaaacaaaccctgctttcattaagagtcacatttgcatatgctaacatgcaaaaggggctgggcggaaacgaagccaggatctgtttccgagggcgctttacaagaggtcacgtgagtagactcttggccagcaggagacaagaatttcagaacccaggtctgcaggaaagtcctcctccctcccgcagcctggcttctcccctctccaagccttcctgggatctcattcactaggggagaactcagggaatgctttcttctggcagagaagtcccctttggggggtgcattttgaagctctgccacactggcctcagacctcatttgcaaattggcctgaggtgatttacaggccttatttaaaggtttccctactaagctcacgccccctggagagcaccaggctccagctctcaatagttctgcaaactttctggcctgtttccaatatttcccacactgcttctcagagccacttagcctgccttatatgcatactttcaggtctccatcatctctattaaaaacggtgatggctgggcccggtggctcacacctgtaatcccagcacttcgggaggccgaggcgggcggatcacgaggtcaggagattgagaccatcctggctaacacagtgaaaccccatctctactaaaaatgcaaaaaaaaattagccgagtgtggtggcgggcgcctgtagtcccagctactcgggaggctgaggcaggagaatggcgtgaacccgggaggcggagcttgcagtgagccgagatcgcgccactgcactgcagcctgggcgacagagcgagactccatctc

SEQ ID NO: 317807 - DNA, 1374 bp, Artificial Sequence
  derived and/or modified sequence
agccccgaggaccccagaagcaagcacaagttcaagatccacacctacggcagccccaccttctgcgaccactgcggcagcctgctgtacggcctgatccaccagggcatgaagtgcgacacctgcgacatgaacgtgcacaagcagtgcgtgatcaacgtgcccagcctgtgcggcatggaccacaccgagaagagaggcagaatctacctgaaggccgaggtggccgacgagaagctgcacgtgaccgtgagagacgccaagaacctgatccccatggaccccaacggcctgagcgacccctacgtgaagctgaagctgatccccgaccccaagaacgagagcaagcagaagaccaagaccatcagaagcaccctgaacccccagtggaacgagagcttcaccttcaagctgaagcccagcgacaaggacagaagactgagcgtggagatctgggactgggacagaaccaccagaaacgacttcatgggcagcctgagcttcggcgtgagcgagctgatgaagatgcccgccagcggctggtacaagctgctgaaccaggaggagggcgagtactacaacgtgcccatccccgagggcgacgaggagggcaacatggagctgagacagaagttcgagaaggccaagctgggccccgccggcaacaaggtgatcagccccagcgaggacagaaagcagcccagcaacaacctggacagagtgaagctgaccgacttcaacttcctgatggtgctgggcaagggcagcttcggcaaggtgatgctggccgacagaaagggcaccgaggagctgtacgccatcaagatcctgaagaaggacgtggtgatccaggacgacgacgtggagtgcaccatggtggagaagagagtgctggccctgctggacaagccccccttcctgacccagctgcacagctgcttccagaccgtggacagactgtacttcgtgatggagtacgtgaacggcggcgacctgatgtaccacatccagcaggtgggcaagttcaaggagccccaggccgtgttctacgccgccgagatcagcatcggcctgttcttcctgcacaagagaggcatcatctacagagacctgaagctggacaacgtgatgctggacagcgagggccacatcaagatcgccgacttcggcatgtgcaaggagcacatgatggacggcgtgaccaccagaaccttctgcggcacccccgactacatcgcccccgagatcatcgcctaccagccctacggcaagagcgtggactggtgggcctacggcgtgctgctgtacgagatgctggccggccaggtgatgttctgctacatcttcatgttcgtgtactgctgcgtgatgtag

SEQ ID NO: 317808 - DNA, 1374 bp, Artificial Sequence
  derived and/or modified sequence
agccctgaggacccaaggtccaaacataaatttaagattcacacctacggctcccccaccttctgtgaccactgcggatcacttctgtatgggctgatccaccaaggaatgaaatgtgatacttgtgatatgaatgtgcacaagcagtgtgttatcaatgtcccctccctatgcggaatggatcatacagagaagcgcggccgcatctacttgaaggctgaagtggctgatgagaagctgcacgtaacagtgagagatgcgaaaaacctcattcctatggaccccaatggcctgtccgacccttatgtaaaactcaagttaattccagatcccaagaatgagtctaagcagaaaacaaagacaatcagatccactctgaatccacagtggaatgaatctttcacctttaaattaaaacccagtgacaaagacaggcggctatccgttgaaatttgggattgggaccgcaccacccgcaacgatttcatgggttcactaagcttcggcgtctcagagctcatgaaaatgccagcgtccggatggtacaagctccttaatcaagaggaaggcgagtattataatgtgccgatccctgaaggcgacgaagaggggaacatggagctccgccaaaaatttgagaaggcaaagctgggacccgctgggaataaggtcattagtcctagtgaggaccggaagcagccatctaataacctggacagggtgaaactcaccgacttcaatttcctcatggtgctgggcaagggttcttttggaaaggtgatgttagctgatcgcaaaggcactgaggagctttatgccattaaaattctcaaaaaggacgttgtgatacaggatgatgacgttgagtgtaccatggtcgaaaaaagagtgttggccctcctggataagccaccctttcttactcagctgcattcctgttttcagactgtcgacagactgtatttcgttatggagtatgtgaacggaggagatctcatgtaccacatccagcaggttggaaaatttaaggagccacaggccgtgttttatgccgccgagatctccatcggtctatttttcctccataagcggggaattatctaccgtgacttgaagctggataacgtgatgttggacagtgagggacacataaagatcgcagatttcgggatgtgcaaggaacacatgatggatggggtgactactcggacattctgcggtaccccagattacatcgcacccgaaattattgcctatcagccgtacggaaaaagcgttgattggtgggcttacggcgtactgctatatgagatgttagctggacaggtaatgttttgctacatatttatgttcgtctattgctgcgtgatgtag

SEQ ID NO: 317809 - DNA, 1374 bp, Artificial Sequence
  derived and/or modified sequence
agccctgaggaccccaggagcaagcacaagttcaagatccacacctacggcagccccaccttctgtgaccactgcggcagcctgctgtatggcctcatccaccagggcatgaagtgtgacacctgtgacatgaatgtgcacaagcagtgtgtgatcaacgtgcccagcctgtgtggcatggaccacacagagaagaggggccgcatctacctgaaggccgaggtggctgatgagaagctgcacgtgacagtgagagatgccaagaacctgatccccatggaccccaacggcctgagtgacccctacgtgaagctgaagctgatcccagaccccaagaatgaaagcaagcagaagaccaagaccatccgcagcaccctgaacccccagtggaatgaaagcttcaccttcaagctgaagcccagcgacaaggaccggcggctgtctgtggagatctgggactgggacaggaccaccagaaatgacttcatgggcagcctgagctttggagtgtctgagctgatgaagatgcctgccagcggctggtacaagctgctgaaccaggaggagggggagtactacaacgtgcccatcccagaaggagatgaggagggcaacatggagctgcggcagaagtttgagaaggccaagctgggccctgctggcaacaaggtgatcagccccagcgaggacaggaagcagcccagcaacaacctggacagagtgaagctgacagacttcaacttcctgatggtgctgggcaagggcagctttgggaaggtgatgctggccgacaggaagggcacagaggagctgtatgccatcaagatcctgaagaaggatgtggtgatccaggatgatgatgtggagtgcaccatggtggagaagagggtgctggccctgctggacaagccacccttcctgacccagctgcacagctgcttccagacagtggaccggctgtactttgtgatggagtatgtgaatggaggagacctgatgtaccacatccagcaggtgggcaagttcaaggagccccaggccgtgttctatgctgctgagatcagcatcggcctcttcttcctgcacaagaggggcatcatctacagagacctgaagctggacaacgtgatgctggacagcgagggccacatcaagattgctgactttggcatgtgcaaggagcacatgatggatggagtgaccaccaggaccttctgtggcaccccagactacatcgcccctgagatcatcgcctaccagccctacggcaagtctgtggactggtgggcctatggagtgctgctgtatgagatgctggccggccaggtgatgttctgctacatcttcatgtttgtgtactgctgcgtgatgtag

SEQ ID NO: 317810 - DNA, 1374 bp, Artificial Sequence
  derived and/or modified sequence
agccccgaggacccccggagcaagcacaagttcaagatccacacctacggatctcctactttctgtgaccactgcggttctttactgtatggcttgatacaccagggcatgaaatgtgacacctgcgacatgaacgtccacaaacagtgtgtcattaatgtgccaagtctctgtggcatggaccacactgagaaacgaggacgcatctaccttaaagccgaagttgctgacgaaaagctgcatgtcaccgttcgcgatgccaagaatcttatccctatggatcccaatggactcagtgatccctacgtcaagcttaaacttatccccgacccaaagaacgagagcaaacaaaagaccaaaactattcggtccaccctgaatccacagtggaatgaatctttcacttttaagctgaaaccctcggataaggatcggcggctcagtgtggaaatctgggattgggatcgcaccaccagaaatgactttatgggatctctctcttttggggtgtctgaacttatgaaaatgcctgcaagcggttggtacaagttgttgaatcaagaagagggggaatactacaatgtcccaattcctgagggcgatgaggaaggcaatatggaactgaggcagaaatttgagaaagcaaaactgggccccgctgggaataaagtcatcagcccgtcagaagaccgtaaacagccctccaacaacctcgatagagttaaactgacagactttaactttctcatggtactcggcaagggcagttttggaaaggtgatgctggcagaccgcaaaggcaccgaggagctctacgctattaagatccttaagaaagacgtggtaatccaggacgacgatgtggaatgtactatggtggagaagagagttctagccttactcgacaaaccgccctttctcacgcagcttcattcgtgctttcagaccgtggatcgactgtactttgtgatggaatacgtcaatggaggcgacctgatgtaccatattcaacaagtgggtaagtttaaggaaccgcaggctgtgttttatgctgccgaaatttcaatcggcttattttttcttcataagagagggattatctacagagacctcaagctcgacaacgtgatgctcgattccgaagggcatattaagatcgcagatttcggtatgtgtaaagagcatatgatggatggcgtgaccaccagaaccttctgtggcactcctgattacatcgctcccgaaattatcgcttaccaaccttacgggaagtccgtagattggtgggcctacggggtcctgttgtacgagatgttggctgggcaggtgatgttttgttacatctttatgttcgtatattgctgcgtgatgtag

SEQ ID NO: 317811 - DNA, 1374 bp, Artificial Sequence
  derived and/or modified sequence
agcccggaagacccgagatccaagcacaaatttaaaatccatacctatggcagtccaacattctgcgatcactgtggctccctgctctacggattgatccaccagggtatgaagtgtgatacctgtgacatgaacgttcataagcaatgcgtaatcaacgtgccaagtctgtgtggaatggaccacactgagaaacgaggcaggatctacctcaaagctgaggtagcggacgagaagctgcatgttacagtaagggatgcgaagaatctcatacctatggacccaaacgggctttctgacccctacgttaaactcaagctgatacccgatcccaagaacgagtccaaacagaagactaagaccattaggtcaacactcaatccacaatggaacgagagcttcacttttaaattgaagcccagcgacaaagaccgccgactgagtgttgagatttgggattgggaccgaacaaccaggaacgacttcatgggttcactgagcttcggggtgtccgagctgatgaagatgccagcatctggctggtacaaactgttaaaccaagaggagggcgaatattataacgtccctatccccgagggcgacgaagaaggcaatatggagcttcgtcagaagtttgagaaagcgaaactgggccctgccggtaataaggtcatttctccttcagaagatcgcaagcagcccagtaataacctagatagagttaaactgaccgatttcaattttcttatggtcttaggtaaaggatctttcgggaaagtgatgttggcggataggaaaggcaccgaagaactgtatgccattaagatattaaagaaggacgtcgtcattcaggatgatgacgtggaatgcacgatggtagagaaacgcgttcttgctctgcttgacaagcccccatttctcacacagctccatagctgtttccagacagtggacaggttatactttgtgatggaatacgtaaacggaggcgacctcatgtatcacattcagcaggttggcaagttcaaggagcctcaagctgtgttctatgcagcggaaatctcaatcggactattcttcctgcacaaacgcggaatcatctacagggacctgaaattggataacgtcatgttggactctgagggacatattaaaattgccgatttcggcatgtgcaaggagcacatgatggatggggttaccaccagaaccttctgtggcactcctgactatatcgcacctgagattatcgcctaccagccttatggcaaaagtgttgactggtgggcttatggcgtgctcctctatgagatgctcgcgggtcaggtgatgttctgttatatattcatgttcgtgtattgttgcgtcatgtag

SEQ ID NO: 317812 - protein, 471 aa, Artificial Sequence
  derived and/or modified sequence
MRSCLWRCRHLSQGVQWSLLLAVLVFFLFALPSFIKEPQTKPSRHQRTENIKERSLQSLAKPKSQAPTRARRTTIYAEPVPENNALNTQTQPKAHTTGDRGKEANQAPPEEQDKVPHTAQRAAWKSPEKEKTMVNTLSPRGQDAGMASGRTEAQSWKSQDTKTTQGNGGQTRKLTASRTVSEKHQGKAATTAKTLIPKSQHRMLAPTGAVSTRTRQKGVTTAVIPPKEKKPQATPPPAPFQSPTTQRNQRLKAANFKSEPRWDFEEKYSFEIGGLQTTCPDSVKIKASKSLWLQKLFLPNLTLFLDSRHFNQSEWDRLEHFAPPFGFMELNYSLVQKVVTRFPPVPQQQLLLASLPAGSLRCITCAVVGNGGILNNSHMGQEIDSHDYVFRLSGALIKGYEQDVGTRTSFYGFTAFSLTQSLLILGNRGFKNVPLGKAQTPGSFSGSPAHGQVPVAAPRLSPIHEEQVSEV

SEQ ID NO: 317813 - DNA, 1416 bp, Artificial Sequence
  derived and/or modified sequence
atgagaagctgcctgtggagatgcagacacctgagccagggcgtgcagtggagcctgctgctggccgtgctggtgttcttcctgttcgccctgcccagcttcatcaaggagccccagaccaagcccagcagacaccagagaaccgagaacatcaaggagagaagcctgcagagcctggccaagcccaagagccaggcccccaccagagccagaagaaccaccatctacgccgagcccgtgcccgagaacaacgccctgaacacccagacccagcccaaggcccacaccaccggcgacagaggcaaggaggccaaccaggccccccccgaggagcaggacaaggtgccccacaccgcccagagagccgcctggaagagccccgagaaggagaagaccatggtgaacaccctgagccccagaggccaggacgccggcatggccagcggcagaaccgaggcccagagctggaagagccaggacaccaagaccacccagggcaacggcggccagaccagaaagctgaccgccagcagaaccgtgagcgagaagcaccagggcaaggccgccaccaccgccaagaccctgatccccaagagccagcacagaatgctggcccccaccggcgccgtgagcaccagaaccagacagaagggcgtgaccaccgccgtgatcccccccaaggagaagaagccccaggccacccccccccccgcccccttccagagccccaccacccagagaaaccagagactgaaggccgccaacttcaagagcgagcccagatgggacttcgaggagaagtacagcttcgagatcggcggcctgcagaccacctgccccgacagcgtgaagatcaaggccagcaagagcctgtggctgcagaagctgttcctgcccaacctgaccctgttcctggacagcagacacttcaaccagagcgagtgggacagactggagcacttcgccccccccttcggcttcatggagctgaactacagcctggtgcagaaggtggtgaccagattcccccccgtgccccagcagcagctgctgctggccagcctgcccgccggcagcctgagatgcatcacctgcgccgtggtgggcaacggcggcatcctgaacaacagccacatgggccaggagatcgacagccacgactacgtgttcagactgagcggcgccctgatcaagggctacgagcaggacgtgggcaccagaaccagcttctacggcttcaccgccttcagcctgacccagagcctgctgatcctgggcaacagaggcttcaagaacgtgcccctgggcaaggcccagacccccggcagcttcagcggcagccccgcccacggccaggtgcccgtggccgcccccagactgagccccatccacgaggagcaggtgagcgaggtgtag

SEQ ID NO: 317814 - DNA, 1416 bp, Artificial Sequence
  derived and/or modified sequence
atgcggagttgtctgtggagatgtagacatcttagccagggagtgcagtggtctctcctgttggccgtgcttgtgttttttctttttgcactgccaagcttcatcaaggagcctcagaccaagccgagccggcaccaaaggacagaaaatatcaaagagagaagtttacagagtttagccaagccaaaaagccaggccccgacccgagcccgccgcactaccatttacgcagagcccgtccctgaaaacaatgcccttaatactcagacccagccaaaggcacacactactggggatcgagggaaagaggctaaccaggcgcccccagaagagcaggataaagtcccccatacagcacagcgcgccgcatggaaatcaccagagaaagaaaagactatggtgaacacactctcccctcgagggcaggacgccggcatggcctccggtcgtactgaggcacagagttggaagtcacaggacactaaaacaacgcaaggaaacggagggcagacgcgaaaactgactgcctctcggactgtgtctgaaaaacatcaaggcaaggctgccaccactgcaaaaaccctcattcccaaatctcagcaccggatgttggcgcctacaggggcagtctccaccaggacacggcaaaaaggcgtgacaacagccgtgattccgcctaaggagaagaagccacaagctactcccccaccagcacccttccagtcccctacgactcaacgcaaccagaggctgaaggctgccaacttcaaatctgagccccggtgggacttcgaggagaagtactcgttcgaaattgggggacttcagaccacctgtcccgacagtgtgaaaattaaggcttccaagagcctctggcttcaaaaacttttcctccctaacctcacactgtttctggactcgagacatttcaatcaatcggagtgggatagactggaacattttgcacccccattcggcttcatggaactgaactattcactggtgcaaaaagtcgttacccggttccctcctgtcccccagcaacaattgctcctggcgagcctcccggcaggatcactgagatgcattacttgtgcggtggttggcaacggcggcatcctaaataacagccatatgggccaggagattgactcccatgactatgtattccgtctatctggcgctcttatcaaagggtacgagcaggacgtgggcacccgcactagtttttacggattcaccgctttctctctcacccagtcactgctcattctgggtaaccggggatttaaaaatgtccctctgggaaaggctcagacccctgggtctttctcaggatcccccgcgcacggccaggttccagtggctgctccaagactgtctcccattcacgaagaacaggtcagcgaagtgtag

SEQ ID NO: 317815 - DNA, 1416 bp, Artificial Sequence
  derived and/or modified sequence
atgaggagctgcctgtggcgctgccgccacctgagccagggcgtgcagtggagcctgctgctggccgtgctggtgttcttcctgtttgccctgcccagcttcatcaaggagccccagaccaagcccagccgccaccagaggacagagaacatcaaggagaggagcctgcagagcctggccaagcccaagagccaggcccccacccgggcccggaggaccaccatctatgcagagcctgtgcctgagaacaatgccctgaacacccagacccagcccaaggcccacaccactggagaccggggcaaggaggccaaccaggcccctcctgaggagcaggacaaggtgccccacacagcccagagagctgcctggaagagccctgagaaggagaagaccatggtgaacaccctgagcccccggggccaggatgctggcatggccagcggccgcacagaggcccagagctggaagagccaggacaccaagaccacccagggcaatggaggccagaccaggaagctgacagccagcaggacagtgtctgagaagcaccagggcaaggccgccaccacagccaagaccctcatccccaagagccagcacaggatgctggcccccactggagctgtgtccaccaggacccggcagaagggcgtgaccacagctgtgattcctcccaaggagaagaagccccaggccaccccacctccagcccccttccagagccccaccacccagaggaaccagaggctgaaggccgccaacttcaagtctgagccccgctgggactttgaggagaagtacagctttgagatcggcggcctgcagaccacctgcccagacagcgtgaagatcaaggccagcaagagcctgtggctgcagaagctgttcctgcccaacctgaccctcttcctggacagccgccacttcaaccagagcgagtgggaccggctggagcactttgcccccccatttggcttcatggagctgaactacagcctggtgcagaaggtggtgacccgcttcccccctgtgccccagcagcagctgctgctggccagcctgcctgctggcagcctgcgctgcatcacctgtgctgtggtgggcaatggaggcatcctgaacaacagccacatgggccaggagattgacagccatgactatgtgttccggctgagcggggccctgatcaagggctatgagcaggatgtgggcaccaggaccagcttctacggcttcaccgccttcagcctgacccagagcctgctgatcctgggcaacagaggcttcaagaatgtgcccctgggcaaggcccagaccccaggcagcttcagcggcagccctgcccacggccaggtgcctgtggccgccccccggctgagccccatccacgaggagcaggtgtctgaggtgtag

SEQ ID NO: 317816 - DNA, 1416 bp, Artificial Sequence
  derived and/or modified sequence
atgcggagctgcctgtggcggtgccggcacctgagccagggcgtgcaatggtctctgttgctggctgtgctggtgttctttctgtttgctttgccatcatttattaaagaaccccaaacaaagcctagtcggcatcagaggacagaaaatatcaaagaacgtagcctgcagtcactggcgaagcctaaaagccaggcccctacacgggccagaaggacgaccatctatgccgagcctgtaccagagaataacgcactcaatacacagactcagccgaaagcgcacaccacaggagatagaggaaaggaagccaaccaggcaccacccgaggagcaggataaagtcccccatacagcccagcgtgctgcatggaaatcgccagagaaggaaaagactatggtgaatactctgtcaccccgcggccaggatgcgggaatggctagcggacggacagaggctcagagctggaagagccaggatacaaagacaacacaaggaaacggcgggcagactcggaaactgacggcctctcggaccgtgtccgagaaacatcaagggaaggccgcgaccactgctaaaacccttattcccaagtcacagcataggatgctcgccccgacaggggccgtcagcaccagaaccaggcaaaaaggtgtgacgaccgctgtgatcccccctaaagagaagaaacctcaagcaacaccccccccagctccttttcaaagtcccacaacacagcgaaaccagaggctcaaggccgccaattttaaatctgagccaagatgggattttgaggaaaaatactcgttcgaaataggcggtctgcagaccacttgtcccgactcagtaaagatcaaggccagcaagtcgctttggctccaaaagctgtttctgcccaatctcactttgtttctagattctcgacatttcaaccagtcagaatgggatcgcctcgagcatttcgccccgccttttggcttcatggagctgaactactcactggttcagaaggtcgttacacggttcccaccagtgccgcagcagcaactacttctcgcctctctgcctgcaggctcactgcggtgtatcacatgcgcagtggtaggtaatggcgggattctcaataatagccatatgggccaggaaatcgattcccacgattacgtgttccgtctatctggtgctttgataaagggatacgaacaggatgttggcacgcgcaccagtttctacggctttactgcattttctctgacccagtcgctcctgatcctgggtaatcgaggctttaaaaacgttccccttggcaaggcccaaactcctggttccttctctggtagtcccgcacacggacaagtcccggtcgccgctcctcgcctaagccctatacatgaagagcaggtttctgaagtgtag

SEQ ID NO: 317817 - DNA, 1416 bp, Artificial Sequence
  derived and/or modified sequence
atgaggtcatgtctgtggcgctgccgacatctctcccagggagtacagtggagcctgttgctcgcagtgctggttttctttcttttcgctctacccagcttcatcaaagaaccgcagaccaaaccatctagacaccagcgaacagagaacatcaaggagagatcccttcagagcctggcaaaacccaagagtcaggcccctacgcgtgccaggaggacaacaatctacgccgaacccgttcctgagaacaatgctctaaatacgcaaacacaacctaaagcgcataccactggcgatcgaggtaaggaagcgaaccaggcccctcctgaggaacaggacaaggttccacatactgcccaaagggcggcttggaagtcaccagagaaggagaagaccatggttaatacactatcaccgaggggccaagacgccggtatggcatcaggacgtacagaggcccaaagctggaaatcacaggatacaaagactacacaaggcaacggcggtcagacacgcaaactgaccgcctctagaaccgtgtcagagaagcaccagggtaaagctgccactactgcaaaaactttaatccccaaatcacaacaccggatgctggccccaaccggagctgtttcgactcggacgcgccagaagggggtcacgactgctgtgattccacccaaggagaaaaaaccacaggcaacaccaccgccagccccttttcagtcacctacgacacagagaaatcagcggctgaaagccgctaactttaagtcggagcccaggtgggatttcgaggagaagtattcttttgaaatcggaggtctccagactacatgccccgactccgtgaaaattaaggctagtaagtctctatggctgcaaaaactatttctgccaaacctgactttgtttcttgactccagacattttaaccagtccgagtgggaccggctggagcacttcgctcccccttttgggttcatggaattgaattacagcctagtgcagaaggtagttacccgcttcccaccggtaccgcagcagcagctgttgctcgctagcctcccagcagggtccctcaggtgtataacctgtgctgtggtgggaaatggagggattctcaacaattcgcacatggggcaggagattgattcccatgattacgtttttcggctgagtggagcccttattaaaggatacgagcaggacgtaggcacacgaacatccttctatggctttacagctttctcactgacgcaatcattgctcattctcggcaatcgaggcttcaagaacgtgcccctggggaaggcgcagactcccggttccttctccggctcccccgctcacggacaggtccccgtggcagctccacgtctgagcccaattcacgaagagcaagtgagtgaagtatag

SEQ ID NO: 317818 - protein, 416 aa, Artificial Sequence
  derived and/or modified sequence
MFSVFEEITRIVVKEMDAGGDMIAVRSLVDADRFRCFHLVGEKRTFFGCRHYTTGLTLMDILDTDGDKWLDELDSGLQGQKAEFQILDNVDSTGELIVRLPKEITISGSFQGFHHQKIKISENRISQQYLATLENRKLKRELPFSFRSINTRENLYLVTETLETVKEETLKSDRQYKFWSQISQGHLSYKHKGQREVTIPPNRVLSYRVKQLVFPNKETMNIHFRGKTKSFPEEKDGASSCLGKSLGSEDSRNMKEKLEDMESVLKDLTEEKRKDVLNSLAKCLGKEDIRQDLEQRVSEVLISGELHMEDPDKPLLSSLFNAAGVLVEARAKAILDFLDALLELSEEQQFVAEALEKGTLPLLKDQVKSVMEQNWDELASSPPDMDYDPEARILCALYVVVSILLELAEGPTSVSS

SEQ ID NO: 317819 - protein, 348 aa, Artificial Sequence
  derived and/or modified sequence
  misc_feature (1)..(1): Xaa can be any naturally occurring amino acid
XLDELDSGLQGQKAEFQILDNVDSTGELIVRLPKEITISGSFQGFHHQKIKISENRISQQYLATLENRKLKRELPFSFRSINTRENLYLVTETLETVKEETLKSDRQYKFWSQISQGHLSYKHKGQREVTIPPNRVLSYRVKQLVFPNKETMNIHFRGKTKSFPEEKDGASSCLGKSLGSEDSRNMKEKLEDMESVLKDLTEEKRKDVLNSLAKCLGKEDIRQDLEQRVSEVLISGELHMEDPDKPLLSSLFNAAGVLVEARAKAILDFLDALLELSEEQQFVAEALEKGTLPLLKDQVKSVMEQNWDELASSPPDMDYDPEARILCALYVVVSILLELAEGPTSVSS

SEQ ID NO: 317820 - DNA, 1251 bp, Artificial Sequence
  derived and/or modified sequence
atgttttccgtctttgaggagataacacgtatcgtggttaaggagatggacgccggaggggacatgattgcggttaggtcacttgtcgatgccgatcggtttcggtgctttcacctggtcggagagaagcgcacgttctttgggtgtcggcactacacgactgggctgactctaatggacattctggatacggacggggacaagtggctggacgagctggacagcggacttcaggggcagaaagctgaatttcagattctggacaatgttgattcaactggcgagctgatcgtaagactgccgaaggagatcactatcagcggatctttccaggggttccatcaccagaaaattaaaatctctgagaatcgtatctcccagcagtaccttgctacactagagaatcggaagctgaagcgcgaattgccttttagtttccgttccatcaacacccgtgaaaatctctacctggtcacggagaccctcgaaaccgtcaaggaggagaccttaaagagtgatcggcagtataaattctggtcacagatctcccaagggcacctaagctacaaacataaggggcaaagagaggtgaccatacctccaaacagagtgttgtcctacagggtaaagcagctcgttttccctaacaaggaaactatgaacattcatttccgggggaagaccaagtcattccctgaggagaaggatggagcctcatcctgccttgggaagtccttaggtagcgaggatagcaggaatatgaaagaaaagctggaggatatggagtcagtcttaaaagacctgactgaggagaaacgaaaggatgtgctgaacagtctagccaaatgtcttggcaaagaagacatccggcaagacttagaacagagagtaagtgaggtgctgataagcggcgaactgcatatggaagaccccgataagccgcttctgtccagcttgttcaatgctgcaggggtcctggtggaagcacgggcgaaggccattctggattttttggacgccctgctcgagctatcggaggagcagcagttcgtggcagaggccctcgaaaagggcaccctgccactcctgaaagaccaggtcaaatccgttatggagcagaattgggacgagctggcgtcgtcgccacccgacatggactacgatccagaagcccggatcctgtgcgccctatatgttgtagtctcaattttgttggagctcgcagagggaccaacatcggtctctagctag

SEQ ID NO: 317821 - DNA, 1047 bp, Artificial Sequence
  derived and/or modified sequence
tagctggatgagctggacagcggattacaggggcagaaagccgagtttcagatcctggataacgttgactccacaggggaactcatagtgcgattgccaaaggagatcacgattagcggctctttccagggctttcatcatcagaagataaagatttctgaaaatcggatctcacaacaatatttggcaacactggagaacagaaaattgaaaagagagttacccttttccttcagatccattaatacacgggagaatctgtacctggttaccgagaccctggagaccgtcaaggaagagaccctgaagtcagacaggcagtataagttttggagccagatttcgcagggccacctcagttacaaacacaaggggcaaagagaggtcacgatcccacctaatcgcgtactgtcctaccgcgtgaagcagctggtcttccccaacaaggagactatgaatattcactttaggggaaagaccaaaagttttcctgaagaaaaggacggagcctccagctgcctcggaaagtctctgggatccgaagacagcagaaatatgaaagagaagttggaagacatggagtccgtcctcaaagacctaactgaggagaagagaaaagacgtcctgaattccctggctaaatgcctgggaaaagaggacatcagacaggatctggaacagagggtgagcgaggttctgattagtggggagctgcacatggaagacccagacaagcccctgttatccagtctctttaatgcagccggggtgctggttgaggcaagggcaaaggcaattctggacttcctcgacgcgctcttggagctgtcagaggagcagcagttcgttgctgaagctttagaaaaaggaaccttgcctctcctcaaagatcaggtgaagtcagtcatggagcagaactgggatgagctggcttcttcccctccagatatggactatgatccggaggccagaattctttgtgctttgtatgtcgtggtgtccatcctactggagctggccgaaggaccaacttctgtgtcgtcctag

SEQ ID NO: 317822 - DNA, 1597 bp, Artificial Sequence
  derived and/or modified sequence
acaactttcagtttcattattttagcttcctgagattcagaggccaggaactgtgcagagatctgtggggattctcacaacttccatttctggtgaacagctgaggtcagagaggagttggtccaggcgcaatgttcagcgtatttgaggaaatcacaagaattgtagttaaggagatggatgctggaggggatatgattgccgttagaagccttgttgatgctgatagattccgctgcttccatctggtgggggagaagagaactttctttggatgccggcactacacaacaggcctcaccctgatggacattctggacacagatggggacaagtggttagatgaactggattctgggctccaaggtcaaaaggctgagtttcaaattctggataatgtagactcaacgggagagttgatagtgagattacccaaagaaataacaatttcaggcagtttccagggcttccaccatcagaaaatcaagatatcggagaaccggatatcccagcagtatctggctacccttgaaaacaggaagctgaagagggaactacccttttcattccgatcaattaatacgagagaaaacctgtatctggtgacagaaactctggagacggtaaaggaggaaaccctgaaaagcgaccggcaatataaattttggagccagatctctcagggccatctcagctataaacacaagggccaaagggaagtgaccatccccccaaatcgggtcctgagctatcgagtaaagcagcttgtcttccccaacaaggagacgatgaatattcatttcaggggcaaaacaaaatcctttccagaagagaaggatggtgcttcatcctgtttaggaaagtctttgggttcggaggattccagaaacatgaaggagaagttggaggacatggagagtgtcctcaaggacctgacagaggagaagagaaaagatgtgctaaactccctcgctaagtgcctcggcaaggaggatattcggcaggatctagagcaaagagtatctgaggtcctgatttccggggagctacacatggaggacccagacaagcctctcctaagcagcctttttaatgctgctggggtcttggtagaagcgcgtgcaaaagccattctggacttcctggatgccctgctagagctgtctgaagagcagcagtttgtggctgaggccctggagaaggggacccttcctctgttgaaggaccaggtgaaatctgtcatggagcagaactgggatgagctggccagcagtcctcctgacatggactatgaccctgaggcacgaattctctgtgcgctgtatgttgttgtctctatcctgctggagctggctgaggggcctacctctgtctcttcctaactacaaaagccctttctccccacaagcctctgggttttccctttaccagtctgtcctcactgccatcgccactaccatcctgtcaccagtgggacctctttaaaacaagcagccaaccattctttgatgtatcccattcgctccatgttaacatccaaaaccagcctggatttcatacatggacttctgattaaaagtggcaggttgtgcatgtt

SEQ ID NO: 317823 - DNA, 1263 bp, Artificial Sequence
  derived and/or modified sequence
ggttagatgaactggattctgggctccaaggtcaaaaggctgagtttcaaattctggataatgtagactcaacgggagagttgatagtgagattacccaaagaaataacaatttcaggcagtttccagggcttccaccatcagaaaatcaagatatcggagaaccggatatcccagcagtatctggctacccttgaaaacaggaagctgaagagggaactacccttttcattccgatcaattaatacgagagaaaacctgtatctggtgacagaaactctggagacggtaaaggaggaaaccctgaaaagcgaccggcaatataaattttggagccagatctctcagggccatctcagctataaacacaagggccaaagggaagtgaccatccccccaaatcgggtcctgagctatcgagtaaagcagcttgtcttccccaacaaggagacgatgaatattcatttcaggggcaaaacaaaatcctttccagaagagaaggatggtgcttcatcctgtttaggaaagtctttgggttcggaggattccagaaacatgaaggagaagttggaggacatggagagtgtcctcaaggacctgacagaggagaagagaaaagatgtgctaaactccctcgctaagtgcctcggcaaggaggatattcggcaggatctagagcaaagagtatctgaggtcctgatttccggggagctacacatggaggacccagacaagcctctcctaagcagcctttttaatgctgctggggtcttggtagaagcgcgtgcaaaagccattctggacttcctggatgccctgctagagctgtctgaagagcagcagtttgtggctgaggccctggagaaggggacccttcctctgttgaaggaccaggtgaaatctgtcatggagcagaactgggatgagctggccagcagtcctcctgacatggactatgaccctgaggcacgaattctctgtgcgctgtatgttgttgtctctatcctgctggagctggctgaggggcctacctctgtctcttcctaactacaaaagccctttctccccacaagcctctgggttttccctttaccagtctgtcctcactgccatcgccactaccatcctgtcaccagtgggacctctttaaaacaagcagccaaccattctttgatgtatcccattcgctccatgttaacatccaaaaccagcctggatttcatacatggacttctgattaaaagtggcaggttgtgcatgttaa

SEQ ID NO: 317824 - DNA, 1251 bp, Artificial Sequence
  derived and/or modified sequence
atgttttctgtgtttgaggagatcaccagaattgtggtgaaggagatggatgctggaggagacatgattgctgtgcgcagcctggtggatgctgaccgcttccgctgcttccacctggtgggggagaagaggaccttcttcggctgccgccactacaccaccggcctgaccctgatggacatcctggacacagatggagacaagtggctggatgagctggacagcggcctgcagggccagaaggccgagttccagatcctggacaacgtggacagcactggagagctgattgtgcggctgcccaaggagatcaccatcagcggcagcttccagggcttccaccaccagaagatcaagatcagcgagaaccgcatcagccagcagtacctggccaccctggagaacaggaagctgaagcgggagctgcccttctccttccgcagcatcaacaccagagaaaatctctacctggtgacagagaccctggagaccgtgaaggaggagaccctgaagagtgaccggcagtacaagttctggagccagatcagccagggccacctgagctacaagcacaagggccagcgggaggtgaccatcccccccaacagagtgctgagctacagagtgaagcagctggtgttccccaacaaggagaccatgaacatccacttccggggcaagaccaagagcttccctgaggagaaggatggagccagcagctgcctgggcaagagcctgggcagcgaggacagcaggaacatgaaggagaagctggaggacatggagagcgtgctgaaggacctgacagaggagaagaggaaggatgtgctgaacagcctggccaagtgcctgggcaaggaggacatccggcaggacctggagcagagggtgtctgaggtgctgatctctggagagctgcacatggaggaccctgacaagcccctgctgagcagcctcttcaatgctgctggggtgctggtggaggcccgggccaaggccatcctggacttcctggatgccctgctggagctgtctgaggagcagcagtttgtggccgaggccctggagaagggcaccctgcccctgctgaaggaccaggtgaagtctgtgatggagcagaactgggatgagctggccagcagccccccagacatggactatgaccctgaggcccgcatcctgtgtgccctgtatgtggtggtgtccatcctgctggagctggccgagggccccacctctgtgagcagctag

SEQ ID NO: 317825 - DNA, 1047 bp, Artificial Sequence
  derived and/or modified sequence
tgactggatgagctggacagcggcctgcagggccagaaggccgagttccagatcctggacaacgtggacagcactggagagctgattgtgcggctgcccaaggagatcaccatcagcggcagcttccagggcttccaccaccagaagatcaagatcagcgagaaccgcatcagccagcagtacctggccaccctggagaacaggaagctgaagcgggagctgcccttctccttccgcagcatcaacaccagagaaaatctctacctggtgacagagaccctggagaccgtgaaggaggagaccctgaagagtgaccggcagtacaagttctggagccagatcagccagggccacctgagctacaagcacaagggccagcgggaggtgaccatcccccccaacagagtgctgagctacagagtgaagcagctggtgttccccaacaaggagaccatgaacatccacttccggggcaagaccaagagcttccctgaggagaaggatggagccagcagctgcctgggcaagagcctgggcagcgaggacagcaggaacatgaaggagaagctggaggacatggagagcgtgctgaaggacctgacagaggagaagaggaaggatgtgctgaacagcctggccaagtgcctgggcaaggaggacatccggcaggacctggagcagagggtgtctgaggtgctgatctctggagagctgcacatggaggaccctgacaagcccctgctgagcagcctcttcaatgctgctggggtgctggtggaggcccgggccaaggccatcctggacttcctggatgccctgctggagctgtctgaggagcagcagtttgtggccgaggccctggagaagggcaccctgcccctgctgaaggaccaggtgaagtctgtgatggagcagaactgggatgagctggccagcagccccccagacatggactatgaccctgaggcccgcatcctgtgtgccctgtatgtggtggtgtccatcctgctggagctggccgagggccccacctctgtgagcagctag

SEQ ID NO: 317826 - DNA, 1251 bp, Artificial Sequence
  derived and/or modified sequence
atgttcagcgtgttcgaggagatcacccggatcgtggtgaaggagatggatgccgggggagatatgatcgccgtcaggtccctggtagatgccgatcgtttcaggtgtttccatctggtgggggaaaaacgcacatttttcggctgtcggcactacaccaccgggcttacattgatggacatcctcgatactgacggtgataagtggctggacgagctggatagcggtctgcaggggcagaaagcggagttccagatcctggacaatgtcgacagcacaggtgaactgatagtgaggctgcctaaagaaattactatctctggaagcttccagggattccatcatcagaagatcaagatctccgagaatcggatctcccagcagtaccttgctaccttggagaaccgtaagctgaagagggagctgcccttctctttcaggtcaattaatacacgagagaatctctacctggtaacagaaaccttggagactgtcaaggaagagacactaaaaagtgacaggcagtacaaattctggtctcaaatctcccaagggcatctgtcttataaacataagggccagagggaggtgacaatcccccccaatagggtcctttcttatcgggtgaagcagcttgtcttccccaataaggagactatgaacattcactttcgtgggaagactaagagcttccctgaagaaaaggacggggcctcctcatgtttgggaaaatccctgggatcggaagatagcagaaacatgaaagagaaactggaggatatggaaagtgtcctaaaggatctgacagaggaaaaacgcaaggacgtgctcaattccttggcaaagtgtctcgggaaagaagacatccgccaggacctcgagcagagagtctcggaagttcttatcagcggcgaacttcacatggaagatccagataagcctttattatctagcctcttcaacgcggcgggcgtccttgtagaggcccgggccaaagcgatccttgacttccttgacgcactgctggagctctctgaggaacaacaatttgtggctgaagccttagaaaagggaacactccccctgctgaaagatcaagtaaaaagcgtcatggagcaaaactgggacgagctcgcctccagccccccagacatggattacgacccagaagctcggatattgtgtgctttgtacgttgtggtctccattctgttagaacttgccgaaggacctacatctgttagtagttag

SEQ ID NO: 317827 - DNA, 1047 bp, Artificial Sequence
  derived and/or modified sequence
tgactggacgagctggacagcggcctgcagggccagaaggccgagttccagattctggataacgtcgactcaactggcgagctcattgttaggctccccaaggagatcactatctccgggagcttccagggctttcaccaccaaaagatcaaaatttctgagaacagaatctcccagcagtatctggctacactcgagaacaggaaactgaagagagagctacccttcagctttcggtccattaacaccagggaaaacctttatctggtgacggagacacttgagacagttaaagaagagacactaaagagcgaccgtcagtacaagttttggtcacagatttctcaagggcacctctcttacaagcacaagggacagcgggaagttactatccctccaaatcgcgtactctcttatcgggtcaagcagctcgtgtttcccaacaaggaaactatgaacatccacttcaggggaaagacaaaatccttccccgaagaaaaggacggagcatcatcttgtctgggaaaaagcttgggaagcgaagattctaggaacatgaaagaaaagttagaggatatggagagcgtgttaaaggacctgacggaagaaaagcggaaagacgtcctgaacagtctggcaaaatgcctcgggaaagaagacattcgacaggacttggaacagcgggtttctgaggttctgatttccggcgaactgcacatggaggatcccgacaagcctcttcttagctcgctctttaacgctgctggagtcctggtcgaagcgagggctaaggcgatcttggactttctagacgcactgctcgaactgtccgaagagcagcaatttgtggcggaggcgctggagaaaggaactctgcccttacttaaagatcaagtgaaatctgtgatggagcagaactgggacgaactggcctcctcacctcctgatatggactatgaccccgaagcacgaattctgtgcgccctgtacgtcgtcgtctcaatcttacttgaacttgcagaaggacctacctcagttagctcttag

SEQ ID NO: 317828 - DNA, 1251 bp, Artificial Sequence
  derived and/or modified sequence
atgtttagtgtgttcgaggaaatcacaagaattgtagtgaaggagatggacgcaggtggagacatgatcgctgtacgatctcttgtcgacgccgaccggtttagatgttttcatctcgtgggggagaaaagaacctttttcggctgtcgccactacacgactggccttactctaatggacatcttagatacagacggagacaagtggcttgacgaactcgactccgggctgcagggccagaaagcagaattccaaatcctggataacgtggactctacaggcgaattaattgtaaggctgccaaaagagattaccatatctgggtcattccagggctttcaccaccagaaaattaagatttccgaaaacaggatctcgcaacagtacctggcgacccttgaaaacaggaaacttaagcgggagctgccctttagttttcgttctattaataccagagagaacctatatctggtgaccgagacactggaaactgtgaaggaagagactctgaagtcagatcgccagtacaagttttggagccaaatctcccagggccacctcagttataaacataaaggacaaagagaggtgacaattcccccaaaccgggttctgagttaccgtgtcaagcagttggttttcccgaacaaagagacaatgaacattcatttccgagggaagacaaagtcttttccagaggagaaagacggagcaagctcatgtttgggtaaatctctcggctcagaagacagcaggaatatgaaggagaagctggaggatatggagagcgtgttgaaagatctgaccgaggagaaacggaaggatgtgctcaattctcttgcaaaatgtctcggaaaggaggatatacgccaggatctggaacagcgagtgtccgaggtcctgataagcggagagctgcatatggaggatccagataagcccctgctgagcagtctgttcaacgccgctggggtcttggtggaggccagggcaaaggcaattctcgactttctcgacgccctcctggagctgtcagaagagcagcagttcgtggccgaggctctggagaaaggtacacttccgctgctaaaggatcaagtgaagtccgttatggaacagaattgggatgaattagccagctctcccccagacatggactatgaccctgaggctcggattctgtgcgcattatacgtcgtggtcagcatcctgctggagcttgctgaaggccctactagtgtgtccagttag

SEQ ID NO: 317829 - DNA, 1047 bp, Artificial Sequence
  derived and/or modified sequence
taacttgacgagctggattctggcttgcagggccagaaagctgaattccagattctcgacaatgtggactcgactggagagcttattgtgaggctccccaaggaaattaccatcagcgggtcgttccagggatttcaccaccaaaagatcaaaatttccgaaaaccgtattagccagcaatatctggccacattggagaacaggaagcttaaacgtgagctaccattctcctttaggtcaatcaatactcgagagaacctgtatcttgtgacagaaactttggagacagttaaggaggagacgttaaaatctgacagacagtacaagttttggagccagatcagtcagggccacctgtcatacaaacacaagggacagcgcgaagttaccatcccacccaatcgggtgctgtcataccgtgtgaagcagctggtgttcccaaacaaggaaactatgaatattcatttccgtggaaaaacaaaaagcttccccgaggaaaaggacggggctagctcgtgtctgggaaaatcccttggatcagaggactcaaggaacatgaaggagaaactggaagatatggagtcagtcctgaaggacctcactgaggagaagcggaaggatgtgctgaattctctggcgaaatgccttggcaaggaggacatacgacaggacctcgaacagcgggtgtcggaggttctcatcagcggggagctccatatggaagaccccgacaagccactcctgagctccttattcaatgccgctggagtgcttgtggaagcccgagcaaaggctattctagactttttagacgctttattggagctttcagaggaacagcaattcgttgccgaagcactggaaaagggaactttaccactgctgaaggaccaagtgaaaagcgttatggagcagaattgggacgagctggcctcatctccaccagacatggattacgatcccgaagccagaatcctgtgtgccctatatgtcgtggtaagtattctgctggagctggcagagggaccaacctctgtgagtagctag

SEQ ID NO: 317830 - DNA, 1251 bp, Artificial Sequence
  derived and/or modified sequence
atgttcagcgtgttcgaggagatcaccagaatcgtggtgaaggagatggacgccggcggcgacatgatcgccgtgagaagcctggtggacgccgacagattcagatgcttccacctggtgggcgagaagagaaccttcttcggctgcagacactacaccaccggcctgaccctgatggacatcctggacaccgacggcgacaagtggctggacgagctggacagcggcctgcagggccagaaggccgagttccagatcctggacaacgtggacagcaccggcgagctgatcgtgagactgcccaaggagatcaccatcagcggcagcttccagggcttccaccaccagaagatcaagatcagcgagaacagaatcagccagcagtacctggccaccctggagaacagaaagctgaagagagagctgcccttcagcttcagaagcatcaacaccagagagaacctgtacctggtgaccgagaccctggagaccgtgaaggaggagaccctgaagagcgacagacagtacaagttctggagccagatcagccagggccacctgagctacaagcacaagggccagagagaggtgaccatcccccccaacagagtgctgagctacagagtgaagcagctggtgttccccaacaaggagaccatgaacatccacttcagaggcaagaccaagagcttccccgaggagaaggacggcgccagcagctgcctgggcaagagcctgggcagcgaggacagcagaaacatgaaggagaagctggaggacatggagagcgtgctgaaggacctgaccgaggagaagagaaaggacgtgctgaacagcctggccaagtgcctgggcaaggaggacatcagacaggacctggagcagagagtgagcgaggtgctgatcagcggcgagctgcacatggaggaccccgacaagcccctgctgagcagcctgttcaacgccgccggcgtgctggtggaggccagagccaaggccatcctggacttcctggacgccctgctggagctgagcgaggagcagcagttcgtggccgaggccctggagaagggcaccctgcccctgctgaaggaccaggtgaagagcgtgatggagcagaactgggacgagctggccagcagcccccccgacatggactacgaccccgaggccagaatcctgtgcgccctgtacgtggtggtgagcatcctgctggagctggccgagggccccaccagcgtgagcagctag

SEQ ID NO: 317831 - DNA, 1047 bp, Artificial Sequence
  derived and/or modified sequence
tgactggacgagctggacagcggcctgcagggccagaaggccgagttccagatcctggacaacgtggacagcaccggcgagctgatcgtgagactgcccaaggagatcaccatcagcggcagcttccagggcttccaccaccagaagatcaagatcagcgagaacagaatcagccagcagtacctggccaccctggagaacagaaagctgaagagagagctgcccttcagcttcagaagcatcaacaccagagagaacctgtacctggtgaccgagaccctggagaccgtgaaggaggagaccctgaagagcgacagacagtacaagttctggagccagatcagccagggccacctgagctacaagcacaagggccagagagaggtgaccatcccccccaacagagtgctgagctacagagtgaagcagctggtgttccccaacaaggagaccatgaacatccacttcagaggcaagaccaagagcttccccgaggagaaggacggcgccagcagctgcctgggcaagagcctgggcagcgaggacagcagaaacatgaaggagaagctggaggacatggagagcgtgctgaaggacctgaccgaggagaagagaaaggacgtgctgaacagcctggccaagtgcctgggcaaggaggacatcagacaggacctggagcagagagtgagcgaggtgctgatcagcggcgagctgcacatggaggaccccgacaagcccctgctgagcagcctgttcaacgccgccggcgtgctggtggaggccagagccaaggccatcctggacttcctggacgccctgctggagctgagcgaggagcagcagttcgtggccgaggccctggagaagggcaccctgcccctgctgaaggaccaggtgaagagcgtgatggagcagaactgggacgagctggccagcagcccccccgacatggactacgaccccgaggccagaatcctgtgcgccctgtacgtggtggtgagcatcctgctggagctggccgagggccccaccagcgtgagcagctag

SEQ ID NO: 317832 - protein, 411 aa, Artificial Sequence
  derived and/or modified sequence
MFSVFEEITRIVVKEMDAGGDMIAVRSLVDADRFRCFHLVGEKRTFFGCRHYTTGLTLMDILDTDGDKWLDELDSGLQGQKAEFQILDNVDSTGELIVRLPKEITISGSFQGFHHQKIKISENRISQQYLATLENRKLKRELPFSFRSINTRENLYLVTETLETVKEETLKSDRQYKFWSQISQGHLSYKHKGQREVTIPPNRVLSYRVKQLVFPNKETMSAGLDIHFRGKTKSFPEGKSLGSEDSRNMKEKLEDMESVLKDLTEEKRKDVLNSLAKCLGKEDIRQDLEQRVSEVLISGELHMEDPDKPLLSSLFNAAGVLVEARAKAILDFLDALLELSEEQQFVAEALEKGTLPLLKDQVKSVMEQNWDELASSPPDMDYDPEARILCALYVVVSILLELAEGPTSVSS

SEQ ID NO: 317833 - DNA, 1236 bp, Artificial Sequence
  derived and/or modified sequence
atgttcagcgtgtttgaagagatcacaaggatcgtcgtgaaggagatggacgcaggcggcgacatgattgccgtccgcagcctggtcgatgctgacagattccgttgtttccaccttgtgggcgagaaacgaaccttcttcggctgccggcattacactactggcttaacgttgatggacatcctagacactgacggagataaatggcttgatgagctggatagtggccttcaagggcagaaggctgaattccaaattttagataatgttgatagtaccggtgaactgattgtgcgcctccctaaggaaattacgattagcggatcctttcagggatttcatcaccaaaaaatcaagattagcgaaaaccggatttcacaacagtacttagccacactggaaaataggaagttgaaacgggaattgccattctccttcaggagcatcaatacccgcgaaaatctgtaccttgtgaccgaaaccctggaaacagtcaaggaagagaccctgaaaagcgaccggcagtacaaattctggtctcagatttcccaggggcacctatcatacaagcacaaaggtcagagggaggtgaccattccacccaacagagtgctttcttatagagtaaaacaactcgtgtttccaaataaagagaccatgagcgcaggcctggacatacatttcaggggaaagacgaagtcattccccgaaggaaaatctctgggcagtgaggactctaggaatatgaaagagaaactggaagatatggaatctgtactcaaggatctaacagaggaaaagcgaaaggatgtcctgaactcccttgccaaatgcctgggcaaggaggatataaggcaagatctggaacagcgagtgagtgaagttctgatttcaggtgagctgcacatggaggaccccgacaaaccccttctgagtagcctgttcaatgccgccggagtcctggtagaggctcgcgccaaggctatcctggacttcctggatgcattgcttgaactgtctgaagaacagcaatttgtagccgaagcattagagaagggaacccttcccctgctaaaggatcaggttaagagcgtgatggagcaaaattgggacgaacttgcctccagtcctcctgacatggactacgacccagaggctaggatactgtgcgcactgtatgtggtggtctcaatcttgctggagctggctgaaggtccgacaagtgtgagcagctag

SEQ ID NO: 317834 - DNA, 1236 bp, Artificial Sequence
  derived and/or modified sequence
atgttctccgtcttcgaggaaatcacaagaatcgtggtcaaggaaatggatgccggaggagatatgattgctgtaaggagcctggtggacgctgataggtttcgatgtttccatctcgtcggtgagaagcggacgttttttggctgccgccattatacaacagggttaactctgatggatatcttggacaccgatggagataaatggctggacgagctcgatagcgggcttcagggccagaaggccgagttccagattcttgataacgtggattcgaccggcgaactaatcgtgcgtctcccgaaggagattaccattagtggttccttccagggcttccatcaccagaagatcaagataagcgaaaacaggattagccagcaatacctcgccactctggagaaccgcaaactgaagcgggaactgcctttctctttccggagtatcaacaccagggagaacctatacctcgtgactgagacactggagacggtaaaagaagagactctcaaaagcgatagacagtacaagttctggagtcagatctctcagggtcatttgtcgtataaacataaaggacagagagaggtaacaatcccgcctaacagggtcctgtcatacagagtgaaacagctggtgtttcctaacaaagagacaatgtcggctggacttgacatacattttagaggaaagacaaagtcatttcccgagggaaaaagcctagggagcgaggattcaagaaacatgaaagaaaagcttgaggatatggaatctgtcctgaaggacctcactgaggagaagagaaaggacgtcctgaatagtcttgctaagtgcctgggaaaggaagacatcagacaagatctggaacagagggtgagcgaggtgctcatcagtggcgagctacacatggaggacccagataaacctctgctgtcttctctgtttaacgccgctggggtgctcgtggaagctcgtgctaaagcgatcttggacttcttggacgcactgctcgaattatcagaggagcaacaattcgtggccgaggcactggaaaagggcacgctgccccttctgaaggaccaggtgaaaagtgtgatggagcagaactgggatgaacttgcgtcttctcctcccgatatggattacgacccggaggccaggattctctgcgctctatacgtcgtggtgagcatcctacttgagctggctgaagggcctacttcggtcagctcatag

SEQ ID NO: 317835 - DNA, 1476 bp, Artificial Sequence
  derived and/or modified sequence
gtttctgagttggtccaggcgcaatgttcagcgtatttgaggaaatcacaagaattgtagttaaggagatggatgctggaggggatatgattgccgttagaagccttgttgatgctgatagattccgctgcttccatctggtgggggagaagagaactttctttggatgccggcactacacaacaggcctcaccctgatggacattctggacacagatggggacaagtggttagatgaactggattctgggctccaaggtcaaaaggctgagtttcaaattctggataatgtagactcaacgggagagttgatagtgagattacccaaagaaataacaatttcaggcagtttccagggcttccaccatcagaaaatcaagatatcggagaaccggatatcccagcagtatctggctacccttgaaaacaggaagctgaagagggaactacccttttcattccgatcaattaatacgagagaaaacctgtatctggtgacagaaactctggagacggtaaaggaggaaaccctgaaaagcgaccggcaatataaattttggagccagatctctcagggccatctcagctataaacacaagggccaaagggaagtgaccatccccccaaatcgggtcctgagctatcgagtaaagcagcttgtcttccccaacaaggagacgatgagtgctggtttagatattcatttcaggggcaaaacaaaatcctttccagaaggaaagtctttgggttcggaggattccagaaacatgaaggagaagttggaggacatggagagtgtcctcaaggacctgacagaggagaagagaaaagatgtgctaaactccctcgctaagtgcctcggcaaggaggatattcggcaggatctagagcaaagagtatctgaggtcctgatttccggggagctacacatggaggacccagacaagcctctcctaagcagcctttttaatgctgctggggtcttggtagaagcgcgtgcaaaagccattctggacttcctggatgccctgctagagctgtctgaagagcagcagtttgtggctgaggccctggagaaggggacccttcctctgttgaaggaccaggtgaaatctgtcatggagcagaactgggatgagctggccagcagtcctcctgacatggactatgaccctgaggcacgaattctctgtgcgctgtatgttgttgtctctatcctgctggagctggctgaggggcctacctctgtctcttcctaactacaaaagccctttctccccacaagcctctgggttttccctttaccagtctgtcctcactgccatcgccactaccatcctgtcaccagtgggacctctttaaaacaagcagccaaccattctttgatgtatcccattcgctccatgttaacatccaaaaccagcctggatttcatacatggacttctgattaaaagtggcaggttgtgcatgttaa

SEQ ID NO: 317836 - DNA, 1582 bp, Artificial Sequence
  derived and/or modified sequence
acaactttcagtttcattattttagcttcctgagattcagaggccaggaactgtgcagagatctgtggggattctcacaacttccatttctggtgaacagctgaggtcagagaggagttggtccaggcgcaatgttcagcgtatttgaggaaatcacaagaattgtagttaaggagatggatgctggaggggatatgattgccgttagaagccttgttgatgctgatagattccgctgcttccatctggtgggggagaagagaactttctttggatgccggcactacacaacaggcctcaccctgatggacattctggacacagatggggacaagtggttagatgaactggattctgggctccaaggtcaaaaggctgagtttcaaattctggataatgtagactcaacgggagagttgatagtgagattacccaaagaaataacaatttcaggcagtttccagggcttccaccatcagaaaatcaagatatcggagaaccggatatcccagcagtatctggctacccttgaaaacaggaagctgaagagggaactacccttttcattccgatcaattaatacgagagaaaacctgtatctggtgacagaaactctggagacggtaaaggaggaaaccctgaaaagcgaccggcaatataaattttggagccagatctctcagggccatctcagctataaacacaagggccaaagggaagtgaccatccccccaaatcgggtcctgagctatcgagtaaagcagcttgtcttccccaacaaggagacgatgagtgctggtttagatattcatttcaggggcaaaacaaaatcctttccagaaggaaagtctttgggttcggaggattccagaaacatgaaggagaagttggaggacatggagagtgtcctcaaggacctgacagaggagaagagaaaagatgtgctaaactccctcgctaagtgcctcggcaaggaggatattcggcaggatctagagcaaagagtatctgaggtcctgatttccggggagctacacatggaggacccagacaagcctctcctaagcagcctttttaatgctgctggggtcttggtagaagcgcgtgcaaaagccattctggacttcctggatgccctgctagagctgtctgaagagcagcagtttgtggctgaggccctggagaaggggacccttcctctgttgaaggaccaggtgaaatctgtcatggagcagaactgggatgagctggccagcagtcctcctgacatggactatgaccctgaggcacgaattctctgtgcgctgtatgttgttgtctctatcctgctggagctggctgaggggcctacctctgtctcttcctaactacaaaagccctttctccccacaagcctctgggttttccctttaccagtctgtcctcactgccatcgccactaccatcctgtcaccagtgggacctctttaaaacaagcagccaaccattctttgatgtatcccattcgctccatgttaacatccaaaaccagcctggatttcatacatggacttctgattaaaagtggcaggttgtgcatgtt

SEQ ID NO: 317837 - DNA, 1236 bp, Artificial Sequence
  derived and/or modified sequence
atgttttctgtgtttgaggagatcaccagaattgtggtgaaggagatggatgctggaggagacatgattgctgtgcgcagcctggtggatgctgaccgcttccgctgcttccacctggtgggggagaagaggaccttcttcggctgccgccactacaccaccggcctgaccctgatggacatcctggacacagatggagacaagtggctggatgagctggacagcggcctgcagggccagaaggccgagttccagatcctggacaacgtggacagcactggagagctgattgtgcggctgcccaaggagatcaccatcagcggcagcttccagggcttccaccaccagaagatcaagatcagcgagaaccgcatcagccagcagtacctggccaccctggagaacaggaagctgaagcgggagctgcccttctccttccgcagcatcaacaccagagaaaatctctacctggtgacagagaccctggagaccgtgaaggaggagaccctgaagagtgaccggcagtacaagttctggagccagatcagccagggccacctgagctacaagcacaagggccagcgggaggtgaccatcccccccaacagagtgctgagctacagagtgaagcagctggtgttccccaacaaggagaccatgtctgctggcctggacatccacttccggggcaagaccaagagcttccctgagggcaagagcctgggcagcgaggacagcaggaacatgaaggagaagctggaggacatggagagcgtgctgaaggacctgacagaggagaagaggaaggatgtgctgaacagcctggccaagtgcctgggcaaggaggacatccggcaggacctggagcagagggtgtctgaggtgctgatcagcggggagctgcacatggaggaccctgacaagcccctgctgagcagcctcttcaatgctgctggggtgctggtggaggcccgggccaaggccatcctggacttcctggatgccctgctggagctgtctgaggagcagcagtttgtggccgaggccctggagaagggcaccctgcccctgctgaaggaccaggtgaagtctgtgatggagcagaactgggatgagctggccagcagccccccagacatggactatgaccctgaggcccgcatcctgtgtgccctgtatgtggtggtgtccatcctgctggagctggccgagggccccacctctgtgagcagctag

SEQ ID NO: 317838 - DNA, 1236 bp, Artificial Sequence
  derived and/or modified sequence
atgttcagcgtgttcgaggagatcacccggatcgtggtgaaggagatggacgctggtggtgacatgatcgcggttcggtctctcgtggacgcggaccggtttcggtgcttccatttggtgggggagaagcggaccttttttggctgtcggcactatacaaccggcctcacactcatggacatcttagatacagacggggataagtggcttgacgagttagactctggcttacagggacagaaagccgaatttcaaatcctggataacgtggatagcacaggagagctgattgtgcgccttcccaaggaaatcactattagcggttcctttcagggctttcaccaccaaaagatcaagatctccgagaaccggatctctcagcaatacctggctactctggagaatcggaagctcaaacgcgagctgccattcagtttccgatcgattaatacacgggaaaatttgtacctggtcactgaaaccctggagacagtgaaggaagaaacgctgaagtcagatcggcagtataagttttggagccagataagtcaggggcacctgagctataaacacaaggggcagcgtgaggttactattcccccaaacagggtcctttcataccgggtgaagcagctggttttccccaataaagagacaatgtcagctggcctggatatccacttcagaggaaaaactaagtctttccccgaaggaaaaagcctgggctcagaggacagtcgaaacatgaaagagaaactcgaagatatggagtcagtcttgaaggaccttactgaggaaaaacgaaaggatgttctcaacagcctcgccaagtgcctcgggaaagaggatatcaggcaggatctggagcagcgcgtgtctgaggtgctaatctccggcgagctccacatggaagacccagataagccactcttgtcatctctgtttaatgcggcaggggtccttgtggaggccagggccaaggcgatcctggatttcctcgacgctcttcttgagctcagcgaagaacagcaatttgtcgcagaagcattagaaaaaggcactctccctctgctcaaggaccaggtcaaaagtgtgatggagcagaactgggacgagttggccagcagcccccccgacatggactacgatcccgaggcccggattctctgcgccctgtatgtggtagtaagcatcctcctggagctagccgaagggccaacctcagtgtcttcatag

SEQ ID NO: 317839 - DNA, 1236 bp, Artificial Sequence
  derived and/or modified sequence
atgttcagcgtgttcgaggagatcacccggatcgtggtgaaggagatggatgcaggaggcgatatgatcgcggtccggtctctggtagacgcagaccgttttcggtgcttccacctagtgggggagaagcggaccttctttggatgtaggcattacaccacagggttgaccctgatggacatcctcgatacagatggggataagtggttagacgaactcgacagcggcctgcaggggcaaaaagctgagtttcaaatactggacaatgtggactctacaggagagctcatcgtcaggctgccaaaggaaatcacgatttccggcagttttcaggggttccaccatcagaaaataaaaatttctgaaaataggatctctcaacagtatctggctaccctggaaaatcgcaagctgaagcgagaactccccttctcattccgcagtattaataccagagaaaacctgtaccttgtgactgaaacactcgaaaccgtgaaggaagagaccctcaaaagtgataggcagtacaagttctggtcgcaaataagccagggccatttaagctacaaacataaggggcagagagaagtaacaattccacctaatagggttctgtcttaccgggtcaagcagctagtctttcccaataaggagaccatgtcagctggattggatattcacttccgcggcaaaacaaagtccttcccagagggcaaatccttgggatcagaagactcaaggaacatgaaggagaagctggaggacatggagagtgtcctgaaagatctaacggaggaaaagcggaaggatgttttgaatagcctcgccaaatgtctgggcaaagaggacatccgccaggacctagagcagcgggtaagtgaggtgctgatttccggcgagctccacatggaagatccggataaaccgctcttatcctcactgtttaatgctgcaggcgtgttagtggaagcaagagctaaggctatcctcgatttcctggatgcactgcttgaactgtctgaagaacagcagttcgtcgctgaagcccttgagaagggtaccctgcccctcctcaaggaccaagtgaaatcagtgatggagcagaactgggatgagctggcaagttccccacccgacatggactatgatcctgaggcgcgaattctgtgcgccctttacgtggtcgtgagcattctcctggagctggcagagggaccaacaagcgtgagctcatag

SEQ ID NO: 317840 - DNA, 1236 bp, Artificial Sequence
  derived and/or modified sequence
atgttttcagtcttcgaggagattacccgcatagtggtaaaggaaatggacgcaggaggggacatgatcgccgtccgcagtctggtagatgccgataggttcaggtgtttccacctggttggcgagaagcggacattctttggttgtcggcattacaccacaggccttacactgatggacattctcgatacagatggggacaagtggttagatgagctggactctgggctgcaaggccagaaggcggaatttcagatcctggacaacgttgactctactggcgagcttatcgtgcgcctgcccaaagaaatcaccatttcggggtcattccagggattccaccatcaaaaaattaagatctcggagaatagaatatcccagcagtacctggctacacttgagaaccgtaaactcaagcgggagctgccattctccttcagatcaattaacactcgtgagaacctatatctggtgaccgagacactggaaacagtgaaagaggaaacgcttaagagcgataggcagtataaattttggtcccagatcagtcagggacatttgtcttacaaacataagggccagagggaggtcacaattccacccaatcgggtcctcagttacagagtcaaacagctagtgttccccaacaaggaaacaatgtcagccggacttgatatacacttcaggggaaaaactaagtcctttccagagggcaagtctcttggctcagaggactctaggaatatgaaggagaagctggaagacatggagtctgtactgaaggacttgactgaggagaagcgcaaagacgtattgaactcactggccaaatgcctcggaaaggaggatatccgacaggatttagagcaacgcgtgtccgaagtactaatttcgggagagctccatatggaggaccccgataagcctctgctttcttcactcttcaacgccgctggggtactcgtggaagcacgcgcaaaggccatcctcgactttctagacgcactgctcgagttgagcgaggagcagcagtttgtcgccgaagcattggaaaaaggcacacttcctttattgaaggatcaggtgaagtcagtgatggagcagaattgggacgaactcgcgtcttccccgcctgatatggactatgacccggaggcgaggatcttatgtgccttgtacgtggtagtcagtatactgttggaattagcagaaggccctacgagtgtgagtagttag

SEQ ID NO: 317841 - DNA, 1236 bp, Artificial Sequence
  derived and/or modified sequence
atgtttagcgtctttgaagaaattacccgaatagttgtgaaggaaatggacgcagggggagatatgatagcagtgcgttcattggttgatgctgatcgatttaggtgtttccacctggtgggggaaaagagaactttttttggttgtcggcattacactacagggctcacgttgatggacattctcgacaccgacggcgataaatggctggatgagctggacagtggtttacaaggacagaaggctgagtttcagattctggacaatgttgatagtaccggtgagctaatagtaaggcttccgaaggaaattaccatttcaggatccttccagggattccaccatcaaaagatcaagatctcagaaaatcgaatatcccaacaatatcttgctacgctggaaaataggaagctcaaacgagaactgccgttttctttccgaagtatcaacacaagggagaatctatatctcgtaactgaaacattggaaacggtcaaggaagagacccttaagtccgataggcagtacaagttctggagccagatctctcagggtcatctgtcctacaagcacaaagggcaacgagaggttacaatcccgcctaatcgtgtgttaagctatcgcgtcaaacagctcgtcttccccaacaaagagactatgagtgccggactagatatacattttcggggtaagactaagagcttcccggagggaaagtccttaggctcagaagacagtcgcaatatgaaggagaaactggaagacatggagtcagttctcaaggacttaacagaagagaagcgcaaggatgttctgaattctttggccaagtgtctcggcaaggaggatatccgacaggatctggaacagagagtgtcggaggtcctaataagcggcgagctccatatggaggatcctgacaaacctctcctatcatcactgtttaatgcagctggcgtgctggtggaggccagggcgaaggcaattctggacttcttagacgcccttttggagctctctgaagaacagcagttcgtggccgaggcccttgagaaaggtactctcccccttttgaaggatcaggtcaagtccgtgatggagcagaactgggacgagctggcctcttctcctccggatatggactacgatcctgaagcaaggatcctgtgtgccctttatgtcgttgtatcgatcctgctagagctggccgagggcccaacctccgtttcaagctag

SEQ ID NO: 317842 - DNA, 1236 bp, Artificial Sequence
  derived and/or modified sequence
atgttcagcgtgttcgaggagatcaccagaatcgtggtgaaggagatggacgccggcggcgacatgatcgccgtgagaagcctggtggacgccgacagattcagatgcttccacctggtgggcgagaagagaaccttcttcggctgcagacactacaccaccggcctgaccctgatggacatcctggacaccgacggcgacaagtggctggacgagctggacagcggcctgcagggccagaaggccgagttccagatcctggacaacgtggacagcaccggcgagctgatcgtgagactgcccaaggagatcaccatcagcggcagcttccagggcttccaccaccagaagatcaagatcagcgagaacagaatcagccagcagtacctggccaccctggagaacagaaagctgaagagagagctgcccttcagcttcagaagcatcaacaccagagagaacctgtacctggtgaccgagaccctggagaccgtgaaggaggagaccctgaagagcgacagacagtacaagttctggagccagatcagccagggccacctgagctacaagcacaagggccagagagaggtgaccatcccccccaacagagtgctgagctacagagtgaagcagctggtgttccccaacaaggagaccatgagcgccggcctggacatccacttcagaggcaagaccaagagcttccccgagggcaagagcctgggcagcgaggacagcagaaacatgaaggagaagctggaggacatggagagcgtgctgaaggacctgaccgaggagaagagaaaggacgtgctgaacagcctggccaagtgcctgggcaaggaggacatcagacaggacctggagcagagagtgagcgaggtgctgatcagcggcgagctgcacatggaggaccccgacaagcccctgctgagcagcctgttcaacgccgccggcgtgctggtggaggccagagccaaggccatcctggacttcctggacgccctgctggagctgagcgaggagcagcagttcgtggccgaggccctggagaagggcaccctgcccctgctgaaggaccaggtgaagagcgtgatggagcagaactgggacgagctggccagcagcccccccgacatggactacgaccccgaggccagaatcctgtgcgccctgtacgtggtggtgagcatcctgctggagctggccgagggccccaccagcgtgagcagctag

SEQ ID NO: 317843 - protein, 407 aa, Artificial Sequence
  derived and/or modified sequence
MFSVFEEITRIVVKEMDAGGDMIAVRSLVDADRFRCFHLVGEKRTFFGCRHYTTGLTLMDILDTDGDKWLDELDSGLQGQKAEFQILDNVDSTGELIVRLPKEITISGSFQGFHHQKIKISENRISQQYLATLENRKLKRELPFSFRSINTRENLYLVTETLETVKEETLKSDRQYKFWSQISQGHLSYKHKGQREVTIPPNRVLSYRVKQLVFPNKETMNIHFRGKTKSFPEGKSLGSEDSRNMKEKLEDMESVLKDLTEEKRKDVLNSLAKCLGKEDIRQDLEQRVSEVLISGELHMEDPDKPLLSSLFNAAGVLVEARAKAILDFLDALLELSEEQQFVAEALEKGTLPLLKDQVKSVMEQNWDELASSPPDMDYDPEARILCALYVVVSILLELAEGPTSVSS

SEQ ID NO: 317844 - DNA, 1224 bp, Artificial Sequence
  derived and/or modified sequence
atgtttagcgtctttgaggagataacgcgcattgtggtgaaggagatggacgccggcggcgacatgatcgcagtccggtcattggtcgatgctgaccggtttcgatgtttccatttggtaggtgagaagcggacatttttcgggtgccggcactatacaaccggactaaccctcatggatattctagatactgatggcgacaaatggctagatgagctggactcgggactgcaggggcagaaagctgagttccagattctggataatgtcgatagtaccggcgaactgatcgtgcgtctgcccaaggagattactatttctggatcttttcagggctttcaccaccaaaaaattaagatctctgagaatcgcatctctcaacagtatttagcaacattggaaaaccggaagctgaagcgcgagctgcctttctcctttcgctcgatcaacacgagggaaaatctgtatctggtgaccgaaaccctggagactgtgaaggaggagactctcaagtctgaccgccagtataagttttggtcgcagattagtcaaggtcatctctcctataaacacaagggccagcgtgaagtcactatccctcccaatagggtcctgtcatatagagtgaagcagctggtcttccccaataaagagaccatgaatatacactttcgcggtaaaacaaaaagcttccccgagggaaagtccctgggttctgaagatagcagaaacatgaaggaaaagctagaggatatggaaagtgtccttaaggatctgactgaagagaagcggaaagatgtgctgaacagtctggctaaatgcctgggtaaggaggatattagacaggacctggagcaacgagtctccgaggttctgataagcggcgagctgcacatggaagatccagataagcctctactatcttccctattcaacgccgccggcgtgctggtggaggccagggccaaggcaatacttgacttcttagatgccctgctcgaactgtccgaagagcagcagttcgtcgctgaggcccttgaaaagggcaccctgcccctgcttaaggaccaggtaaaaagcgtgatggaacagaactgggatgagctggcatcctcaccccccgacatggactacgaccccgaggctagaatcctatgtgccctctacgtcgtagtcagtatacttctcgagctggccgagggccccacttctgtgtcaagctag

SEQ ID NO: 317845 - DNA, 1546 bp, Artificial Sequence
  derived and/or modified sequence
attattttagcttcctgagattcagaggccaggaactgtgcagagatctgtggggattctcacaacttccatttctggtgaacagctgaggtcagagaggaggcgcaatgttcagcgtatttgaggaaatcacaagaattgtagttaaggagatggatgctggaggggatatgattgccgttagaagccttgttgatgctgatagattccgctgcttccatctggtgggggagaagagaactttctttggatgccggcactacacaacaggcctcaccctgatggacattctggacacagatggggacaagtggttagatgaactggattctgggctccaaggtcaaaaggctgagtttcaaattctggataatgtagactcaacgggagagttgatagtgagattacccaaagaaataacaatttcaggcagtttccagggcttccaccatcagaaaatcaagatatcggagaaccggatatcccagcagtatctggctacccttgaaaacaggaagctgaagagggaactacccttttcattccgatcaattaatacgagagaaaacctgtatctggtgacagaaactctggagacggtaaaggaggaaaccctgaaaagcgaccggcaatataaattttggagccagatctctcagggccatctcagctataaacacaagggccaaagggaagtgaccatccccccaaatcgggtcctgagctatcgagtaaagcagcttgtcttccccaacaaggagacgatgaatattcatttcaggggcaaaacaaaatcctttccagaaggaaagtctttgggttcggaggattccagaaacatgaaggagaagttggaggacatggagagtgtcctcaaggacctgacagaggagaagagaaaagatgtgctaaactccctcgctaagtgcctcggcaaggaggatattcggcaggatctagagcaaagagtatctgaggtcctgatttccggggagctacacatggaggacccagacaagcctctcctaagcagcctttttaatgctgctggggtcttggtagaagcgcgtgcaaaagccattctggacttcctggatgccctgctagagctgtctgaagagcagcagtttgtggctgaggccctggagaaggggacccttcctctgttgaaggaccaggtgaaatctgtcatggagcagaactgggatgagctggccagcagtcctcctgacatggactatgaccctgaggcacgaattctctgtgcgctgtatgttgttgtctctatcctgctggagctggctgaggggcctacctctgtctcttcctaactacaaaagccctttctccccacaagcctctgggttttccctttaccagtctgtcctcactgccatcgccactaccatcctgtcaccagtgggacctctttaaaacaagcagccaaccattctttgatgtatcccattcgctccatgttaacatccaaaaccagcctggatttcatacatggacttctgattaaaagtggcaggttgtgcatgtt

SEQ ID NO: 317846 - DNA, 1224 bp, Artificial Sequence
  derived and/or modified sequence
atgttttctgtgtttgaggagatcaccagaattgtggtgaaggagatggatgctggaggagacatgattgctgtgcgcagcctggtggatgctgaccgcttccgctgcttccacctggtgggggagaagaggaccttcttcggctgccgccactacaccaccggcctgaccctgatggacatcctggacacagatggagacaagtggctggatgagctggacagcggcctgcagggccagaaggccgagttccagatcctggacaacgtggacagcactggagagctgattgtgcggctgcccaaggagatcaccatcagcggcagcttccagggcttccaccaccagaagatcaagatcagcgagaaccgcatcagccagcagtacctggccaccctggagaacaggaagctgaagcgggagctgcccttctccttccgcagcatcaacaccagagaaaatctctacctggtgacagagaccctggagaccgtgaaggaggagaccctgaagagtgaccggcagtacaagttctggagccagatcagccagggccacctgagctacaagcacaagggccagcgggaggtgaccatcccccccaacagagtgctgagctacagagtgaagcagctggtgttccccaacaaggagaccatgaacatccacttccggggcaagaccaagagcttccctgagggcaagagcctgggcagcgaggacagcaggaacatgaaggagaagctggaggacatggagagcgtgctgaaggacctgacagaggagaagaggaaggatgtgctgaacagcctggccaagtgcctgggcaaggaggacatccggcaggacctggagcagagggtgtctgaggtgctgatcagcggggagctgcacatggaggaccctgacaagcccctgctgagcagcctcttcaatgctgctggggtgctggtggaggcccgggccaaggccatcctggacttcctggatgccctgctggagctgtctgaggagcagcagtttgtggccgaggccctggagaagggcaccctgcccctgctgaaggaccaggtgaagtctgtgatggagcagaactgggatgagctggccagcagccccccagacatggactatgaccctgaggcccgcatcctgtgtgccctgtatgtggtggtgtccatcctgctggagctggccgagggccccacctctgtgagcagctag

SEQ ID NO: 317847 - DNA, 1224 bp, Artificial Sequence
  derived and/or modified sequence
atgttcagcgtgttcgaggagatcacccggatcgtggtgaaggagatggatgcggggggagacatgatcgcagtgcgatccctggtcgacgctgatagatttagatgtttccatctcgttggagagaagcgaacattcttcgggtgtaggcattacacaacaggccttacactgatggacatcctggacacagatggagataaatggctggatgaacttgactcaggcctccaggggcaaaaggctgagttccaaatcttggataatgtcgattccaccggggagctcatcgtgcggttgccaaaggagattaccatatccggatctttccagggatttcaccaccagaagattaagatctcggagaatcgaatttcacagcagtatctggctaccctggaaaaccgcaaattgaagagggaactcccattcagttttcggtcaatcaacactagagagaacctgtaccttgtgaccgagacgctggagacggttaaggaggagacactgaagtccgatcgacaatataagttctggagccagatcagtcagggccacctttcttataaacataaggggcaaagggaggtgaccatccctcctaatcgcgtgcttagctatagagttaaacagctggtcttccctaataaggaaactatgaacatacattttaggggcaagactaaaagctttccagagggaaagagtttaggaagtgaagatagccggaatatgaaggaaaaattggaggatatggaatcagtactgaaggaccttaccgaggaaaaaaggaaagacgttctgaattccctggccaaatgtttgggaaaagaggacataagacaagacctggagcaacgagttagcgaggtgctgatctcaggagagcttcacatggaggatcccgacaaacctctgttaagcagcctcttcaacgccgccggcgtcttagtggaggcacgcgcaaaagctatcctggattttttggatgccttgcttgagctgtctgaagaacaacagtttgtcgcagaggctttggagaagggtactctccccttgctgaaggatcaggttaagtccgtcatggagcagaactgggatgaactggccagtagcccacctgatatggattatgatcccgaagcccgaatattgtgcgctctgtatgttgtggttagcattctcttagaactagccgaggggccaacttccgtgagcagttag

SEQ ID NO: 317848 - DNA, 1224 bp, Artificial Sequence
  derived and/or modified sequence
atgttttccgtattcgaagagataacaagaatcgtggtgaaggagatggacgcgggtggagacatgatcgctgtccgctcgctggtggacgccgatcgattccgctgcttccatttagtcggcgagaagagaacatttttcggttgtcggcattatacaacaggattaacgctgatggatattctggataccgatggcgacaagtggttggatgagctggacagcggactgcagggccagaaagccgagttccagatcctggataatgtcgatagtactggggaactcatcgtgcggttacccaaagagatcactatctccgggagcttccagggttttcatcaccagaagatcaaaatatccgagaatcgcattagtcagcagtacttggccactcttgagaacaggaagctgaagcgggagctcccgttcagttttaggtcaatcaatacacgggagaatctgtacctcgtcaccgagacactcgaaactgtgaaggaagagacccttaagtcggaccgtcagtacaagttctggagtcagatctcacagggacatctgagttacaaacataaggggcagcgggaagttacgatacccccaaaccgagtactgagctatcgcgttaagcagctggtctttcctaacaaggagacaatgaatatccatttccgcggtaagactaagtcgtttcccgagggcaagagtttaggtagtgaggattctaggaatatgaaagagaagttggaagatatggaatccgtactgaaagacctcaccgaggaaaagaggaaagatgtcctcaactcgcttgctaagtgcttaggtaaggaggacatcagacaagatctggagcaaagggtcagtgaggttctaatcagcggtgagttgcatatggaggatcctgataaacctctcctttccagtctgttcaacgcggcaggtgttctggttgaagcaagggctaaggccatcttagatttcctggacgccctactggagctgtcagaggagcagcagttcgtggcagaggccctcgaaaaaggaacgctgcctttgcttaaggaccaagtgaaaagcgtaatggaacaaaactgggacgaactggccagcagccctcctgacatggactatgatccggaggccagaatcctgtgcgccctgtatgtggttgtgagcatactgcttgaattggccgagggcccaacatctgtcagttcctag

SEQ ID NO: 317849 - DNA, 1224 bp, Artificial Sequence
  derived and/or modified sequence
atgttcagcgtgttcgaggagatcaccagaatcgtggtgaaggagatggacgccggcggcgacatgatcgccgtgagaagcctggtggacgccgacagattcagatgcttccacctggtgggcgagaagagaaccttcttcggctgcagacactacaccaccggcctgaccctgatggacatcctggacaccgacggcgacaagtggctggacgagctggacagcggcctgcagggccagaaggccgagttccagatcctggacaacgtggacagcaccggcgagctgatcgtgagactgcccaaggagatcaccatcagcggcagcttccagggcttccaccaccagaagatcaagatcagcgagaacagaatcagccagcagtacctggccaccctggagaacagaaagctgaagagagagctgcccttcagcttcagaagcatcaacaccagagagaacctgtacctggtgaccgagaccctggagaccgtgaaggaggagaccctgaagagcgacagacagtacaagttctggagccagatcagccagggccacctgagctacaagcacaagggccagagagaggtgaccatcccccccaacagagtgctgagctacagagtgaagcagctggtgttccccaacaaggagaccatgaacatccacttcagaggcaagaccaagagcttccccgagggcaagagcctgggcagcgaggacagcagaaacatgaaggagaagctggaggacatggagagcgtgctgaaggacctgaccgaggagaagagaaaggacgtgctgaacagcctggccaagtgcctgggcaaggaggacatcagacaggacctggagcagagagtgagcgaggtgctgatcagcggcgagctgcacatggaggaccccgacaagcccctgctgagcagcctgttcaacgccgccggcgtgctggtggaggccagagccaaggccatcctggacttcctggacgccctgctggagctgagcgaggagcagcagttcgtggccgaggccctggagaagggcaccctgcccctgctgaaggaccaggtgaagagcgtgatggagcagaactgggacgagctggccagcagcccccccgacatggactacgaccccgaggccagaatcctgtgcgccctgtacgtggtggtgagcatcctgctggagctggccgagggccccaccagcgtgagcagctag

SEQ ID NO: 317850 - protein, 403 aa, Artificial Sequence
  derived and/or modified sequence
MFSVFEEITRIVVKEMDAGGDMIAVRSLVDADRFRCFHLVGEKRTFFGCRHYTTGLTLMDILDTDGDKWLDELDSGLQGQKAEFQILDNVDSTGELIVRLPKEITISGSFQGFHHQKIKISENRISQQYLATLENRKLKRELPFSFRSINTRENLYLVTETLETVKEETLKSDRQYKFWSQISQGHLSYKHKGQREVTIPPNRVLSYRVKQLVFPNKETMKKDGASSCLGKSLGSEDSRNMKEKLEDMESVLKDLTEEKRKDVLNSLAKCLGKEDIRQDLEQRVSEVLISGELHMEDPDKPLLSSLFNAAGVLVEARAKAILDFLDALLELSEEQQFVAEALEKGTLPLLKDQVKSVMEQNWDELASSPPDMDYDPEARILCALYVVVSILLELAEGPTSVSS

SEQ ID NO: 317851 - DNA, 1212 bp, Artificial Sequence
  derived and/or modified sequence
atgttttcagtgtttgaagagattacacgaattgtcgtcaaggagatggatgcaggcggcgatatgatcgccgtgcgctccctggttgatgctgatcgtttcaggtgttttcacctggtaggtgagaagaggaccttcttcggctgccggcattatactacagggctgacgctaatggatatcttggatacagacggcgacaagtggctggatgaacttgattccggcttgcagggacagaaagccgaattccagatcttggataacgtcgacagtactggcgaactgatagtgaggctgcccaaagaaatcactataagcggcagcttccagggctttcatcaccagaagatcaagatctctgaaaaccgaattagccagcaatatctagcaacactcgagaacagaaaactcaagcgcgaactcccattcagctttcgaagcatcaacacaagagaaaatctctatttagtaacagaaacattagaaactgtgaaggaagagaccctcaagtccgaccgccaatacaagttctggagtcagatttcccaaggacacctgtcgtataagcacaaggggcagcgtgaagtaacaatccctcccaaccgtgtcctctcttacagggtaaaacagctcgtgttccccaataaagagacaatgaaaaaggatggagcttcgtcgtgcttgggaaaatcactcggctctgaggacagcagaaacatgaaagaaaaattggaagacatggaatcagtcctcaaagatctgactgaggagaaaaggaaggatgtgctgaacagtctcgccaaatgcctcggaaaggaggacatacgccaagaccttgagcaaagagttagcgaggtactgatcagtggcgagctacatatggaggacccagataaacctctgctcagctcactgttcaacgccgcaggggtgctggtggaggcccgagctaaggcgatcttggactttctggatgcccttctcgaactgagcgaggaacaacaattcgtcgcagaagccctcgaaaagggcacactgccgcttttgaaagatcaagtgaaatctgtgatggagcagaactgggacgaacttgcttcctccccacctgatatggattacgaccccgaagccagaattctgtgcgctctgtatgtggtcgtttctatacttttggagctggctgaggggccaacctccgtcagcagttag

SEQ ID NO: 317852 - DNA, 1500 bp, Artificial Sequence
  derived and/or modified sequence
atctgtggggattctcacaacttccatttctggtgaacagctgaggtcagagaggagttggtccaggcgcaatgttcagcgtatttgaggaaatcacaagaattgtagttaaggagatggatgctggaggggatatgattgccgttagaagccttgttgatgctgatagattccgctgcttccatctggtgggggagaagagaactttctttggatgccggcactacacaacaggcctcaccctgatggacattctggacacagatggggacaagtggttagatgaactggattctgggctccaaggtcaaaaggctgagtttcaaattctggataatgtagactcaacgggagagttgatagtgagattacccaaagaaataacaatttcaggcagtttccagggcttccaccatcagaaaatcaagatatcggagaaccggatatcccagcagtatctggctacccttgaaaacaggaagctgaagagggaactacccttttcattccgatcaattaatacgagagaaaacctgtatctggtgacagaaactctggagacggtaaaggaggaaaccctgaaaagcgaccggcaatataaattttggagccagatctctcagggccatctcagctataaacacaagggccaaagggaagtgaccatccccccaaatcgggtcctgagctatcgagtaaagcagcttgtcttccccaacaaggagacgatgaagaaggatggtgcttcatcctgtttaggaaagtctttgggttcggaggattccagaaacatgaaggagaagttggaggacatggagagtgtcctcaaggacctgacagaggagaagagaaaagatgtgctaaactccctcgctaagtgcctcggcaaggaggatattcggcaggatctagagcaaagagtatctgaggtcctgatttccggggagctacacatggaggacccagacaagcctctcctaagcagcctttttaatgctgctggggtcttggtagaagcgcgtgcaaaagccattctggacttcctggatgccctgctagagctgtctgaagagcagcagtttgtggctgaggccctggagaaggggacccttcctctgttgaaggaccaggtgaaatctgtcatggagcagaactgggatgagctggccagcagtcctcctgacatggactatgaccctgaggcacgaattctctgtgcgctgtatgttgttgtctctatcctgctggagctggctgaggggcctacctctgtctcttcctaactacaaaagccctttctccccacaagcctctgggttttccctttaccagtctgtcctcactgccatcgccactaccatcctgtcaccagtgggacctctttaaaacaagcagccaaccattctttgatgtatcccattcgctccatgttaacatccaaaaccagcctggatttcatacatggacttctgattaaaagtggcaggttgtgcatgttaa

SEQ ID NO: 317853 - DNA, 1212 bp, Artificial Sequence
  derived and/or modified sequence
atgttttctgtgtttgaggagatcaccagaattgtggtgaaggagatggatgctggaggagacatgattgctgtgcgcagcctggtggatgctgaccgcttccgctgcttccacctggtgggggagaagaggaccttcttcggctgccgccactacaccaccggcctgaccctgatggacatcctggacacagatggagacaagtggctggatgagctggacagcggcctgcagggccagaaggccgagttccagatcctggacaacgtggacagcactggagagctgattgtgcggctgcccaaggagatcaccatcagcggcagcttccagggcttccaccaccagaagatcaagatcagcgagaaccgcatcagccagcagtacctggccaccctggagaacaggaagctgaagcgggagctgcccttctccttccgcagcatcaacaccagagaaaatctctacctggtgacagagaccctggagaccgtgaaggaggagaccctgaagagtgaccggcagtacaagttctggagccagatcagccagggccacctgagctacaagcacaagggccagcgggaggtgaccatcccccccaacagagtgctgagctacagagtgaagcagctggtgttccccaacaaggagaccatgaagaaggatggagccagcagctgcctgggcaagagcctgggcagcgaggacagcaggaacatgaaggagaagctggaggacatggagagcgtgctgaaggacctgacagaggagaagaggaaggatgtgctgaacagcctggccaagtgcctgggcaaggaggacatccggcaggacctggagcagagggtgtctgaggtgctgatcagcggggagctgcacatggaggaccctgacaagcccctgctgagcagcctcttcaatgctgctggggtgctggtggaggcccgggccaaggccatcctggacttcctggatgccctgctggagctgtctgaggagcagcagtttgtggccgaggccctggagaagggcaccctgcccctgctgaaggaccaggtgaagtctgtgatggagcagaactgggatgagctggccagcagccccccagacatggactatgaccctgaggcccgcatcctgtgtgccctgtatgtggtggtgtccatcctgctggagctggccgagggccccacctctgtgagcagctag

SEQ ID NO: 317854 - DNA, 1212 bp, Artificial Sequence
  derived and/or modified sequence
atgttcagcgtgttcgaggagatcacccggatcgtggtgaaggagatggacgccgggggagatatgatagccgtgcgctccctggtggacgcagataggtttcggtgcttccacctggtgggcgagaaacgcacttttttcggctgtcgacattatacaacaggcttgacattgatggatatcctggacactgatggtgacaaatggctcgacgaactcgactcaggtttacagggccaaaaagcggagttccagatacttgacaacgtggactcaaccggggaactgatcgtcagactgcctaaggagatcaccattagtgggagctttcagggctttcatcatcagaaaattaaaatttcggaaaacagaattagccagcagtatctcgccactctggaaaatcggaagctcaagcgggaactcccattctccttccgaagcattaacacccgggagaacctctatttggtgactgagacgctggaaactgtgaaggaggagaccctgaaaagtgacagacaatataaattttggagccagatcagccaaggccatctgagctataaacacaaagggcaacgggaagtaacgataccccccaaccgagttctctcttatagggtaaaacaactggtcttccccaataaggaaactatgaagaaggatggtgcttctagctgcttaggcaagtcattgggctcagaggacagtcgcaatatgaaggagaagctggaagatatggaatctgtgctgaaggacctgacagaggagaaaagaaaagacgtgcttaattctctcgccaaatgcctgggcaaggaggatatcagacaggacttggagcaacgggtgagcgaggtcttgatctccggtgagcttcacatggaagaccctgataagccactgctgtctagtttgtttaacgccgcaggcgtcctggtcgaagcccgtgctaaagctatcttggactttttagatgcactacttgaactgtccgaagagcaacagtttgtagcggaggccttggagaagggaacactcccgttacttaaagatcaagtgaagtccgtgatggaacagaattgggacgagctcgcaagctcccccccagatatggattacgatcctgaagcgaggattttgtgtgccctctacgttgtagttagcatactcctggagctggctgaaggtcccacatcagtctcatcgtag

SEQ ID NO: 317855 - DNA, 1212 bp, Artificial Sequence
  derived and/or modified sequence
atgtttagcgtcttcgaggagatcacacggattgtggtcaaggaaatggatgcaggcggtgatatgatagcagtccgaagcctggtggacgccgatcggtttcgatgtttccacttggtcggcgagaagagaacgttttttggttgccggcattacacaacaggtctgacccttatggatatcctcgacaccgacggtgacaagtggttggacgaactggatagtgggctgcagggacagaaggcagagttccaaatccttgacaatgtcgactcaacaggagaacttatcgtccggttgccgaaggagattacgatcagcggaagctttcaaggattccatcatcaaaagataaagatttctgaaaataggatcagtcagcagtatctggccaccctcgaaaaccggaagcttaagcgggaactgcctttttcctttcggtcgatcaacaccagggaaaacctgtatctggtaacagagacattggagaccgtcaaggaagaaacgctgaagagcgaccgccagtacaaattctggtctcagatatcacagggccacttgtcttataagcacaaaggacagcgggaggtaaccatacctcctaatagggttttaagctacagggtgaaacaactggtgttcccgaacaaggaaacgatgaaaaaagatggagcttcatcatgcttgggcaagtccttgggctccgaggatagccgcaacatgaaagaaaaactggaagatatggagagcgtgctgaaggatctgaccgaggaaaaaaggaaggacgtcctcaacagcttggcaaagtgcttgggcaaggaagatattcgccaggatctggaacagcgggtcagcgaggtcctgatctcaggcgaactacatatggaggatcccgataagcccctgctgtcaagcctattcaatgctgccggagtactggtggaagcacgagccaaggcaatccttgatttcttggacgcactgctagaactgtccgaggagcagcagtttgtggcagaggccttggagaaggggaccctgcccctgcttaaagaccaagtcaagtcagtcatggagcagaattgggatgagctggcgtcgtctcctccggacatggactacgaccctgaggctcgaatcctctgcgcattgtatgttgttgtgtccattctactggagttggccgaaggccctaccagcgtgagcagctag

SEQ ID NO: 317856 - DNA, 1212 bp, Artificial Sequence
  derived and/or modified sequence
atgttcagcgtgttcgaggagatcaccagaatcgtggtgaaggagatggacgccggcggcgacatgatcgccgtgagaagcctggtggacgccgacagattcagatgcttccacctggtgggcgagaagagaaccttcttcggctgcagacactacaccaccggcctgaccctgatggacatcctggacaccgacggcgacaagtggctggacgagctggacagcggcctgcagggccagaaggccgagttccagatcctggacaacgtggacagcaccggcgagctgatcgtgagactgcccaaggagatcaccatcagcggcagcttccagggcttccaccaccagaagatcaagatcagcgagaacagaatcagccagcagtacctggccaccctggagaacagaaagctgaagagagagctgcccttcagcttcagaagcatcaacaccagagagaacctgtacctggtgaccgagaccctggagaccgtgaaggaggagaccctgaagagcgacagacagtacaagttctggagccagatcagccagggccacctgagctacaagcacaagggccagagagaggtgaccatcccccccaacagagtgctgagctacagagtgaagcagctggtgttccccaacaaggagaccatgaagaaggacggcgccagcagctgcctgggcaagagcctgggcagcgaggacagcagaaacatgaaggagaagctggaggacatggagagcgtgctgaaggacctgaccgaggagaagagaaaggacgtgctgaacagcctggccaagtgcctgggcaaggaggacatcagacaggacctggagcagagagtgagcgaggtgctgatcagcggcgagctgcacatggaggaccccgacaagcccctgctgagcagcctgttcaacgccgccggcgtgctggtggaggccagagccaaggccatcctggacttcctggacgccctgctggagctgagcgaggagcagcagttcgtggccgaggccctggagaagggcaccctgcccctgctgaaggaccaggtgaagagcgtgatggagcagaactgggacgagctggccagcagcccccccgacatggactacgaccccgaggccagaatcctgtgcgccctgtacgtggtggtgagcatcctgctggagctggccgagggccccaccagcgtgagcagctag

SEQ ID NO: 317857 - protein, 394 aa, Artificial Sequence
  derived and/or modified sequence
MFSVFEEITRIVVKEMDAGGDMIAVRSLVDADRFRCFHLVGEKRTFFGCRHYTTGLTLMDILDTDGDKWLDELDSGLQGQKAEFQILDNVDSTGELIVRLPKEITISGSFQGFHHQKIKISENRISQQYLATLENRKLKRELPFSFRSINTRENLYLVTETLETVKEETLKSDRQYKFWSQISQGHLSYKHKGQREVTIPPNRVLSYRVKQLVFPNKETMRKSLGSEDSRNMKEKLEDMESVLKDLTEEKRKDVLNSLAKCLGKEDIRQDLEQRVSEVLISGELHMEDPDKPLLSSLFNAAGVLVEARAKAILDFLDALLELSEEQQFVAEALEKGTLPLLKDQVKSVMEQNWDELASSPPDMDYDPEARILCALYVVVSILLELAEGPTSVSS

SEQ ID NO: 317858 - DNA, 1185 bp, Artificial Sequence
  derived and/or modified sequence
atgttttccgtgttcgaggaaataactaggatcgtggtaaaagaaatggatgcgggaggtgacatgatcgccgtgagatccctagtcgacgcggatcggttcagatgctttcatctggtgggagaaaaaagaacgttcttcgggtgccgacactacactactggcctaactctgatggacattcttgataccgacggcgataagtggctagatgagctcgatagcggcttacaaggccagaaagccgagtttcagatcctggacaatgttgattccactggcgagctgatagtccggttgccaaaggaaataaccatcagcgggtcctttcagggttttcaccaccagaagattaaaattagtgagaaccgaatctcacagcagtacctcgcgaccctcgaaaatcgtaagctgaagagggagctgccattcagctttagatcaattaataccagagagaatctgtacctcgttacagaaaccctcgagaccgtgaaggaggaaactcttaaaagcgaccggcagtacaagttctggtctcagatttcacaaggacatctctcgtacaagcacaagggacaacgggaggtaactatccctcccaatcgcgttctgagttacagggtcaagcagctggtgttccctaacaaagagacaatgagaaagtcattaggaagtgaggattccagaaacatgaaagaaaagctcgaggacatggagagcgtgttaaaggatctaacagaagaaaaacgcaaggacgtgctgaatagcctggctaaatgcctcggcaaggaggatatacggcaggatttggagcagcgcgtttcagaggtgctcatcagtggggagctgcatatggaggacccggacaagccattgcttagctccctgtttaacgccgccggcgtgctcgtggaggccagggccaaagcaatcctggacttcctcgatgccctcctggagttatcagaggaacagcagtttgtggccgaagccctggaaaagggcacattaccgttgcttaaagatcaggttaaatccgtcatggaacaaaactgggacgaactcgcaagtagccccccagatatggattacgaccctgaggcgaggatactgtgcgcactgtacgtcgtggtctccatcctgttggagctggctgagggccccacatcagtctcatcgtag

SEQ ID NO: 317859 - DNA, 1626 bp, Artificial Sequence
  derived and/or modified sequence
gtggaatgtcatcagttaaggctattttcatttcttttgtggatcttcagttgcttcaggccatctggatgtatacatgcaggtcacagggaatatgatggcttagcttgggttcagaggcctgacacctcaggctgccaaatgtggaagatttaaatacttgaaccaataccctcctcccaaaaactgaaattggcttctgtttctgagttggtccaggcgcaatgttcagcgtatttgaggaaatcacaagaattgtagttaaggagatggatgctggaggggatatgattgccgttagaagccttgttgatgctgatagattccgctgcttccatctggtgggggagaagagaactttctttggatgccggcactacacaacaggcctcaccctgatggacattctggacacagatggggacaagtggttagatgaactggattctgggctccaaggtcaaaaggctgagtttcaaattctggataatgtagactcaacgggagagttgatagtgagattacccaaagaaataacaatttcaggcagtttccagggcttccaccatcagaaaatcaagatatcggagaaccggatatcccagcagtatctggctacccttgaaaacaggaagctgaagagggaactacccttttcattccgatcaattaatacgagagaaaacctgtatctggtgacagaaactctggagacggtaaaggaggaaaccctgaaaagcgaccggcaatataaattttggagccagatctctcagggccatctcagctataaacacaagggccaaagggaagtgaccatccccccaaatcgggtcctgagctatcgagtaaagcagcttgtcttccccaacaaggagacgatgagaaagtctttgggttcggaggattccagaaacatgaaggagaagttggaggacatggagagtgtcctcaaggacctgacagaggagaagagaaaagatgtgctaaactccctcgctaagtgcctcggcaaggaggatattcggcaggatctagagcaaagagtatctgaggtcctgatttccggggagctacacatggaggacccagacaagcctctcctaagcagcctttttaatgctgctggggtcttggtagaagcgcgtgcaaaagccattctggacttcctggatgccctgctagagctgtctgaagagcagcagtttgtggctgaggccctggagaaggggacccttcctctgttgaaggaccaggtgaaatctgtcatggagcagaactgggatgagctggccagcagtcctcctgacatggactatgaccctgaggcacgaattctctgtgcgctgtatgttgttgtctctatcctgctggagctggctgaggggcctacctctgtctcttcctaactacaaaagccctttctccccacaagcctctgggttttccctttaccagtctgtcctcactgccatcgccactaccatcctgtcaccagtgggacctctttaaaacaagcagccaaccattctttgatgtatcccattcgctccatgttaacatccaaaaccagcctggatttcatacatggacttctgattaaaagtggcaggttgtgcatgttaa

SEQ ID NO: 317860 - DNA, 1185 bp, Artificial Sequence
  derived and/or modified sequence
atgttttctgtgtttgaggagatcaccagaattgtggtgaaggagatggatgctggaggagacatgattgctgtgcgcagcctggtggatgctgaccgcttccgctgcttccacctggtgggggagaagaggaccttcttcggctgccgccactacaccaccggcctgaccctgatggacatcctggacacagatggagacaagtggctggatgagctggacagcggcctgcagggccagaaggccgagttccagatcctggacaacgtggacagcactggagagctgattgtgcggctgcccaaggagatcaccatcagcggcagcttccagggcttccaccaccagaagatcaagatcagcgagaaccgcatcagccagcagtacctggccaccctggagaacaggaagctgaagcgggagctgcccttctccttccgcagcatcaacaccagagaaaatctctacctggtgacagagaccctggagaccgtgaaggaggagaccctgaagagtgaccggcagtacaagttctggagccagatcagccagggccacctgagctacaagcacaagggccagcgggaggtgaccatcccccccaacagagtgctgagctacagagtgaagcagctggtgttccccaacaaggagaccatgaggaagagcctgggcagcgaggacagcaggaacatgaaggagaagctggaggacatggagagcgtgctgaaggacctgacagaggagaagaggaaggatgtgctgaacagcctggccaagtgcctgggcaaggaggacatccggcaggacctggagcagagggtgtctgaggtgctgatctctggagagctgcacatggaggaccctgacaagcccctgctgagcagcctcttcaatgctgctggggtgctggtggaggcccgggccaaggccatcctggacttcctggatgccctgctggagctgtctgaggagcagcagtttgtggccgaggccctggagaagggcaccctgcccctgctgaaggaccaggtgaagtctgtgatggagcagaactgggatgagctggccagcagccccccagacatggactatgaccctgaggcccgcatcctgtgtgccctgtatgtggtggtgtccatcctgctggagctggccgagggccccacctctgtgagcagctag

SEQ ID NO: 317861 - DNA, 1185 bp, Artificial Sequence
  derived and/or modified sequence
atgttcagcgtgttcgaggagatcacccggatcgtggtgaaggagatggacgccggaggggacatgattgcagtgaggtctctcgttgacgccgatcgattccgctgcttccatttggtgggtgagaagcgtacattctttggctgcagacactataccaccggtctgactctaatggacatcctcgatacagatggggacaaatggctggacgagttggactcggggttacagggtcagaaagccgagttccagattttagataacgtcgattctactggcgagctcattgtgcggctccctaaagaaattacgatcagcggaagtttccagggctttcaccatcagaagatcaaaattagcgagaaccggatctcgcagcagtatctggcaaccctcgaaaataggaagctgaagcgtgagttaccatttagttttcgcagcatcaacactcgcgagaacctttacctggtaacggagacattggagacagtgaaagaggaaactctgaaaagcgatcggcagtacaagttttggtcccagatatctcagggacatctgtcatacaaacataaggggcaaagggaagtcactataccccctaacagggtgctctcttaccgggtcaaacagctggtatttcccaacaaggagacgatgaggaaatccctcgggtctgaagattctcgaaacatgaaagaaaagcttgaagatatggagtcggtcttgaaagatctcaccgaggaaaagagaaaggacgtcctcaactctttagccaagtgtctgggaaaggaggacatccgacaagatctggagcaacgagtgtcagaagtgctcatcagtggggaactgcacatggaggaccccgataagcctctactgtcatccttgtttaatgccgctggtgtgctggtggaggccagagctaaggctatcctcgatttcctcgatgctcttctcgaactgagcgaggagcaacaattcgtggccgaggcactcgaaaagggtaccctgcccttgctcaaggatcaggtcaaatctgtgatggagcagaactgggatgagctagcctcctctccaccagacatggactatgatcctgaagctcgcatcctctgcgctctatacgtggtcgttagcatactcctggaacttgcagagggaccaaccagcgtctcaagctag

SEQ ID NO: 317862 - DNA, 1185 bp, Artificial Sequence
  derived and/or modified sequence
atgtttagtgttttcgaagagattacaaggatcgtggtcaaagagatggatgcaggcggagacatgattgccgtgagatccctggtcgacgcagatcgctttcgatgctttcatctggtaggggaaaaaaggactttcttcgggtgccggcactataccacagggctgacactgatggatattctcgataccgatggtgataaatggctcgatgagctggacagtggcctgcagggtcaaaaagctgagttccaaattctagataacgtggatagcaccggggagctcatagtcagactgcccaaagagattactatctccgggagcttccaggggttccaccatcaaaagattaagatctcagagaaccgcatttcccagcagtacctggccaccctggagaatcggaagttgaagcgcgaactgccttttagcttcaggtctataaataccagggaaaacctgtacctcgtcactgagaccctggaaacagtaaaagaagagactctgaaatcggaccggcagtacaagttttggtctcagatttctcagggccacctgtcgtataagcacaaagggcagcgtgaagtaaccatccctcctaatagagtgctgtcatatcgcgtaaaacagttggtcttcccaaacaaggagacaatgcggaagagcctgggaagtgaagacagtagaaatatgaaagagaagttagaggacatggagagtgtactcaaggacttaaccgaggaaaagaggaaggacgtgctgaattcactggctaagtgtctcggcaaggaggatattcgtcaagatcttgagcagagggtctctgaagtccttatctccggggagctgcacatggaagaccctgacaaaccacttctatcatccttgtttaatgcagcgggtgtgcttgtggaggcgagggcaaaggctatcctagactttcttgacgctctgcttgagctttctgaggaacagcagttcgtcgctgaagcgctagagaagggcacactgccgttactcaaggatcaggtaaagtcggtcatggaacagaattgggatgagttagcttcgagcccccctgatatggactatgacccagaggctaggattttatgcgcactgtacgttgtggtgagcatcttgctggagttagctgagggacctacctctgtgagttcatag

SEQ ID NO: 317863 - DNA, 1185 bp, Artificial Sequence
  derived and/or modified sequence
atgttcagcgtgttcgaggagatcaccagaatcgtggtgaaggagatggacgccggcggcgacatgatcgccgtgagaagcctggtggacgccgacagattcagatgcttccacctggtgggcgagaagagaaccttcttcggctgcagacactacaccaccggcctgaccctgatggacatcctggacaccgacggcgacaagtggctggacgagctggacagcggcctgcagggccagaaggccgagttccagatcctggacaacgtggacagcaccggcgagctgatcgtgagactgcccaaggagatcaccatcagcggcagcttccagggcttccaccaccagaagatcaagatcagcgagaacagaatcagccagcagtacctggccaccctggagaacagaaagctgaagagagagctgcccttcagcttcagaagcatcaacaccagagagaacctgtacctggtgaccgagaccctggagaccgtgaaggaggagaccctgaagagcgacagacagtacaagttctggagccagatcagccagggccacctgagctacaagcacaagggccagagagaggtgaccatcccccccaacagagtgctgagctacagagtgaagcagctggtgttccccaacaaggagaccatgagaaagagcctgggcagcgaggacagcagaaacatgaaggagaagctggaggacatggagagcgtgctgaaggacctgaccgaggagaagagaaaggacgtgctgaacagcctggccaagtgcctgggcaaggaggacatcagacaggacctggagcagagagtgagcgaggtgctgatcagcggcgagctgcacatggaggaccccgacaagcccctgctgagcagcctgttcaacgccgccggcgtgctggtggaggccagagccaaggccatcctggacttcctggacgccctgctggagctgagcgaggagcagcagttcgtggccgaggccctggagaagggcaccctgcccctgctgaaggaccaggtgaagagcgtgatggagcagaactgggacgagctggccagcagcccccccgacatggactacgaccccgaggccagaatcctgtgcgccctgtacgtggtggtgagcatcctgctggagctggccgagggccccaccagcgtgagcagctag

SEQ ID NO: 317864 - protein, 162 aa, Artificial Sequence
  derived and/or modified sequence
MAIHKALVMCLGLPLFLFPEQSYQGDMYPTRGVGYETILKEQKGQSMFVENKAFSMDEPVAAKRPVSPYSGYNGQLLTSVYQPTEMALMHKVPSEGAYDIILPRATANSQVMGSANSTLRAEDMYSAQSHQAATPPKDGKNSQVSELTQRGQANTNQVFLRL

SEQ ID NO: 317865 - protein, 442 aa, Artificial Sequence
  derived and/or modified sequence
MAIHKALVMCLGLPLFLFPGAWAQGHVPPGCSQGLNPLYYNLCDRSGAWGIVLEAVAGAGIVTTFVLTIILVASLPFVQDTKKRSLLGTQVFFLLGTLGLFCLVFACVVKPDFSTCASRRFLFGVLFAICFSCLAAHVFALNFLARKNHGPRGWVIFTVALLLTLVEVIINTEWLIITLVRGSGEGGPQGNSSAGWAVASPCAIANMDFVMALIYVMLLLLGAFLGAWPALCGRYKRWRKHGVFVLLTTATSVAIWVVWIVMYTYGNKQHNSPTWDDPTLAIALAANAWAFVLFYVIPEVSQVTKSSPEQSYQGDMYPTRGVGYETILKEQKGQSMFVENKAFSMDEPVAAKRPVSPYSGYNGQLLTSVYQPTEMALMHKVPSEGAYDIILPRATANSQVMGSANSTLRAEDMYSAQSHQAATPPKDGKNSQAQSPQSKTRW

SEQ ID NO: 317866 - DNA, 2574 bp, Artificial Sequence
  derived and/or modified sequence
ggacccaaccagagcctggcctgggagccaggatggccatccacaaagccttggtgatgtgcctgggactgcctctcttcctgttcccaggggcctgggcccagggccatgtcccacccggctgcagccaaggcctcaaccccctgtactacaacctgtgtgaccgctctggggcgtggggcatcgtcctggaggccgtggctggggcgggcattgtcaccacgtttgtgctcaccatcatcctggtggccagcctcccctttgtgcaggacaccaagaaacggagcctgctggggacccaggtattcttccttctggggaccctgggcctcttctgcctcgtgtttgcctgtgtggtgaagcccgacttctccacctgtgcctctcggcgcttcctctttggggttctgttcgccatctgcttctcttgtctggcggctcacgtctttgccctcaacttcctggcccggaagaaccacgggccccggggctgggtgatcttcactgtggctctgctgctgaccctggtagaggtcatcatcaatacagagtggctgatcatcaccctggttcggggcagtggcgagggcggccctcagggcaacagcagcgcaggctgggccgtggcctccccctgtgccatcgccaacatggactttgtcatggcactcatctacgtcatgctgctgctgctgggtgccttcctgggggcctggcccgccctgtgtggccgctacaagcgctggcgtaagcatggggtctttgtgctcctcaccacagccacctccgttgccatatgggtggtgtggatcgtcatgtatacttacggcaacaagcagcacaacagtcccacctgggatgaccccacgctggccatcgccctcgccgccaatgcctgggccttcgtcctcttctacgtcatccccgaggtctcccaggtgaccaagtccagcccagagcaaagctaccagggggacatgtaccccacccggggcgtgggctatgagaccatcctgaaagagcagaagggtcagagcatgttcgtggagaacaaggccttttccatggatgagccggttgcagctaagaggccggtgtcaccatacagcgggtacaatgggcagctgctgaccagtgtgtaccagcccactgagatggccctgatgcacaaagttccgtccgaaggagcttacgacatcatcctcccacgggccaccgccaacagccaggtgatgggcagtgccaactcgaccctgcgggctgaagacatgtactcggcccagagccaccaggcggccacaccgccgaaagacggcaagaactctcaggctcagtccccacaaagtaaaacgagatggtagaagccctcttcccgggactgcacggcatcctgatcctcattcctctgtacccaggctggaccgggcccagcacctttcccatccttgtcattggagctgggaggggccggaggccaccaacctgaagcagtggaccgagtgggcccccgtgaagccctgagtgtgtgactggagcgcctagggccacctccctttcctgcccagcccatcttcctggtccccaggtggctgcagctacaaggagctgtccgcgggcccccaggctgcctccaactcccctcttgacacgcccccctccccccaaatcatagtccctgtgtccccaagctgtggttcagattgccttcttcccctctgtgaacaacaggcctcagtgccccgtcttgactctggaccttcctggccctgccatcttggtgtctggcactggcttgtcccaccctctgcctagatggatctcctccatgagtctttggagccaagccagggcagaagttggcccttgcccttctcaccagggcctcctgccaccacctggactgtggaaggccactgagatgggggcagagctcagcccgaggcttgggcacactgcttctctccacggcctgtgggtcctggatctgagcccttggggtgtttcactcaagagccactgagccgtccccatcttccacaaagcagtttccacaagcaagccagggccagccctgcctgcactctgcccgcagtgcccctcaacgtctgggatgaggatgagcctgctgagatgagggcagctctctccatccagcagtacctcatggagtgctcactaaggagttaggaatggcaggccacgctggcatctggggttcaaggtggctcctgtggcaggaacaggtgtccatgaccctgattacctggatctcacaggttctgggaatgcaataggggcctgctgtggctattccaacatctctggtcagggcctggaagtaccttaggacacatggggttggggtcaggactgcattctcagggaccagtggagagccctggaccagatgaactggagtctaggcctctctcgtgactgggacttgtgggacgtgggaggcctgtgagatccaggactaaagattatgctgtttcctaatgggcagatatgtaagtaggtaagtgggatcctcaggtaagcgggatccagaactaaagactgtgctatttcctg

SEQ ID NO: 317867 - DNA, 1329 bp, Artificial Sequence
  derived and/or modified sequence
atggccatacacaaggccctggtgatgtgtcttggattgccactttttctattccctggggcctgggcgcagggacacgtcccacccggttgttcacagggattgaaccccctttattataatctgtgcgacagaagcggagcttggggcattgtgctcgaagctgtggccggcgccggaattgtgaccacatttgtgctgaccatcattctggtggccagtctgccctttgtgcaggacacaaaaaagcgctccctgctgggcactcaagtcttcttccttctcggtacactaggtctgttttgcctcgttttcgcatgcgtggtgaagccagatttctccacctgtgcatctcgacgattcctgtttggagttctcttcgccatctgcttctcctgccttgccgctcacgtgttcgccttgaatttccttgctaggaagaaccacggaccccgtgggtgggtgatcttcacagtggctctcctgttaacgctggtggaggtgatcatcaataccgaatggttgattatcacccttgtgcgagggtctggcgaagggggaccacaaggtaatagtagtgctggctgggcggtggcatccccctgcgctatagccaatatggattttgtgatggctctcatctatgtcatgttacttctgctgggtgcgttccttggcgcctggcccgcgctctgtggaaggtacaagaggtggcggaaacatggcgtgttcgtgctgctcaccacggcaacttcagtggccatttgggtggtgtggatcgtaatgtacacttatggaaacaagcagcacaatagtccgacctgggatgatcctacgctcgcgatcgcactcgccgccaacgcctgggcctttgtgctcttttatgttattccagaagtttcccaggtcacgaagtcctctcccgaacagtcataccagggcgatatgtaccccacacgtggtgtgggctacgaaactatcctgaaggaacagaaaggtcagagtatgttcgttgagaataaagctttttcaatggacgaaccagtggccgcaaaaagacccgtatctccctatagcggttataacgggcagctgctgacctctgtgtatcaaccaactgagatggcactgatgcacaaggtaccttccgagggcgcttacgacataattcttccacgggccaccgcaaatagccaggtgatgggaagtgccaactccaccctgagagccgaggatatgtactccgcacagtcacaccaggcggccacccctccaaaggacgggaaaaatagccaggcccagagcccacagtcaaaaacacgctggtag

SEQ ID NO: 317868 - DNA, 1329 bp, Artificial Sequence
  derived and/or modified sequence
atggccatccacaaggccctggtgatgtgcctgggcctgcccctcttcctgtttcctggggcctgggcccagggccacgtgcccccaggctgcagccagggcctgaaccccctgtactacaacctgtgtgacagaagtggggcctggggcatcgtgctggaggccgtggccggggccggcatcgtgaccacctttgtgctgaccatcatcctggtggccagcctgccctttgtgcaggacaccaagaagaggagcctgctgggcacccaggtgttcttcctgctgggcaccctgggcctcttctgcctggtgtttgcctgtgtggtgaagccagacttcagcacctgtgccagccgccgcttcctgtttggagtgctgtttgccatctgcttcagctgcctggccgcccacgtgtttgccctgaacttcctggccaggaagaaccacggcccccggggctgggtgatcttcaccgtggccctgctgctgaccctggtggaggtgatcatcaacacagagtggctgatcatcaccctggtgcggggcagcggggagggcggcccccagggcaacagcagcgctggctgggccgtggccagcccctgtgccatcgccaacatggactttgtgatggccctgatctacgtgatgctgctgctgctgggcgccttcctgggcgcctggccagccctgtgtggccgctacaagcgctggaggaagcatggagtgtttgtgctgctgaccacagccacctctgtggccatctgggtggtgtggatcgtgatgtacacctacggcaacaagcagcacaacagccccacctgggatgaccccaccctggccatcgccctggccgccaatgcctgggcctttgtgctcttctacgtgattcctgaggtgtcccaggtgaccaagagcagccctgagcagagctaccagggcgacatgtaccccacccggggcgtgggctatgagaccatcctgaaggagcagaagggccagagcatgtttgtggagaacaaggccttctccatggatgagcctgtggccgccaagaggcctgtgagcccctacagcggctacaacggccagctgctgacctctgtgtaccagcccacagagatggccctgatgcacaaggtgcccagcgagggcgcctatgacatcatcctgccccgggccacagccaacagccaggtgatgggcagcgccaacagcaccctgcgggcagaggacatgtacagcgcccagagccaccaggccgccaccccacccaaggatggcaagaacagccaggcccagagcccccagagcaagacccgctggtag

SEQ ID NO: 317869 - DNA, 1329 bp, Artificial Sequence
  derived and/or modified sequence
atggccatccacaaggccctggtgatgtgcctgggcctgcccctgtttctgtttcctggagcctgggcacagggtcacgtccctccgggatgtagtcaggggctgaatcccctctattataacctctgtgacagaagtggtgcttggggaattgttctggaggcagttgccggagccggtatcgtgacaacatttgtgctcacaattatacttgttgcctctctccctttcgtgcaggacacaaagaaacggtcactgctggggacccaggtgtttttcctcctgggaacactgggacttttctgtcttgtcttcgcttgtgtcgtaaagcccgatttcagtacctgtgcgagtcgcagattcttatttggggttctgttcgctatatgcttttcctgtcttgccgcccatgtgtttgccctcaatttcctggcgcgcaagaaccacggccctcgagggtgggtgatatttactgttgcgctgctgctgactcttgtcgaggtgattatcaacacggagtggctcataatcaccctcgtgagggggagcggtgaggggggaccacagggaaacagctccgccggctgggcagtggcttcgccgtgcgccattgctaacatggattttgttatggctcttatatacgtcatgttactgctgctcggcgcctttctcggggcatggcccgccctttgcggccggtataaacggtggcgcaagcacggtgtctttgtgttactgactaccgcaacttcagtcgcaatttgggtggtttggattgtcatgtatacctacggaaacaagcagcataatagtccgacttgggatgaccctactctggcaattgccctcgctgcaaacgcatgggctttcgtccttttctatgtgattcctgaagttagccaggtcaccaagtccagccctgagcaatcctaccaaggtgatatgtacccaactaggggcgttggctacgagactattctgaaagaacagaagggacagtccatgtttgtagaaaataaggctttctccatggatgaacctgtggccgctaagcgtcctgtgagtccatatagcgggtacaacggccaacttttgacgagtgtctatcagccaaccgagatggctctgatgcacaaggtgccgagtgagggagcctacgacattatcttaccccgcgccacagccaacagtcaggtgatgggctcagcaaattccaccctgcgggctgaagatatgtactccgcacagtcacaccaggccgcaaccccaccaaaagatgggaagaatagtcaagctcagtcccctcagtctaaaacccgatggtag

SEQ ID NO: 317870 - DNA, 1329 bp, Artificial Sequence
  derived and/or modified sequence
atggccatccacaaggcactcgtaatgtgcctcggactccccttgttcctatttcctggggcatgggctcaagggcacgtccctcccggttgctctcagggtctgaatcctctctactacaatttatgcgataggtccggagcctggggtattgtcctggaagctgttgcaggagccggaatcgtaactaccttcgtcctaactatcattctggtcgcttctttaccatttgtgcaagatactaagaagcgaagtctgttgggtacacaagttttcttcctccttggtactctcggcctcttctgccttgttttcgcgtgtgtcgtgaaacccgatttcagtacatgtgccagccgcagattcctatttggggtacttttcgccatttgttttagctgtctggccgctcacgtctttgcgctaaattttctggctcggaagaaccatggcccacgcggatgggtgattttcactgttgccctgttgctgactctcgtcgaagttatcattaataccgagtggcttataatcacgctggtccgtggtagtggcgagggaggacctcaaggaaattcgtccgccggttgggcagtggctagtccatgtgccattgcaaacatggatttcgtgatggccctcatttatgtcatgctgttgctgttgggtgcatttctgggagcttggcccgcattatgtggtcggtataagcggtggcggaagcatggtgttttcgtgcttcttactaccgcaacgtctgtggcaatctgggtggtttggatagtcatgtacacctatggaaataaacaacacaactcccctacctgggacgatccaactctggccattgctctggccgctaacgcatgggcattcgtactattttatgtgattcccgaagtgtcccaggtgacaaaatcatctcctgagcagtcatatcagggtgacatgtacccaactaggggagtggggtatgaaacaatactaaaagaacagaaggggcagtctatgtttgtggaaaataaggctttcagcatggatgagccggttgctgcaaaacgcccagtttccccctactctggctataatggacaactgcttacgagcgtgtatcaacccaccgaaatggcacttatgcacaaggttccaagcgagggtgcttacgatattattctgccacgagcgacagccaacagccaggttatgggatcagctaattccacccttcgtgctgaagatatgtactcagcgcagtcacaccaggcagccacacctccgaaggatggcaaaaactcccaagcccaaagtccccagtccaaaactagatggtag

SEQ ID NO: 317871 - DNA, 1329 bp, Artificial Sequence
  derived and/or modified sequence
atggccatccacaaggccctggtgatgtgcctgggcctgcccctgttcctgttccccggcgcctgggcccagggccacgtgccccccggctgcagccagggcctgaaccccctgtactacaacctgtgcgacagaagcggcgcctggggcatcgtgctggaggccgtggccggcgccggcatcgtgaccaccttcgtgctgaccatcatcctggtggccagcctgcccttcgtgcaggacaccaagaagagaagcctgctgggcacccaggtgttcttcctgctgggcaccctgggcctgttctgcctggtgttcgcctgcgtggtgaagcccgacttcagcacctgcgccagcagaagattcctgttcggcgtgctgttcgccatctgcttcagctgcctggccgcccacgtgttcgccctgaacttcctggccagaaagaaccacggccccagaggctgggtgatcttcaccgtggccctgctgctgaccctggtggaggtgatcatcaacaccgagtggctgatcatcaccctggtgagaggcagcggcgagggcggcccccagggcaacagcagcgccggctgggccgtggccagcccctgcgccatcgccaacatggacttcgtgatggccctgatctacgtgatgctgctgctgctgggcgccttcctgggcgcctggcccgccctgtgcggcagatacaagagatggagaaagcacggcgtgttcgtgctgctgaccaccgccaccagcgtggccatctgggtggtgtggatcgtgatgtacacctacggcaacaagcagcacaacagccccacctgggacgaccccaccctggccatcgccctggccgccaacgcctgggccttcgtgctgttctacgtgatccccgaggtgagccaggtgaccaagagcagccccgagcagagctaccagggcgacatgtaccccaccagaggcgtgggctacgagaccatcctgaaggagcagaagggccagagcatgttcgtggagaacaaggccttcagcatggacgagcccgtggccgccaagagacccgtgagcccctacagcggctacaacggccagctgctgaccagcgtgtaccagcccaccgagatggccctgatgcacaaggtgcccagcgagggcgcctacgacatcatcctgcccagagccaccgccaacagccaggtgatgggcagcgccaacagcaccctgagagccgaggacatgtacagcgcccagagccaccaggccgccaccccccccaaggacggcaagaacagccaggcccagagcccccagagcaagaccagatggtag

SEQ ID NO: 317872 - DNA, 849 bp, Artificial Sequence
  derived and/or modified sequence
atggaactgctgattatggcatacgctttaaagacagcgtgtgctcgaaatataattggcgtgataccatacttcccatactccaagcagtcaaagatgagaaagcgagggagcatcgtgtgtaagcttctggcgagtatgctagccaaagccggcttaactcacatcatcaccatggatctgcaccagaaagaaattcagggattcttcagctttcccgtggataacctgcgtgcttccccatttctcctgcaatatatacaggaagagatccccaattaccgcaatgcagtcatagtagccaagtcccccgatgcagcaaaaagagctcaatcctacgcagagaggctccgccttggccttgcagtaattcacggggaagctcaatgcacggaactcgatatggacgacgggcgacactctcccccgatggtgaaaaatgccacggtgcatcctggactcgaattacctttaatgatggctaaggagaagcctcctatcactgtggtcggagatgtaggcgggcgaatcgccataatcgtcgatgacattatcgacgacgtggaatccttcgtggccgcggccgaaatcctgaaagagcggggagcctacaagatttacgtcatggcaactcacggtattctgtcagcggaagcaccaagactgatcgaggagtccagtgtcgacgaggtagtggtgaccaatactgtcccgcacgaagtgcagaagctgcagtgtcccaaaataaagaccgttgacatttcactgatcctgtcggaggccattcggaggatccacaatggcgagtcaatggcgtatttgttccgaaacatcacggtggacgactag

SEQ ID NO: 317873 - DNA, 849 bp, Artificial Sequence
  derived and/or modified sequence
atggagctgctgatcatggcctatgccctgaagacagcctgtgccaggaacatcattggagtcatcccctacttcccctacagcaagcagagcaagatgaggaagaggggcagcatcgtgtgcaagctgctggcctccatgctggccaaggccggcctgacccacatcatcaccatggacctgcaccagaaggagatccagggcttcttctccttccctgtggacaacctgcgggccagccccttcctgctgcagtacatccaggaggagatccccaactacagaaatgctgtgattgtggccaagagcccagatgctgccaagagggcccagagctatgcagagcggctgcggctgggcctggccgtcatccatggagaggcccagtgcacagagctggacatggatgatggccgccacagcccccccatggtgaagaatgccaccgtgcaccctggcctggagctgcccctgatgatggccaaggagaagccacccatcaccgtggtgggagatgtgggcggcagaattgccatcatcgtggatgacatcattgatgatgtggagagctttgtggccgctgctgagatcctgaaggagcggggggcctacaagatctacgtgatggccacccacggcatcctgtctgctgaggccccccggctgattgaggagagctctgtggatgaggtggtggtgaccaacacagtgccccatgaggtgcagaagctgcagtgccccaagatcaagacagtggacatcagcctcatcctgtctgaggccatccgccgcatccacaatggagagagcatggcctacctgttcaggaacatcaccgtggatgactag

SEQ ID NO: 317874 - DNA, 849 bp, Artificial Sequence
  derived and/or modified sequence
atggagctgctgatcatggcctacgccctgaagaccgcctgcgcccgaaatataattggagtaattccttattttccttattccaagcaaagtaagatgcgcaagcgggggtccatcgtgtgcaagcttcttgcctctatgctggctaaggctggtttaactcatattattaccatggaccttcaccagaaagaaattcaaggtttcttttccttcccggtagataatttgcgtgcctcaccattcctgctccagtatattcaggaggagatccctaactatagaaatgccgtcatcgtggccaagtcaccagatgccgcgaaaagggcacaatcatacgcagagcggctgcggctgggactagccgttattcatggcgaggcgcagtgcactgaactggatatggatgatggcaggcattctccacccatggtgaaaaacgctactgtgcatccggggctggagctgccgttgatgatggctaaggagaagccaccgattactgtagttggcgatgttggcgggcgcatcgccattatcgtggatgacattatcgacgacgtggagtcctttgtggctgctgcagagatactgaaggagcgcggggcctacaaaatatacgtcatggctacccacggtattctgtctgccgaggcccccaggctcattgaagaaagtagcgtcgatgaggtcgtcgtgactaacacggtgccccacgaggtgcaaaagctgcagtgccctaaaatcaaaacagtggacatctctctgatactgtccgaggctattaggcgcattcacaacggtgaatcgatggcctatctgtttagaaatattacagtggatgactag

SEQ ID NO: 317875 - DNA, 849 bp, Artificial Sequence
  derived and/or modified sequence
atggaattgctgattatggcctacgcgctcaaaaccgcctgtgcaagaaacattatcggagtgatcccatactttccttactctaagcagtcgaagatgcgcaagagaggtagtatagtctgtaaactcctggccagtatgctcgctaaggccggtctgacccatattatcaccatggatctgcaccagaaggagatccagggatttttcagtttccccgtggacaatctgagggccagtccttttctgctgcaatacattcaggaggagatcccgaactaccgaaatgctgttattgtagccaagtctccagacgccgctaagcgcgctcagtcatacgctgaaaggctgcgactggggctagccgtgatccacggtgaagctcagtgtaccgaactggacatggacgacgggcgacattctccaccaatggttaaaaacgcgacggttcaccccggtctggagctccctctgatgatggcaaaggagaaacctccaatcacggtggtaggagacgtgggcggaagaatcgcaatcatcgtggacgacatcattgacgatgtcgaatcttttgtggccgctgctgaaatactgaaggagagaggtgcttacaagatctatgtcatggctactcacggcattctctcggccgaagccccacgtttgattgaagagagctcagtcgacgaggttgttgttactaacaccgtcccacacgaagttcagaaactgcaatgccctaaaatcaagaccgttgatatcagccttattctttccgaagctattaggaggatccataacggtgaaagcatggcctatttgtttcgcaacataacagtagatgattag

SEQ ID NO: 317876 - DNA, 849 bp, Artificial Sequence
  derived and/or modified sequence
atggagctgctgatcatggcctacgccctgaagaccgcctgcgccagaaacatcatcggcgtgatcccctacttcccctacagcaagcagagcaagatgagaaagagaggcagcatcgtgtgcaagctgctggccagcatgctggccaaggccggcctgacccacatcatcaccatggacctgcaccagaaggagatccagggcttcttcagcttccccgtggacaacctgagagccagccccttcctgctgcagtacatccaggaggagatccccaactacagaaacgccgtgatcgtggccaagagccccgacgccgccaagagagcccagagctacgccgagagactgagactgggcctggccgtgatccacggcgaggcccagtgcaccgagctggacatggacgacggcagacacagcccccccatggtgaagaacgccaccgtgcaccccggcctggagctgcccctgatgatggccaaggagaagccccccatcaccgtggtgggcgacgtgggcggcagaatcgccatcatcgtggacgacatcatcgacgacgtggagagcttcgtggccgccgccgagatcctgaaggagagaggcgcctacaagatctacgtgatggccacccacggcatcctgagcgccgaggcccccagactgatcgaggagagcagcgtggacgaggtggtggtgaccaacaccgtgccccacgaggtgcagaagctgcagtgccccaagatcaagaccgtggacatcagcctgatcctgagcgaggccatcagaagaatccacaacggcgagagcatggcctacctgttcagaaacatcaccgtggacgactag

SEQ ID NO: 317877 - protein, 97 aa, Artificial Sequence
  derived and/or modified sequence
MVFVRRPWPALTTVLLALLVCLGALVDAYPIKPEAPREDASPEELNRYYASLRHYLNLVTRQRYGKRDGPDTLLSKTFFPDGEDRPVRSRSEGPDLW

SEQ ID NO: 317878 - DNA, 294 bp, Artificial Sequence
  derived and/or modified sequence
atggtgtttgttagacgaccctggcctgcactgactactgtgctgctcgccttgctggtgtgcctgggagcactcgtggatgcatatcccatcaaacccgaggcccccagggaagacgcttcccctgaagagctaaacagatactacgctagccttcgacattacctgaatctggtaacacggcagcgttatggcaagagggatgggcctgatacccttctgtcaaagactttcttccccgatggcgaagacaggcccgtacggtctcgatcggaggggccggacttatggtag

SEQ ID NO: 317879 - DNA, 294 bp, Artificial Sequence
  derived and/or modified sequence
atggtgtttgtgagaagaccctggccagccctgaccaccgtgctgctggccctgctggtgtgcctgggcgccctggtggatgcctaccccatcaagccagaggccccccgggaggatgccagccctgaggagctgaaccgctactatgccagcctgcggcactacctgaacctggtgacccggcagagatatggcaagagagatggccctgacaccctgctgagcaagaccttcttcccagatggagaagatagacctgtgcgcagccgctctgagggccctgacctgtggtag

SEQ ID NO: 317880 - DNA, 294 bp, Artificial Sequence
  derived and/or modified sequence
atggtgttcgtgcggcggccctggcccgccctgaccaccgtgctgttagccctcctcgtctgtttgggcgcactggtggatgcatacccaataaagccagaagctccacgcgaggacgcgtcccctgaggaattgaatcgctactacgcttccctgcggcattacctcaatcttgtgacccgtcagagatacggcaagagagatgggcccgacaccctgttaagcaaaactttctttccggatggtgaagacaggcctgttagaagtcggagtgaggggccagacctttggtag

SEQ ID NO: 317881 - DNA, 1048 bp, Artificial Sequence
  derived and/or modified sequence
gcccctggaggaactgaacccactatcggtcatggggccgagactaaatgtggcgggttgtctttaatctgctgccaagaggaaactcattcaggcaagttcagccctttatgaggaattcccctgtggtcacattccaattcctggacctgctgccaccctcagaactgcatgctccttcttcagactttctaagaatgactcaggtcattggtggagtgaagtcaagatttccaactcagtcacctgaagagatggagataccattcatggagctggaggtccctggagatttgggaattcagataacaagctaagataaggagtttgcctacctctgtcctagagcgaagcctgagccttgggcgcgcagcacaccacaagtatctgttactgtgttttgcagaagcttcaggcggggatataagccccacaaggaaagcgctgagcagaggaggcctcagcttgacctgcggcagtgcagcccttgggacttccctcgccttccacctcctgctcgtctgcttcacaagctatcgctatggtgttcgtgcgcaggccgtggcccgccttgaccacagtgcttctggccctgctcgtctgcctaggggcgctggtcgacgcctaccccatcaaacccgaggctccccgcgaagacgcctcgccggaggagctgaaccgctactacgcctccctgcgccactacctcaacctggtcacccggcagcggtatgggaaaagagacggcccggacacgcttctttccaaaacgttcttccccgacggcgaggaccgccccgtcaggtcgcggtcggagggcccagacctgtggtgaggacccctgaggcctcctgggagatctgccaaccacgcccacgtcatttgcatacgcactcccgaccccagaaacccggattctgcctcccgacggcggcgtctgggcagggttcgggtgcggccctccgcccgcgtctcggtgcccccgccccctgggctggagggctgtgtgtggtccttccctggtcccaaaataaagagcaaattccac

SEQ ID NO: 317882 - DNA, 294 bp, Artificial Sequence
  derived and/or modified sequence
atggttttcgtccgacgcccttggccagctctgaccaccgtgcttctcgccctcttggtgtgcttaggggctcttgtggatgcatatcctattaaaccagaagcacccagggaggacgcgagcccagaggagctcaatagatattatgcgagtttgagacactacttaaatctggttacacggcagcgctatgggaagcgcgacggacctgataccctgctgagtaagacgttttttccagacggggaagatcgccctgtcaggagccgcagcgaaggcccagatctatggtag

SEQ ID NO: 317883 - DNA, 294 bp, Artificial Sequence
  derived and/or modified sequence
atggtgttcgtgagaagaccctggcccgccctgaccaccgtgctgctggccctgctggtgtgcctgggcgccctggtggacgcctaccccatcaagcccgaggcccccagagaggacgccagccccgaggagctgaacagatactacgccagcctgagacactacctgaacctggtgaccagacagagatacggcaagagagacggccccgacaccctgctgagcaagaccttcttccccgacggcgaggacagacccgtgagaagcagaagcgagggccccgacctgtggtag

SEQ ID NO: 317884 - protein, 160 aa, Artificial Sequence
  derived and/or modified sequence
GPDVTAGGPVEARQHPYALQCPGWSHPHPVQGGGLPAAGGQPAGPAWGAPCPPGGGEPGVAPGAADRRGGRGQVQERQREREGADEGHHRDLPDAAALSQGHTAAVCGQLLPERAGLGTRCHLQSSTSSTSWTSRQRSTTSRMKTPSTSGRRTAYRSGSG

SEQ ID NO: 317885 - protein, 1001 aa, Artificial Sequence
  derived and/or modified sequence
MPSTNRAGSLKDPEIAELFFKEDPEKLFTDLREIGHGSFGAVYFARDVRTNEVVAIKKMSYSGKQSTEKWQDIIKEVKFLQRIKHPNSIEYKGCYLREHTAWLVMEYCLGSASDLLEVHKKPLQEVEIAAITHGALQGLAYLHSHTMIHRDIKAGNILLTEPGQVKLADFGSASMASPANSFVGTPYWMAPEVILAMDEGQYDGKVDVWSLGITCIELAERKPPLFNMNAMSALYHIAQNESPTLQSNEWSDYFRNFVDSCLQKIPQDRPTSEELLKHIFVLRERPETVLIDLIQRTKDAVRELDNLQYRKMKKLLFQEAHNGPAVEAQEEEEEQDHGVGRTGTVNSVGSNQSIPSMSISASSQSSSVNSLPDVSDDKSELDMMEGDHTVMSNSSVIHLKPEEENYREEGDPRTRASDPQSPPQVSRHKSHYRNREHFATIRTASLVTRQMQEHEQDSELREQMSGYKRMRRQHQKQLMTLENKLKAEMDEHRLRLDKDLETQRNNFAAEMEKLIKKHQAAMEKEAKVMSNEEKKFQQHIQAQQKKELNSFLESQKREYKLRKEQLKEELNENQSTPKKEKQEWLSKQKENIQHFQAEEEANLLRRQRQYLELECRRFKRRMLLGRHNLEQDLVREELNKRQTQKDLEHAMLLRQHESMQELEFRHLNTIQKMRCELIRLQHQTELTNQLEYNKRRERELRRKHVMEVRQQPKSLKSKELQIKKQFQDTCKIQTRQYKALRNHLLETTPKSEHKAVLKRLKEEQTRKLAILAEQYDHSINEMLSTQALRLDEAQEAECQVLKMQLQQELELLNAYQSKIKMQAEAQHDRELRELEQRVSLRRALLEQKIEEEMLALQNERTERIRSLLERQAREIEAFDSESMRLGFSNMVLSNLSPEAFSHSYPGASGWSHNPTGGPGPHWGHPMGGPPQAWGHPMQGGPQPWGHPSGPMQGVPRGSSMGVRNSPQALRRTASGGRTEQGMSRSTSVTSQISNGSHMSYT

SEQ ID NO: 317886 - DNA, 206 bp, Artificial Sequence
  derived and/or modified sequence
aatggaatcaacatcaaacggaatcaaatggaattatcgaatggaatcgaagagaatcatcgaattgtcacgaatggaatcatctaatggaatggaatggaataatccatggcccctatgcaatggactcgaatgaaatcatcatcaaacagaatcgaatggaatcatctaatggaatggaatggcataatccatggactcgaatg

SEQ ID NO: 317887 - DNA, 3006 bp, Artificial Sequence
  derived and/or modified sequence
atgcccagcaccaacagagccggcagcctgaaggaccccgagatcgccgagctgttcttcaaggaggaccccgagaagctgttcaccgacctgagagagatcggccacggcagcttcggcgccgtgtacttcgccagagacgtgagaaccaacgaggtggtggccatcaagaagatgagctacagcggcaagcagagcaccgagaagtggcaggacatcatcaaggaggtgaagttcctgcagagaatcaagcaccccaacagcatcgagtacaagggctgctacctgagagagcacaccgcctggctggtgatggagtactgcctgggcagcgccagcgacctgctggaggtgcacaagaagcccctgcaggaggtggagatcgccgccatcacccacggcgccctgcagggcctggcctacctgcacagccacaccatgatccacagagacatcaaggccggcaacatcctgctgaccgagcccggccaggtgaagctggccgacttcggcagcgccagcatggccagccccgccaacagcttcgtgggcaccccctactggatggcccccgaggtgatcctggccatggacgagggccagtacgacggcaaggtggacgtgtggagcctgggcatcacctgcatcgagctggccgagagaaagccccccctgttcaacatgaacgccatgagcgccctgtaccacatcgcccagaacgagagccccaccctgcagagcaacgagtggagcgactacttcagaaacttcgtggacagctgcctgcagaagatcccccaggacagacccaccagcgaggagctgctgaagcacatcttcgtgctgagagagagacccgagaccgtgctgatcgacctgatccagagaaccaaggacgccgtgagagagctggacaacctgcagtacagaaagatgaagaagctgctgttccaggaggcccacaacggccccgccgtggaggcccaggaggaggaggaggagcaggaccacggcgtgggcagaaccggcaccgtgaacagcgtgggcagcaaccagagcatccccagcatgagcatcagcgccagcagccagagcagcagcgtgaacagcctgcccgacgtgagcgacgacaagagcgagctggacatgatggagggcgaccacaccgtgatgagcaacagcagcgtgatccacctgaagcccgaggaggagaactacagagaggagggcgaccccagaaccagagccagcgacccccagagccccccccaggtgagcagacacaagagccactacagaaacagagagcacttcgccaccatcagaaccgccagcctggtgaccagacagatgcaggagcacgagcaggacagcgagctgagagagcagatgagcggctacaagagaatgagaagacagcaccagaagcagctgatgaccctggagaacaagctgaaggccgagatggacgagcacagactgagactggacaaggacctggagacccagagaaacaacttcgccgccgagatggagaagctgatcaagaagcaccaggccgccatggagaaggaggccaaggtgatgagcaacgaggagaagaagttccagcagcacatccaggcccagcagaagaaggagctgaacagcttcctggagagccagaagagagagtacaagctgagaaaggagcagctgaaggaggagctgaacgagaaccagagcacccccaagaaggagaagcaggagtggctgagcaagcagaaggagaacatccagcacttccaggccgaggaggaggccaacctgctgagaagacagagacagtacctggagctggagtgcagaagattcaagagaagaatgctgctgggcagacacaacctggagcaggacctggtgagagaggagctgaacaagagacagacccagaaggacctggagcacgccatgctgctgagacagcacgagagcatgcaggagctggagttcagacacctgaacaccatccagaagatgagatgcgagctgatcagactgcagcaccagaccgagctgaccaaccagctggagtacaacaagagaagagagagagagctgagaagaaagcacgtgatggaggtgagacagcagcccaagagcctgaagagcaaggagctgcagatcaagaagcagttccaggacacctgcaagatccagaccagacagtacaaggccctgagaaaccacctgctggagaccacccccaagagcgagcacaaggccgtgctgaagagactgaaggaggagcagaccagaaagctggccatcctggccgagcagtacgaccacagcatcaacgagatgctgagcacccaggccctgagactggacgaggcccaggaggccgagtgccaggtgctgaagatgcagctgcagcaggagctggagctgctgaacgcctaccagagcaagatcaagatgcaggccgaggcccagcacgacagagagctgagagagctggagcagagagtgagcctgagaagagccctgctggagcagaagatcgaggaggagatgctggccctgcagaacgagagaaccgagagaatcagaagcctgctggagagacaggccagagagatcgaggccttcgacagcgagagcatgagactgggcttcagcaacatggtgctgagcaacctgagccccgaggccttcagccacagctaccccggcgccagcggctggagccacaaccccaccggcggccccggcccccactggggccaccccatgggcggccccccccaggcctggggccaccccatgcagggcggcccccagccctggggccaccccagcggccccatgcagggcgtgcccagaggcagcagcatgggcgtgagaaacagcccccaggccctgagaagaaccgccagcggcggcagaaccgagcagggcatgagcagaagcaccagcgtgaccagccagatcagcaacggcagccacatgagctacacctag

SEQ ID NO: 317888 - DNA, 3006 bp, Artificial Sequence
  derived and/or modified sequence
atgccaagcaccaaccgggccggctcgctaaaggatccggaaattgccgagctcttctttaaggaagaccccgaaaaactgttcacagatctgcgtgagatcggccacggaagtttcggtgccgtttatttcgcaagggacgtgcgaaccaacgaggtggttgctattaagaagatgtcctattccggaaaacagagtaccgagaagtggcaggatatcatcaaggaagtgaaatttctgcaaagaataaagcaccccaacagcatagaatacaaggggtgctacctccgtgaacacacggcctggcttgtgatggaatattgtttaggaagtgctagcgacttactggaggtccacaagaagcctctccaggaagtggagatagccgcgattacccacggtgctcttcaggggctcgcttatttacattctcacaccatgattcacagagatatcaaggccggcaatattctgctaaccgagccaggtcaggtgaaactagctgacttcggttctgctagcatggcatcccctgctaattcttttgtagggacgccctactggatggctcctgaagtgatcctggccatggacgagggacagtatgatgggaaggtagatgtctggtctttggggatcacatgcatcgaactggcagagagaaagcccccactctttaacatgaatgctatgtccgctctctatcacatcgcccagaatgagtctcctacgttacagagcaacgagtggagtgactacttccgtaatttcgttgatagctgcctccagaagattccccaagataggcccacatccgaggagcttttaaaacatatttttgtactaagagagaggcctgagacagttctgatagacctcatacaaaggacgaaggacgcagtgagggaactcgataatctgcaatatagaaagatgaaaaagttactgttccaggaagctcacaatggccctgcagttgaggcgcaggaagaggaggaagaacaggaccacggtgtggggaggaccggtaccgttaatagtgtcggctccaatcagtccataccatcgatgtccatcagtgcatcaagtcaatcatcgagcgtcaattcactgccagatgtgagcgacgataagtccgaattggatatgatggaaggagaccacaccgtgatgagtaatagcagtgtgatccacctcaaaccagaggaggagaattacagagaggaaggcgatcctcgtactagggcctcagacccgcagagtccaccccaggtgtctcgccacaagtcccattaccggaaccgcgagcattttgctactatacggaccgcctccctggttacccggcagatgcaagaacatgagcaagattccgaactgcgtgagcagatgtcaggctataaacggatgcgcagacagcaccagaaacaactgatgacactcgagaacaagctcaaggcggaaatggatgagcatagactccgtctggataaggatttagaaactcagcggaacaatttcgccgccgagatggagaaattgattaaaaagcaccaagctgccatggagaaggaggcaaaggtgatgtcaaacgaagaaaagaagttccagcagcatattcaggctcagcagaaaaaagaactcaactcatttctcgaatctcagaagcgggagtacaaacttcggaaggaacagttgaaggaagagttaaatgagaaccagtcaacaccaaaaaaagagaagcaggaatggctctcaaaacaaaaagagaacatccagcactttcaggcggaggaggaagccaacctgcttcgccggcagaggcagtatctggagctagagtgccgtcgctttaagaggcgtatgctactcggtcggcataatctggagcaagatttggttcgagaggagttgaataagcggcaaacccagaaggacttggaacacgcgatgctactgaggcagcacgagtcgatgcaggagctggagttcagacacctgaacaccattcagaagatgagatgtgagctcatcaggcttcagcaccagaccgaactcacgaaccagctggagtataacaaacggagagagcgggagctgaggcgtaaacacgtgatggaggttagacagcagcccaaatcactaaaatcaaaagaactgcaaataaaaaagcaattccaggatacctgtaagatccagacacggcagtacaaggccctgcggaatcatctgctcgaaaccacgcctaaatctgaacacaaagccgtcctcaagcggctgaaagaggaacagacccggaagttagcaattctggcagagcagtacgatcactctatcaacgagatgctctctacccaggcactgagactggatgaagcccaagaagcagaatgtcaagtattgaagatgcaactccagcaggagctggagttactgaatgcctatcagagcaaaattaaaatgcaagccgaggcccagcatgaccgggaattacgtgagctggagcagagagtatctttgcgtcgcgccctcttagagcagaagatcgaagaggagatgcttgcactgcagaatgaaagaacagagagaatccgaagcctacttgaacgccaagccagggaaattgaggcgtttgatagtgaaagcatgaggctggggttcagtaacatggtgctttctaacctcagccccgaggctttctcccattcataccctggcgccagcggctggagccacaaccccaccggcggacccgggcctcattggggacatccaatggggggccctccccaggcatgggggcatcctatgcagggaggaccgcagccttggggacacccctccggccctatgcagggagtgcctcgggggtcgagcatgggcgtccggaattcacctcaagcactgcgtaggaccgcctcagggggaaggactgagcagggtatgagccgttccacatctgtgacatcccaaattagcaacggctctcatatgtcttatacctag

SEQ ID NO: 317889 - DNA, 3006 bp, Artificial Sequence
  derived and/or modified sequence
atgcccagcaccaacagagctggcagcctgaaggaccctgagattgctgagctgttcttcaaggaggaccctgagaagctgttcacagacctgcgggagatcggccacggcagctttggagctgtgtactttgccagagatgtgaggaccaatgaggtggtggccatcaagaagatgagctacagcggcaagcagagcacagagaagtggcaggacatcatcaaggaggtgaagttcctgcagaggatcaagcaccccaacagcattgagtacaagggctgctacctgcgggagcacacagcctggctggtgatggagtactgcctgggcagcgccagtgacctgctggaggtgcacaagaagcccctgcaggaggtggagattgctgccatcacccatggagccctgcagggcctggcctacctgcacagccacaccatgatccaccgggacatcaaggccggcaacatcctgctgacagagcccggccaggtgaagctggccgactttggcagcgcctccatggccagccctgccaacagctttgtgggcaccccctactggatggcccctgaggtgatcctggccatggatgagggccagtatgatggcaaggtggatgtgtggagcctgggcatcacctgcatcgagctggccgagaggaagcccccactcttcaacatgaatgccatgtctgccctgtaccacatcgcccagaatgaaagccccaccctgcagagcaatgagtggagcgactacttcaggaactttgtggacagctgcctgcagaagatcccccaggaccggcccaccagcgaggagctgctgaagcacatctttgtgctgcgggagaggcctgagaccgtgctgattgacctgatccagaggaccaaggatgctgtgcgggagctggacaacctgcagtacaggaagatgaagaagctgctcttccaggaggcccacaacggccctgctgtggaggcccaggaggaggaggaggagcaggaccatggagtgggccgcacaggcaccgtgaacagcgtgggcagcaaccagagcatccccagcatgagcatcagcgccagcagccagagcagctctgtgaacagcctgcctgatgtgtctgatgacaagtctgagctggacatgatggagggggaccacacagtgatgagcaacagcagcgtcatccacctgaagccagaggaggagaactaccgggaggagggggaccccaggacccgggccagtgacccccagagccccccccaggtgagccgccacaagagccactacagaaaccgggagcactttgccaccatcagaacagccagcctggtgacccggcagatgcaggagcacgagcaggacagcgagctgcgggagcagatgagcggctacaagaggatgaggcggcagcaccagaagcagctgatgaccctggagaacaagctgaaggccgagatggatgagcaccggctgcggctggacaaggacctggagacccagaggaacaactttgctgctgagatggagaagctgatcaagaagcaccaggccgccatggagaaggaggccaaggtgatgagcaatgaggagaagaagttccagcagcacatccaggcccagcagaagaaggagctgaacagcttcctggagagccagaagcgggagtacaagctgaggaaggagcagctgaaggaggagctgaatgaaaaccagagcacccccaagaaggagaagcaggagtggctgagcaagcagaaggagaacatccagcacttccaggccgaggaggaggccaacctgctgcggcggcagaggcagtacctggagctggagtgccgccgcttcaagaggaggatgctgctgggccgccacaacctggagcaggacctggtgcgggaggagctgaacaagaggcagacccagaaggacctggagcacgccatgctgctgcggcagcacgagagcatgcaggagctggagttccgccacctgaacaccatccagaagatgagatgtgagctgatccggctgcagcaccagacagagctgaccaaccagctggagtacaacaagagaagagagcgggagctgcggaggaagcacgtgatggaggtgcggcagcagcccaagagcctgaagagcaaggagctgcagatcaagaagcagttccaggacacctgcaagatccagacccggcagtacaaggccctgaggaaccacctgctggagaccacccccaagtctgagcacaaggctgtgctgaagaggctgaaggaggagcagaccaggaagctggccatcctggccgagcagtatgaccacagcatcaatgagatgctgagcacccaggccctgcggctggatgaggcccaggaggccgagtgccaggtgctgaagatgcagctgcagcaggagctggagctgctgaatgcctaccagagcaagatcaagatgcaggccgaggcccagcacgaccgggagctgcgggagctggagcagagggtgtccctgcggcgggccctgctggagcagaagattgaggaggagatgctggccctgcagaatgaaagaacagagcgcatccgcagcctgctggagcggcaggcccgggagattgaggcctttgacagcgagagcatgaggctgggcttcagcaacatggtgctgagcaacctgagccctgaggccttcagccacagctacccaggggccagcggctggagccacaaccccactggaggccctggcccccactggggccaccccatgggcggccccccccaggcctggggccaccccatgcagggcggcccccagccctggggccaccccagcggccccatgcagggcgtgccccggggcagctccatgggcgtgaggaacagcccccaggccctgcggaggacagccagcggcggccgcacagagcagggcatgagccgcagcacctctgtgaccagccagatcagcaatggcagccacatgagctacacctag

SEQ ID NO: 317890 - DNA, 3006 bp, Artificial Sequence
  derived and/or modified sequence
atgcccagcaccaaccgggccggcagcctgaaggaccccgagatcgcagaattgttcttcaaagaggaccccgagaagctcttcaccgacttgagggagatcggccacggcagctttggagccgtctacttcgctagggacgtcaggactaacgaggtggtggcaatcaaaaagatgtcatactctgggaaacagagcaccgagaaatggcaagacattattaaggaggtgaaatttctgcagcggatcaaacaccccaatagtatcgaatacaagggctgctatctcagggagcataccgcatggctagtgatggagtactgtttgggtagtgcctccgacctgctggaagtccataagaagccactgcaagaagttgagatagccgccatcacacacggcgccctgcaagggttggcatatctccattcccataccatgatccaccgcgatattaaggcaggcaacatcttgctgaccgagcctgggcaggtgaagctcgctgatttcggatccgcctcaatggcgagtcccgctaatagcttcgtggggacgccatactggatggctccagaagtgatcctcgcaatggacgaaggccagtacgatggaaaagttgatgtctggagccttgggatcacctgtatcgagctggccgaaagaaaacccccattattcaacatgaacgccatgagcgcgctgtaccatatagcccaaaacgagtctcctaccctccagagtaacgaatggtcggactacttcagaaacttcgtggacagttgtctacagaaaattccccaggatcggccaacctcagaggaattgctgaagcacatttttgtgctgagagagcgccccgagacagtgctgattgatctgattcagcggacgaaagatgccgttcgggaactggacaatctgcaatatcgcaagatgaagaaacttctcttccaggaggcccataacggtcctgccgtggaggcccaggaggaggaggaggagcaggaccacggcgtgggccgtacagggaccgtaaacagcgtcggatccaaccagtccatcccatcaatgtccataagtgcttcttctcagtctagctccgtgaattctctgcctgacgtatctgacgacaagagcgagctggacatgatggagggcgatcacactgtgatgagtaatagctctgtcattcatctaaaaccggaggaggagaactatcgcgaggagggtgatcctcggacacgggcctctgacccccagagtccaccccaggtgtctcgccataagagccactataggaacagagaacacttcgccaccatccgcacagcctcactggtgacgcggcagatgcaggaacacgagcaggacagtgagctgcgcgaacaaatgtccggctataagcgcatgaggcgccaacatcaaaaacaattgatgacactggagaataaactgaaggccgagatggatgaacaccggctccggttggataaggacctcgaaacccaacggaacaatttcgccgctgagatggagaagttgatcaagaaacaccaagccgcaatggagaaagaagccaaggtgatgtccaacgaagaaaaaaagttccagcaacatatccaggcgcagcaaaagaaagagcttaattcatttctcgaatctcagaaaagagagtataagctgcggaaggagcagcttaaagaggaattaaatgagaatcagtccactcctaaaaaggagaaacaggagtggctgagtaaacagaaggagaacattcagcacttccaagctgaagaggaggctaatcttctcaggcgccagcgtcaatatctcgaacttgaatgccggcgctttaagcggcggatgctgctgggaaggcataaccttgaacaggatttagtgcgcgaggaactgaataagaggcagacgcaaaaagacctcgaacatgctatgctcttacggcagcatgagtctatgcaggagcttgaattcagacacttaaacaccattcagaaaatgcggtgtgagcttatcaggttacagcaccagacggagctcaccaatcagctggaatacaacaaacggagggaacgggagctgcgacggaaacacgtcatggaggtgaggcagcagccaaagtcactaaaatctaaggagttgcagatcaaaaagcagtttcaagacacgtgcaaaatccagaccagacagtataaggcattgcggaaccatttactggagactactccaaagtcagagcataaagcggtgctcaaacgcctcaaggaggaacagacccggaagctcgcgattctcgcggaacaatatgatcatagtattaacgagatgctgtcaacacaggcccttcggctggacgaagctcaggaagcagagtgtcaggtgctcaagatgcagcttcagcaggaactcgagctgctgaacgcttaccagtccaagataaagatgcaggctgaggcgcaacatgatagagagttgagagagctggaacagagagtgtccctgcgtcgagcactcctggagcagaagattgaagaggaaatgctggcactccagaatgagagaaccgaacgtatccggtcgctgctcgagcggcaagcaagagagatcgaggccttcgattctgagtctatgagactgggctttagtaacatggtcctgtccaatctttctccagaagcttttagtcacagctacccaggggctagtggatggtcacataaccccacaggtggtccaggccctcattgggggcacccaatggggggacctccgcaggcatggggccacccaatgcaggggggaccccagccatgggggcacccctcaggcccgatgcaaggcgtgcctagaggaagctccatgggcgtgcgcaacagtccacaagcactcagacggaccgctagtggtgggcgaaccgagcagggcatgtctaggagcacttccgtcacctcacagatctctaatgggtcccacatgtcctatacatag

SEQ ID NO: 317891 - DNA, 3006 bp, Artificial Sequence
  derived and/or modified sequence
atgccatctaccaatcgggctggtagtctcaaggatccagaaattgccgagctgttcttcaaagaagacccagaaaagctgttcaccgaccttcgggaaatagggcacggaagttttggcgctgtgtactttgccagagacgttcggacgaacgaagtcgtggccattaaaaaaatgtcctactctgggaaacaatcaaccgagaaatggcaggatatcatcaaggaggtcaagttcttacagcggattaagcacccaaacagtatcgagtataaaggatgctacttgcgcgaacatacagcttggctggtaatggagtactgcctcggatccgctagtgatctgctggaagttcataagaagcccttgcaagaggtcgagatagcggctataacccatggcgcattacagggtttggcttatcttcactctcacaccatgatccatagagacatcaaagcgggaaacattctgctgaccgagcctggtcaggtgaagctggcagactttggatcggccagtatggcaagccccgcaaactcatttgtgggcacgccttactggatggctcctgaggtcatcctggccatggatgaggggcagtatgatggtaaggttgacgtttggtccctgggcataacttgcatagagttagccgagcgcaaacctcccttgttcaatatgaatgctatgtcagctctgtaccatatcgcccaaaacgaatcacccactctgcagtcaaacgagtggtctgattatttccggaactttgtggactcttgcctccagaagatcccgcaggatcggcctactagcgaagagctgcttaaacacatcttcgttttgcgagagagacccgagaccgttctaattgatctcatccaaagaaccaaggacgctgttagggagctggacaatctgcagtatcgcaagatgaagaagctgctgttccaggaggcccacaatgggccagcagtagaggcgcaagaagaggaggaagagcaagatcacggagttggcaggacaggaaccgtgaattccgtgggttcgaatcaatctattcctagcatgagcattagcgccagttcccaatcctcttctgtaaactcgctccctgatgtgtccgatgacaaatcagaacttgatatgatggaaggcgatcatacagtcatgagcaactcttccgtaatccacctgaaacccgaagaggaaaattacagagaagagggggatcccaggactcgggcatcagacccccagagtcctcctcaggtaagccgccacaaatcacattacaggaatcgcgagcactttgctacaatacgcacagcctctctcgtcacacgccagatgcaagagcacgagcaggactccgaacttcgggagcagatgtcagggtataaacgaatgagaagacagcatcaaaaacagctaatgacgttagagaataaactgaaggccgagatggatgagcacaggctccggcttgacaaagatctggaaacacaacgcaataatttcgccgctgaaatggaaaaattgatcaagaagcatcaggccgcaatggaaaaggaggccaaagtaatgtcaaacgaagagaaaaaatttcaacaacacattcaggcccagcagaagaaggaattgaatagctttctggaatcccagaagcgagagtacaagctgcggaaagaacagttgaaagaagagctcaacgagaaccagagcactccaaagaaagaaaagcaggaatggctatcaaaacagaaggaaaatatccagcattttcaggccgaggaggaggccaatctccttaggcggcagcgacagtacctcgagttggagtgcaggcgattcaagcggaggatgctgctggggagacacaacctcgagcaagacttggttcgggaggagcttaataaaagacagacccagaaggatctggagcacgctatgcttctaaggcagcacgagtctatgcaagagctagaattccggcacctgaacaccatccaaaagatgcgctgcgaactgatccgcctgcaacaccagacggaactgaccaaccagctagaatacaataagcgaagggagagagagctgaggagaaagcacgtgatggaagtgcgccaacaacccaaatcactcaagtccaaagaactgcagataaaaaaacagtttcaggatacatgcaagattcagacacggcagtataaagcattgagaaaccatctcctggagactacgcccaagagcgaacacaaagcggtgctgaaaagattaaaagaggaacaaacccgcaaactggcgatcctagccgagcaatatgaccactctattaacgagatgttaagcacccaggccctgcgattggacgaagcacaggaagccgaatgccaggtgttgaagatgcaactgcagcaggaattagaacttctaaatgcttaccagtcgaagatcaaaatgcaggcagaagcacaacacgacagagaactacgtgagctggaacagcgcgtcagccttcggagggccctcctagagcaaaaaatcgaggaggaaatgctcgctttacagaatgaaagaaccgaacggatacgatcattgctggagaggcaagccagagagatagaggcattcgacagcgagagcatgagactgggattctccaacatggtgctgtcaaatttgagcccagaagccttctcgcactcctaccccggtgccagcggatggtcacacaatcccaccggaggacccggacctcattgggggcacccaatgggcggacctccccaggcttgggggcatccgatgcaaggtggccctcaaccctggggacacccgagtgggccaatgcagggagttccgagaggctctagcatgggggtgcgcaattccccacaggcgcttcggaggaccgcttctggtggacggactgagcaaggcatgtctcgctctacctcagtaactagccaaatctcaaacgggagccacatgtcttatacctag

SEQ ID NO: 317892 - DNA, 4662 bp, Artificial Sequence
  derived and/or modified sequence
cccctcctcctcctcactcctcaccctccagggtagcggctaccggagcgctgcagggggctgcgcctgcctgctccgccccagacctgtcggcgaaaggtagtttatgccaacgtgacttcattcatacagatgaaccaaggatcgggatagcagtataaaattagaatcaagacagctgactgctcagcaggatgccatcaactaacagagcaggcagcctgaaggaccctgaaattgcagagctcttcttcaaagaagatccagagaagctcttcacagatctcagagaaattggccatggaagctttggagcagtgtattttgcacgagatgtgcgtaccaatgaagtggtggccatcaagaaaatgtcttatagtggaaagcagtctactgagaaatggcaggatattattaaggaagtcaagtttctacaaagaataaaacatcccaacagtatagaatacaaaggctgttatttacgtgaacacacagcatggcttgtaatggaatattgtttaggatctgcttcggatttactagaagttcacaaaaagccattacaagaagtggaaatagcagcaattacacatggtgctcttcagggattagcctacttacattctcatactatgattcatagagatatcaaagcaggaaatatccttctgacagaaccaggccaggtgaaacttgctgactttggctctgcttccatggcatcacctgccaattcctttgtgggaacgccgtattggatggccccagaagtaattttagccatggatgaaggacaatatgatggcaaagtagatgtgtggtctcttggaataacatgtattgaactagcggaaaggaagcctcctttatttaatatgaatgcaatgagtgccttatatcacatagcccaaaatgaatcccctacactacagtctaatgaatggtctgattattttcgcaactttgtagattcttgcctccagaaaatccctcaagatcgacctacatcagaggaacttttaaagcacatatttgttcttcgggagcgccctgaaaccgtgttaatagatctcattcagaggacaaaggatgcagtaagagagctggacaatctgcagtatcgaaagatgaagaaactccttttccaggaggcacataatggaccagcagtagaagcacaggaagaagaagaggaacaagatcatggtgttggccggacaggaacagttaatagtgttggaagtaatcaatccattcccagcatgtccatcagtgccagcagccaaagcagtagtgttaacagtcttccagatgtctcagatgacaagagtgagctagacatgatggagggagaccacacagtgatgtctaacagttctgttatccatttaaaaccagaggaagaaaattacagagaagagggagatcctagaacaagagcatcagatccacaatctccaccccaagtatctcgtcacaaatcacactatcgtaatcgagaacactttgctactatacggacagcatcactggttacgaggcaaatgcaagaacatgagcaggactctgagcttagagaacaaatgtctggctataagcgaatgaggcgacaacatcaaaagcaactgatgactctggaaaacaagctaaaggctgagatggatgaacatcgcctcagattagacaaagatcttgaaactcagcgtaacaattttgctgcagaaatggagaaacttatcaagaaacaccaggctgccatggagaaagaggctaaagtgatgtccaatgaagagaaaaaatttcagcaacatattcaggcccaacagaagaaagaactgaatagttttctcgagtcccagaaaagagagtataaacttcgaaaagagcagcttaaagaggagctaaatgaaaaccagagtacccccaaaaaagaaaaacaggagtggctttcaaagcagaaggagaatatacagcatttccaagcagaagaagaagctaaccttcttcgacgtcaaagacaatacctagagctggaatgccgtcgcttcaagagaagaatgttacttgggcgtcataacttagagcaggaccttgtcagggaggagttaaacaaaagacagactcagaaggacttagagcatgccatgctactccgacagcatgaatctatgcaagaactggagttccgccacctcaacacaattcagaagatgcgctgtgagttgatcagattacagcatcaaactgagctcactaaccagctggaatataataagcgaagagaacgagaactaagacgaaagcatgtcatggaagttcgacaacagcctaagagtttgaagtctaaagaactccaaataaaaaagcagtttcaggatacctgcaaaatccaaaccagacagtacaaagcattaagaaatcacctgctggagactacaccaaagagtgagcacaaagctgttctgaaacggctcaaggaggaacagacccggaaattagctatcttggctgagcagtatgatcacagcattaatgaaatgctctccacacaagccctgcgtttggatgaagcacaggaagcagagtgccaggttttgaagatgcagctgcagcaggaactggagctgttgaatgcgtatcagagcaaaatcaagatgcaagctgaggcacaacatgatcgagagcttcgcgagcttgaacagagggtctccctccggagggcactcttagaacaaaagattgaagaagagatgttggctttgcagaatgagcgcacagaacgaatacgaagcctgttggaacgtcaagccagagagattgaagcttttgactctgaaagcatgagactaggttttagtaatatggtcctttctaatctctcccctgaggcattcagccacagctacccgggagcttctggttggtcacacaaccctactgggggtccaggacctcactggggtcatcccatgggtggcccaccacaagcttggggccatccaatgcaaggtggaccccagccatggggtcacccttcagggccaatgcaaggggtacctcgaggtagcagtatgggagtccgcaatagcccccaggctctgaggcggacagcttctgggggacggacggagcagggcatgagcagaagcacgagtgtcacttcacaaatatccaatgggtcacacatgtcttatacataacttaataattgagagtggcaattccgctggagctgtctgccaaaagaaactgcctacagacatcatcacagcagcctcctcacttgggtactacagtgtggaagctgagtgcatatggtatattttattcatttttgtaaagcgttctgttttgtgtttactaattgggatgtcatagtacttggctgccgggtttgtttgtttttggggaaattttgaaaagtggagttgatattaaaaataaatgtgtatgtgtgtacatatatatacacacacatacacatatattatgcatgtggtgaaaagaattggctagataggggatttttctgaacactgcaaaaatagaacgtagcaaaatggcttcagttatcacttttgggtgtctgtatcctaagaagtttctgaaaagatctaaagcctttttatcccatatcccaaattcttatgagccactcacagcaggcagcatatgttgaaataagttattactggtacacacctgcattgcctcaccagtgtatttatttgttattaaattgatctgacttctcagcctcatttggactaaaaaaagaaagcagaaatccatgaacacattgcttctcggccttttggctaagatcaagtgtagaaatccatgaacactaaaggacttcattgattttttcagagagtagaaaacaacttagtttttcttttttcctgaatgcgtcataggcttgtgagtgatttttgtccattcaattgtgccttctttgtattatgataagatgggggtacttaaggagatcacaagttgtgtgaggattgcattaacaaacctatgagccttcaatggggaagaccagaagggtgagaggggccctgaaagttcatatggtgggtatgtcccgcagcagagtgaggagatgaagcttacgtgtcctgacgttttgttgcttatactgtgatatctcatcctagctaagctctataatgcccaagaccccaaacagtacttttactttgtttgtacaaaaacaaagacatatagccaatacaaatcaaatgccggaggtgtttgatgccatatttgcaaattgccatctattgaaattctcgtcacactacatagacataattgttatctccttttggcttatgtgattttctgtttacaagtagaatagccaattatttaaatgtttagttgccacagtgaaccaggagtcactgagccaatgactttaccagctgctgactaatcttcatcaccactgtagattttgctgcatgtgcaggtcctctatttttaattgctgttttcgttgctgcagtactttacaaacttctagttcgttgagacttagtgaccatttggcatcaagttaacatcacacaataggaaacaccacttccacaagtctcaagcctcagtgctaaagtactactgaaaaggaactaggaagtttggccaatt

SEQ ID NO: 317893 - protein, 548 aa, Artificial Sequence
  derived and/or modified sequence
MPIVDKLKEALKPGRKDSADDGELGKLLASSAKKVLLQKIEFEPASKSFSYQLEALKSKYVLLNPKTEGASRHKSGDDPPARRQGSEHTYESCGDGVPAPQKVLFPTERLSLRWERVFRVGAGLHNLGNTCFLNATIQCLTYTPPLANYLLSKEHARSCHQGSFCMLCVMQNHIVQAFANSGNAIKPVSFIRDLKKIARHFRFGNQEDAHEFLRYTIDAMQKACLNGCAKLDRQTQATTLVHQIFGGYLRSRVKCSVCKSVSDTYDPYLDVALEIRQAANIVRALELFVKADVLSGENAYMCAKCKKKVPASKRFTIHRTSNVLTLSLKRFANFSGGKITKDVGYPEFLNIRPYMSQNNGDPVMYGLYAVLVHSGYSCHAGHYYCYVKASNGQWYQMNDSLVHSSNVKVVLNQQAYVLFYLRIPGSKKSPEGLISRTGSSSLPGRPSVIPDHSKKNIGNGIISSPLTGKRQDSGTMKKPHTTEEIGVPISRNGSTLGLKSQNGCIPPKLPSGSPSPKLSQTPTHMPTILDDPGKKVKKPAPPLPTGMG

SEQ ID NO: 317894 - DNA, 2187 bp, Artificial Sequence
  derived and/or modified sequence
atgtgcgccaagtgcaagaagaaggtgcccgccagcaagagattcaccatccacagaaccagcaacgtgctgaccctgagcctgaagagattcgccaacttcagcggcggcaagatcaccaaggacgtgggctaccccgagttcctgaacatcagaccctacatgagccagaacaacggcgaccccgtgatgtacggcctgtacgccgtgctggtgcacagcggctacagctgccacgccggccactactactgctacgtgaaggccagcaacggccagtggtaccagatgaacgacagcctggtgcacagcagcaacgtgaaggtggtgctgaaccagcaggcctacgtgctgttctacctgagaatccccggcagcaagaagagccccgagggcctgatcagcagaaccggcagcagcagcctgcccggcagacccagcgtgatccccgaccacagcaagaagaacatcggcaacggcatcatcagcagccccctgaccggcaagagacaggacagcggcaccatgaagaagccccacaccaccgaggagatcggcgtgcccatcagcagaaacggcagcaccctgggcctgaagagccagaacggctgcatcccccccaagctgcccagcggcagccccagccccaagctgagccagacccccacccacatgcccaccatcctggacgaccccggcaagaaggtgaagaagcccgcccccccccagcacttcagccccagaaccgcccagggcctgcccggcaccagcaacagcaacagcagcagaagcggcagccagagacagggcagctgggacagcagagacgtggtgctgagcaccagccccaagctgctggccaccgccaccgccaacggccacggcctgaagggcaacgacgagagcgccggcctggacagaagaggcagcagcagcagcagccccgagcacagcgccagcagcgacagcaccaaggccccccagacccccagaagcggcgccgcccacctgtgcgacagccaggagaccaactgcagcaccgccggccacagcaagaccccccccagcggcgccgacagcaagaccgtgaagctgaagagccccgtgctgagcaacaccaccaccgagcccgccagcaccatgagccccccccccgccaagaagctggccctgagcgccaagaaggccagcaccctgtggagagccaccggcaacgacctgagaccccccccccccagccccagcagcgacctgacccaccccatgaagaccagccaccccgtggtggccagcacctggcccgtgcacagagccagagccgtgagccccgccccccagagcagcagcagactgcagccccccttcagcccccaccccaccgccgccagcgccctgcaggagggccagacccagagacagcccggcagccccatgtacagaagagagggccaggcccagctgcccgccgtgagaagacaggaggacggcacccagccccaggtgaacggccagcaggtgggctgcgtgaccgacggccaccacgccagcagcagaaagagaagaagaaagggcgccgagggcctgggcgaggagggcggcctgcaccaggaccccctgagacacagctgcagccccatgggcgacggcgaccccgaggccatggaggagagccccagaaagaagaagaagaagaagagaaagcaggagacccagagagccgtggaggaggacggccacctgaagtgccccagaagcgccaagccccaggacgccgtggtgcccgagagcagcagctgcgcccccagcgccaacggctggtgccccggcgacagaatgggcctgagccaggccccccccgtgagctggaacggcgagagagagagcgacgtggtgcaggagctgctgaagtacagcagcgacaaggcctacggcagaaaggtgctgacctgggacggcaagatgagcgccgtgagccaggacgccatcgaggacagcagacaggccagaaccgagaccgtggtggacgactgggacgaggagttcgacagaggcaaggagaagaagatcaagaagttcaagagagagaagagaagaaacttcaacgccttccagaagctgcagaccagaagaaacttctggagcgtgacccaccccgccaaggccgccagcctgagctacagaagatag

SEQ ID NO: 317895 - DNA, 2187 bp, Artificial Sequence
  derived and/or modified sequence
atgtgcgccaaatgtaaaaaaaaggttccagcctccaaacggttcaccattcatagaacctcaaacgtgctgacgttatccctgaaaagattcgccaacttctcaggagggaagatcaccaaagatgttgggtaccccgagttccttaacattagaccctacatgagccagaataacggtgatcccgtgatgtatggtctttacgccgtgttggtgcattctgggtattcttgtcatgcaggacattactattgctacgttaaggcatcgaacggccagtggtaccagatgaatgacagcctggtgcacagtagcaatgtaaaggtggtgctgaaccagcaggcttatgtgttgttctacctccggattcccggcagcaagaaatcaccagaaggactcatttcccgaacgggctcatcatccctgcccggcaggcccagcgttatccccgaccactccaagaaaaacattggcaatggcatcattagtagccctctgaccggaaaacggcaggattcagggaccatgaaaaagcctcacacaaccgaggaaataggtgtccccattagccggaacgggtccactttgggactgaagtcccagaacgggtgtatccccccaaaattgccctccggttctccttctccaaagctgagccaaacccctactcacatgccaacaatcttggacgatcccgggaagaaagtcaagaagcccgcccctccacagcatttttcccctagaacggcccaggggctgcctggaacgtccaattccaactctagtagaagcggtagtcagaggcagggtagttgggactccagagacgtggtgttgagtacatctcccaaacttctggctaccgccactgccaatggtcatggacttaaaggcaacgatgagtccgccggcctcgaccgtcgtgggagctctagctcatcccccgaacactctgcatctagcgactcgacaaaagcaccccagaccccgcgatccggcgccgcccatctttgtgactcacaggaaaccaactgtagcacagcaggtcacagtaaaacccctccctctggcgcggactccaaaacagtgaagttgaagagtccagtcttgtccaacactacaactgaacccgcgtcaactatgtctcctccacctgccaagaagcttgcactctctgctaaaaaagcgtctaccctgtggagagctactggcaacgacctcaggccccctcccccgtccccctctagtgatctcacacatcctatgaagaccagtcatcctgtggtcgcatcaacatggcctgttcatcgcgcccgcgcagtgtcccccgctccccagagcagttccagactccagccaccattctctccacatcccacagcagcgtctgcactgcaggagggccagacccagagacagccgggatcacccatgtacagacgggagggacaagcccagttgcccgccgtaagaagacaggaagatgggacacagccacaggttaacggacagcaggtgggctgtgtgactgacgggcatcacgccagctctcgcaaaaggcggagaaaaggcgcggaaggcctgggggaggaaggtggcctgcaccaggacccactgcgtcattcctgctcccccatgggtgatggcgaccccgaagccatggaggagagtcctcgcaagaagaaaaaaaaaaagaggaaacaggaaactcagagggctgtagaggaagacggccacctgaaatgcccaagatcagccaagcctcaggatgcagttgttccagaatcatcatcttgcgcgccatcagcgaatggttggtgtccgggggatcggatgggtctctcacaggcacctcctgtcagttggaacggagagcgtgaatctgatgtggtccaggaattgctgaaatattcaagcgataaagcttacgggagaaaagtacttacttgggatggtaagatgtcagcagtctcccaggatgcaattgaagattccagacaagccagaacggaaaccgtggtagacgattgggacgaggaatttgaccgaggtaaagaaaagaagataaagaaattcaagagagaaaagaggagaaattttaacgctttccagaagttacagacacggcggaatttctggtctgtgactcatcctgccaaagctgccagtctgtcttatcggcgctag

SEQ ID NO: 317896 - DNA, 2187 bp, Artificial Sequence
  derived and/or modified sequence
atgtgtgccaagtgcaagaagaaggtgcctgccagcaagcgcttcaccatccacaggaccagcaatgtgctgaccctgagcctgaagagatttgccaacttcagcggcggcaagatcaccaaggatgtgggctacccagagttcctgaacatccggccctacatgagccagaacaatggagaccctgtgatgtatggcctgtatgctgtgctggtgcacagcggctacagctgccacgccggccactactactgctacgtgaaggccagcaatggccagtggtaccagatgaatgacagcctggtgcacagcagcaatgtgaaggtggtgctgaaccagcaggcctacgtgctcttctacctgcgcatccctggcagcaagaagagccctgagggcctcatcagcaggacaggcagcagcagcctgcccggccggcccagcgtcatcccagaccacagcaagaagaacattggaaatggcatcatcagcagccccctgaccgggaagaggcaggacagcggcaccatgaagaagccccacaccacagaggagattggagtgcccatcagcagaaatggcagcaccctgggcctgaagagccagaatggctgcatcccccccaagctgcccagcggcagccccagccccaagctgagccagacccccacccacatgcccaccatcctggatgaccccgggaagaaggtgaagaagccagccccaccccagcacttcagccccaggacagcccagggcctgcccggcaccagcaacagcaacagcagccgcagcggcagccagaggcagggctcctgggacagcagagatgtggtgctgagcaccagccccaagctgctggccacagccacagccaacggccacggcctgaagggaaatgatgagagcgctggcctggacagaagaggcagcagcagcagcagccctgagcacagcgccagcagtgacagcaccaaggccccccagacccccaggtctggggccgcccacctgtgtgacagccaggagaccaactgcagcacagctggccacagcaagaccccacccagcggggctgacagcaagacagtgaagctgaagagccctgtgctgagcaacaccaccacagagcccgccagcaccatgagccccccaccagccaagaagctggccctgagcgccaagaaggccagcaccctgtggagggccactggaaatgacctgcggcccccaccacccagccccagcagtgacctgacccaccccatgaagaccagccaccctgtggtggccagcacctggcctgtgcaccgggcccgggctgtgtccccagccccccagagcagcagccggctgcagccccccttcagcccccaccccacagctgccagcgccctgcaggagggccagacccagaggcagcccggcagccccatgtaccgccgggagggccaggcccagctgcctgctgtgcggcggcaggaggatggcacccagccccaggtgaatggccagcaggtgggctgtgtgacagatggccaccacgccagcagcaggaagagaagaagaaaaggagctgagggcctgggggaggagggcggcctgcaccaggaccccctgcggcacagctgcagccccatgggagatggagaccctgaggccatggaggagagccccaggaagaagaagaagaagaagaggaagcaggagacccagagagctgtggaggaggatggccacctgaagtgccccaggtctgccaagccccaggatgctgtggtgcctgagagcagcagctgtgcccccagcgccaacggctggtgccctggggacaggatgggcctgagccaggcccctcctgtgtcctggaatggagagcgggagagtgatgtggtgcaggagctgctgaagtacagcagtgacaaggcctacggcaggaaggtgctgacctgggatggcaagatgtctgctgtgtcccaggatgccatcgaggacagccggcaggccaggacagagaccgtggtggatgactgggatgaggagtttgaccggggcaaggagaagaagatcaagaagttcaagcgggagaagagaagaaacttcaatgccttccagaagctgcagaccaggaggaacttctggagcgtgacccacccagccaaggccgccagcctgagctacagaagatag

SEQ ID NO: 317897 - DNA, 2187 bp, Artificial Sequence
  derived and/or modified sequence
atgtgcgccaagtgcaagaagaaggtgcccgccagcaagcggttcacaatccatcgcaccagcaacgtgctgaccctcagcctgaagaggtttgcaaatttctccggtggaaaaattaccaaagacgtggggtaccctgaattcttgaatatcagaccatatatgtcccagaataatggtgaccctgtgatgtatggactctacgcagtgctagtccattccggatatagctgccatgcaggtcactattactgctacgttaaagcttctaacggccagtggtaccagatgaacgactctctcgtgcacagctcaaatgttaaggttgtcctcaatcagcaggcatacgtactgttctacttacgcatccccggaagtaagaaatcacctgagggtctgatctccagaacggggagcagtagcctgcccggtcgtccgtccgtgatccccgaccattctaagaagaatatcggaaatggcatcatctcaagtcccctgacgggtaaaagacaggattccggaacaatgaaaaagcctcacacaaccgaagagatcggggtgccaatcagtcgtaacggcagcacattggggcttaagagtcagaacggttgtatccctcccaaactgcctagcggctctccctctcccaagctgtctcagacaccaacacacatgcccaccatattggacgatcccggcaaaaaggtgaagaagcccgccccccctcagcacttctctcccagaaccgcacagggactccccggtacctcaaattctaactctagcagatccggcagccagcgacagggctcatgggattctagagacgttgtgctgagtacctcccctaaacttcttgctactgcaactgcaaatggccatgggcttaagggaaatgacgaatctgcaggattggacaggcgcggtagttcttcctcaagccctgaacattctgcctcttccgattccactaaggcaccacagacccctaggtcgggagcagctcacttatgcgactctcaggaaacaaactgtagcactgcaggtcatagcaagacccctcccagtggggcagactcaaaaactgttaagcttaaaagccctgtgttgagcaacaccacaacggagccagccagcaccatgtcgcctcccccagctaagaaattagcattaagcgctaaaaaagcaagtaccctttggagagccaccgggaacgatttgaggcctccccccccttctccttcatctgatctgacacacccaatgaaaacctcccatcctgttgtcgcctccacatggcctgtgcacagggctagagccgtgtctcccgcaccccaatcctcctctaggctccagccgccttttagtccacatcctacagcagctagcgctcttcaggagggacagacccaaaggcagccaggatctccaatgtataggcgtgaagggcaggcgcagttaccggctgtgagaaggcaggaagatgggacacagccacaggtgaacgggcagcaagtgggctgcgtaaccgatggtcatcacgcctccagcaggaagcgaagacgtaaaggagctgagggtctcggcgaggagggcggccttcatcaggatccactgcgccatagctgctcccctatgggcgacggcgatcccgaggcaatggaagagtcccccagaaagaagaagaaaaaaaaaaggaagcaagagacccagagagccgtggaagaagacgggcaccttaaatgccctaggagcgccaaaccacaggatgccgttgtcccagagtcgagcagctgcgcgccctctgctaacggctggtgtccaggagacaggatggggctgagccaggcacccccggtgagctggaacggggagcgggagtcagacgtcgtgcaggagctgctgaagtactccagcgataaagcctacggcaggaaagtgctgacatgggatggcaaaatgtctgctgtgagtcaagacgcaatagaggatagcaggcaggcacgaacggagacagtggtggacgactgggacgaagaatttgacagaggcaaagagaagaaaataaagaaattcaagagggaaaagagaagaaatttcaacgcgttccagaagttgcagacccgtcgcaatttttggagtgtcacccacccagccaaggctgccagcctcagttaccgtcgatag

SEQ ID NO: 317898 - DNA, 2187 bp, Artificial Sequence
  derived and/or modified sequence
atgtgcgcaaaatgcaagaagaaggtgccggcaagcaaaaggttcacgattcacagaacatcaaacgtcctgacccttagcttaaagagatttgctaatttctctggcggaaaaataaccaaagatgtggggtatccggagttcctcaacatacgaccctatatgagtcagaataatggcgaccccgtcatgtatggtctgtatgcagttctggttcactcaggctactcctgccacgctggacactactattgctacgtgaaggccagcaatgggcagtggtatcaaatgaatgatagtctcgttcactcatctaatgttaaggtcgtgttaaatcaacaggcatatgtactgttttatctgaggattccaggtagcaaaaagagcccagaaggcctcatttctcgcaccggtagctctagcttaccaggcagaccgtccgtcattccagaccattctaaaaagaatataggaaacggaataatttcctctccactgacaggcaagcgtcaggacagcggaaccatgaagaaaccccatacaaccgaggaaattggtgtgccaatttcacgtaacggatctaccctgggactgaagtcacagaacggatgtatcccaccgaaattgccctccggatcccccagccccaaactgtcacagacacctacccatatgcccactatcctcgatgaccccggaaagaaagtgaaaaaaccagctcccccacaacacttttcacctaggacagcccagggcttgcccggtacatcaaactcgaactcatctcgaagtggctcacagcgccagggatcctgggattccagagacgtagtactgagcacatccccaaagctgttggcaacggcaacagccaacggacatggcctgaaaggaaacgatgagagcgcgggattggacagaaggggcagctcgtcttcaagcccagaacatagtgcctcttccgattcgaccaaggcccctcagaccccaagatctggggcagcccacctgtgtgattcccaggagaccaactgtagcacagctggtcactcaaagaccccgccatcaggcgcagattctaagacagttaaattaaagtcacccgttcttagcaatacaactacagagcctgcttcgacaatgagtccaccgcctgccaagaagctggcattatctgccaaaaaagcttctaccctttggcgagccacagggaatgatttgaggccacctcctccttcaccctcgtcagatttgactcaccccatgaagacttcacatccagtggtcgcttcaacgtggcccgtccaccgcgctcgagctgtgagccccgctccccaaagttcctcccgattgcagccccctttcagcccacaccccaccgcggcttctgcactgcaagaaggtcagacccagaggcagcccggaagccccatgtatcgcagagaaggacaagcgcaactccccgcagtccggagacaggaagatggaacccagccccaggtgaatggacagcaggtgggatgcgtgaccgacggacaccatgcgagtagcaggaagcgcaggaggaagggcgctgaggggctaggggaagagggaggactgcaccaggatcctctgcgccactcttgctcccccatgggcgatggcgaccctgaagctatggaagagtcaccacggaagaaaaagaagaaaaaacgcaaacaagagactcaaagggcagtggaagaagatggccatttgaaatgcccacgctccgccaagccgcaagatgccgtggtccctgagtcctcctcctgtgcccctagtgctaacgggtggtgtcctggggatcggatgggcttatcccaggctccccctgttagctggaacggggagcgagaatccgatgtggttcaagagcttttgaagtactcctctgataaggcgtacggtaggaaggtactcacctgggacggaaaaatgagcgccgttagccaggatgctattgaggattcacgacaagcacggaccgagactgtggttgacgattgggatgaggagttcgacagaggtaaagagaagaagataaaaaagttcaaaagagaaaagcgcaggaacttcaatgcctttcagaaactgcagactaggaggaacttctggagcgtgacccaccctgccaaagccgctagcctttcctatcgaagatag

SEQ ID NO: 317899 - DNA, 4656 bp, Artificial Sequence
  derived and/or modified sequence
gtcacttttgaagaatggtgggacagtagatggtggcagttgatttttcattttctaactttgcagaataaaaattgaatgatcctgtattggtcccccaagtatttcagagctcccggagtctgggaagtgccatggtaaatagtcacacaggccagatgagagactgaggtgtgcatgttctgtgggaggggaagtgtagcctgcgggtgtggaatggtctgggtggccgtgggaaacgtggagagagccctggaaacagccccgctttgtgccagtgaggagtcggggaagcagctggggagacggggctggagagcctggggagaggggaagctcttctggagggagtgggtgcaccggcgcactgcgcagcctcctagtaaagggcctgcagacccagctggcctcatgcctggaggccttaggcgactctgaggaaggcagttccagagcagtgagtcaggaccagatgcagtgggttgcaagtagaaccaggagcagagactggatgtggtgtattgtttcagaaccttccagcgtgagtagctaccatatggatacgtaggcgtgggaggcgccaggcagccccgggtccgggtgagaagaggccccagagctcagagtgcctcagatcccagttagtgagcggtgcgggggacatgaatgagggcagggctcctgaccccgaagcccacgtctgactccgctgtcctctctgagacgggtgcagagccggggagatttggtcctgtttgtgcctttgttcccacccccacccctcttcccagattggggaccagctgtctgtgaccagcagagaagtggaagggtgggctgggtgggcgccctagctcagggggatgtttggcctcccgcctcactctagatttgggtacttactttttattgagaccaaaaagaaaaggcaacactgggtgaggatacacgtacatttctcggggcttttattttctgtgaagtgggtggcagtgggcattgtgaaggtttgaaatggctactgtgggtagtggggccctgaggaggtcagagctctgcagagagactgccaggcagcgtgggctgaggatggaggttaagggtctgtggtgactcgggtggggggtggagtttcccagcctcacgctgagcttgtgactggtgggcatggggctgctgggatggggccatccctcgtgtcatcttgctgagcccttcccttaaaggctggggtctccttttcaggttggatcgtcaaacgcaggctactaccttggtccatcaaatttttggagggtatctcagatcacgcgtgaagtgctccgtgtgcaagagcgtctcggacacctacgacccctacttggacgtcgcgctggagatccggcaagctgcgaatattgtgcgtgctctggaactttttgtgaaagcagatgtcctgagtggagagaatgcctacatgtgtgctaaatgcaagaagaaggttccagccagcaagcgcttcaccatccacagaacatccaacgtcttaaccctttccctcaagcgctttgccaacttcagcggggggaagatcaccaaggatgtaggctatccggaattcctcaacatacgtccgtatatgtcccagaataatggtgatcctgtcatgtatggactctatgctgtcctggtgcactcgggctacagctgccatgccgggcactattactgctacgtgaaggcaagcaatggacagtggtaccagatgaatgattccttggtccattccagcaacgtcaaggtggttctgaaccagcaggcctacgtgctgttctatctgcgaattccaggctctaagaaaagtcccgagggcctcatctccaggacaggctcctcctcccttcccggccgcccgagtgtgattccagatcactccaagaagaacatcggcaatgggattatttcctccccactgactggaaagcgacaagactctgggacgatgaagaagccgcacaccactgaagagattggtgtgcccatatccaggaatggctccaccctgggcctgaagtcccagaacggctgcattcctccaaagctgccctcggggtccccttcccccaaactctcccagacacccacacacatgccaaccatcctagacgaccctggaaagaaggtgaagaagccagctcctccacagcacttttcccccagaactgctcaggggctgcctgggaccagcaactcgaatagcagcagatctgggagccaaaggcagggctcctgggacagcagggatgttgtcctctctacctcacctaagctcctggctacagccactgccaacgggcatgggctgaaggggaacgacgagagcgctggcctcgacaggaggggctccagcagctccagcccagagcactcggccagcagcgactccaccaaggccccccagacccccaggagtggagcggcccatctctgcgattctcaggaaacgaactgttccaccgctggccactccaaaacgccgccaagtggagcagattctaagacggtgaagctgaagtcccctgtcctgagcaacaccaccactgagcctgcaagcaccatgtctcctccaccagccaaaaaactggccctttctgccaagaaggccagcaccctgtggagggcgaccggcaatgacctccgtccacctcccccctcaccatcctccgacctcacccaccccatgaaaacctctcaccccgtcgttgcctccacttggcccgtccatagagccagggctgtgtcacctgctccccaatcatccagccgcctgcaaccccccttcagcccccaccccacagctgccagcgccctgcaggaggggcagacacagagacagcctgggagccccatgtacaggagggagggccaggcacagctgcccgctgtcagacggcaggaagatggcacacagccacaggtgaatggccagcaggtgggatgtgttacggacggccaccacgcgagcagcaggaagcggaggaggaaaggagcagaaggtcttggtgaagaaggcggcctgcaccaggacccacttcggcacagctgctctcccatgggtgatggtgatccagaggccatggaagagtctccaaggaaaaagaaaaagaaaaaaagaaagcaggagacacagcgggcagtagaagaggatgggcatctcaaatgcccaaggagtgccaagccccaagatgctgttgtccccgagtccagcagctgcgcaccatccgcgaatggctggtgtcctggggaccgcatggggctgagccaggcccctcctgtgtcttggaatggagagcgggagtctgatgtggtccaggaactgctcaaatactcatctgataaagcttacgggagaaaagttctgacctgggatggcaagatgtcggcggtcagtcaggatgctattgaagacagcagacaggcccggactgagaccgtggttgatgactgggacgaagagtttgaccgagggaaggaaaagaaaattaaaaaatttaagagagagaagaggagaaacttcaacgccttccagaaacttcagactcgacggaacttctggtctgtgactcacccagcaaaggctgccagcctcagctatcgccgctgactgtgcccctgtggaaggagcctcctggagacaaggcgtcccttcccgggagctgtcggtctggatctgagggagctctctgtgtgggctctgctgcgctgggagcctgtcacggtaggagctctcccggtaccagtgtccacagaccgcccaacacagaggctttgaggcttctctagatcggaacctctttggtgacattcccgaccagccctgcaagagaaacgacagtgtgtgtgtgagcagaggtggccgcacacctgctggacatctttgccaggctgtgccttctcatgtttcatagacagtggtctgtgctggcagaggctgctgcccctggttggggctatcaggagagtgggggatggtggccacatgtcccccaggtggtctcccggtgcatagctggtggctctgggcaagccatcccttgcttctcggggctgacgccaccgttgtgtccgagcccgccctcccctgcttcctcagcgggaccccttcatctgttggccttacctgtcctcagaaaggaagaggtgaccccacccagccacctctcccttttatggaactcgagagggtggccctactgtgcaccccttccttgtgagtagctctcaactgtcctggagagcagaggctatttggggtcggaggagccctcgatacctgcgaatacatctgctttccaggctgctgtttattctgagacgactgtgctgtagcttcccttgcagctgcaataacccgcaggtcttcactgaggtggaggctttggggtagaattctccatttattttactacttaatacaaaacatttatttttgaccagtcctgtggcttccattagcaatatgtttcctttcccaaatatgcaaatagtggctttgtttgctcaattttgtgagtgctttggaatttaaatgattgtataactcaagaagattacttttctatgttgctcaagctgtgcctgccaacttgtaacttaataaatacaggaaatcctcag

SEQ ID NO: 317900 - protein, 728 aa, Artificial Sequence
  derived and/or modified sequence
MCAKCKKKVPASKRFTIHRTSNVLTLSLKRFANFSGGKITKDVGYPEFLNIRPYMSQNNGDPVMYGLYAVLVHSGYSCHAGHYYCYVKASNGQWYQMNDSLVHSSNVKVVLNQQAYVLFYLRIPGSKKSPEGLISRTGSSSLPGRPSVIPDHSKKNIGNGIISSPLTGKRQDSGTMKKPHTTEEIGVPISRNGSTLGLKSQNGCIPPKLPSGSPSPKLSQTPTHMPTILDDPGKKVKKPAPPQHFSPRTAQGLPGTSNSNSSRSGSQRQGSWDSRDVVLSTSPKLLATATANGHGLKGNDESAGLDRRGSSSSSPEHSASSDSTKAPQTPRSGAAHLCDSQETNCSTAGHSKTPPSGADSKTVKLKSPVLSNTTTEPASTMSPPPAKKLALSAKKASTLWRATGNDLRPPPPSPSSDLTHPMKTSHPVVASTWPVHRARAVSPAPQSSSRLQPPFSPHPTAASALQEGQTQRQPGSPMYRREGQAQLPAVRRQEDGTQPQVNGQQVGCVTDGHHASSRKRRRKGAEGLGEEGGLHQDPLRHSCSPMGDGDPEAMEESPRKKKKKKRKQETQRAVEEDGHLKCPRSAKPQDAVVPESSSCAPSANGWCPGDRMGLSQAPPVSWNGERESDVVQELLKYSSDKAYGRKVLTWDGKMSAVSQDAIEDSRQARTETVVDDWDEEFDRGKEKKIKKFKREKRRNFNAFQKLQTRRNFWSVTHPAKAASLSYRR

SEQ ID NO: 317901 - DNA, 1647 bp, Artificial Sequence
  derived and/or modified sequence
atgcccatcgtggacaagctgaaggaggccctgaagcccggcagaaaggacagcgccgacgacggcgagctgggcaagctgctggccagcagcgccaagaaggtgctgctgcagaagatcgagttcgagcccgccagcaagagcttcagctaccagctggaggccctgaagagcaagtacgtgctgctgaaccccaagaccgagggcgccagcagacacaagagcggcgacgacccccccgccagaagacagggcagcgagcacacctacgagagctgcggcgacggcgtgcccgccccccagaaggtgctgttccccaccgagagactgagcctgagatgggagagagtgttcagagtgggcgccggcctgcacaacctgggcaacacctgcttcctgaacgccaccatccagtgcctgacctacaccccccccctggccaactacctgctgagcaaggagcacgccagaagctgccaccagggcagcttctgcatgctgtgcgtgatgcagaaccacatcgtgcaggccttcgccaacagcggcaacgccatcaagcccgtgagcttcatcagagacctgaagaagatcgccagacacttcagattcggcaaccaggaggacgcccacgagttcctgagatacaccatcgacgccatgcagaaggcctgcctgaacggctgcgccaagctggacagacagacccaggccaccaccctggtgcaccagatcttcggcggctacctgagaagcagagtgaagtgcagcgtgtgcaagagcgtgagcgacacctacgacccctacctggacgtggccctggagatcagacaggccgccaacatcgtgagagccctggagctgttcgtgaaggccgacgtgctgagcggcgagaacgcctacatgtgcgccaagtgcaagaagaaggtgcccgccagcaagagattcaccatccacagaaccagcaacgtgctgaccctgagcctgaagagattcgccaacttcagcggcggcaagatcaccaaggacgtgggctaccccgagttcctgaacatcagaccctacatgagccagaacaacggcgaccccgtgatgtacggcctgtacgccgtgctggtgcacagcggctacagctgccacgccggccactactactgctacgtgaaggccagcaacggccagtggtaccagatgaacgacagcctggtgcacagcagcaacgtgaaggtggtgctgaaccagcaggcctacgtgctgttctacctgagaatccccggcagcaagaagagccccgagggcctgatcagcagaaccggcagcagcagcctgcccggcagacccagcgtgatccccgaccacagcaagaagaacatcggcaacggcatcatcagcagccccctgaccggcaagagacaggacagcggcaccatgaagaagccccacaccaccgaggagatcggcgtgcccatcagcagaaacggcagcaccctgggcctgaagagccagaacggctgcatcccccccaagctgcccagcggcagccccagccccaagctgagccagacccccacccacatgcccaccatcctggacgaccccggcaagaaggtgaagaagcccgccccccccctgcccaccggcatgggctag

SEQ ID NO: 317902 - DNA, 1647 bp, Artificial Sequence
  derived and/or modified sequence
atgccgatcgtcgacaaactgaaagaagccctaaagcccggtaggaaggatagcgccgacgatggggagctcggcaagttactcgcatctagtgctaagaaggtgctgctacaaaagatcgagttcgaacctgcctccaagtctttttcgtaccaactggaagcactgaagtctaaatacgtgctcctgaatcccaaaacagaaggggcatctcgtcacaagtctggagatgacccgccagctcgaaggcagggctctgagcacacttacgagtcttgtggcgacggcgtgccagcaccacagaaggttctcttccccacagagcggctgtcactgcgatgggagcgagtgtttagggtgggcgcaggactccataatcttgggaacacatgcttcctgaacgctacgattcagtgcctcacctacaccccgcctctggccaattacctcttgtcaaaagagcatgcaagatcctgccatcaaggcagcttttgcatgctgtgtgttatgcagaaccatatcgttcaggccttcgccaacagcgggaacgcaatcaaaccagtgtccttcattcgcgatctaaaaaaaatcgccagacattttcggttcggaaatcaggaggacgcacatgagtttcttagatacaccatcgatgcgatgcagaaggcatgtctgaatgggtgtgcgaaactggacagacagactcaggcgactacactggtccatcagatctttggaggatatctgagatccagagtgaaatgctcggtctgcaaatccgtctcagacacatatgacccatatctggacgtcgccctcgagatcaggcaggccgccaatatcgttcgcgcattggaattgttcgttaaagccgacgtgttgagcggtgaaaacgcatacatgtgcgctaagtgtaagaagaaggtgccagcctccaagcgtttcactattcaccgtacctctaacgtgctgaccctgtctcttaaacgtttcgctaacttcagtgggggcaaaattaccaaggatgtggggtacccagagttcttaaatatccgtccctatatgtcacaaaacaatggggaccccgtcatgtacggactctacgcagtgctcgtccattctggatattcctgccatgccgggcactactattgctatgtgaaagcctcaaatgggcaatggtaccagatgaacgatagccttgtccattcatccaacgtaaaggtggtccttaaccagcaagcgtacgtactattttatctcaggatcccaggaagcaagaaatcccctgagggcctcatttcacgcaccggatccagtagcctaccagggcgcccctccgtgatccccgaccacagcaagaaaaacatcggcaatggcattattagtagcccccttactggcaagcggcaggactccggaactatgaaaaagccgcacacaactgaagagattggtgtcccaatctcccgaaacggctctactctaggcctgaagtcccaaaatgggtgtatcccccccaaactgccctcaggaagccctagtcccaagttgtctcaaacacccactcacatgcccaccatcctcgacgaccccgggaaaaaagtgaagaaaccggcccctcccctgcccacaggtatgggctag

SEQ ID NO: 317903 - DNA, 1647 bp, Artificial Sequence
  derived and/or modified sequence
atgcccatcgtggacaagctgaaggaggccctgaagccaggcaggaaggacagcgcagatgatggagagctgggcaagctgctggccagcagcgccaagaaggtgctgctgcagaagattgaatttgagcccgccagcaagagcttctcctaccagctggaggccctgaagagcaaatatgtgctgctgaaccccaagacagaaggagccagccgccacaagtctggagatgatcctccagcccggcggcagggcagcgagcacacctatgagagctgtggagatggagtgcctgccccccagaaggtgctcttccccacagagcggctgagcctgcgctgggagagggtcttccgggtgggcgccggcctgcacaacctgggcaacacctgcttcctgaatgccaccatccagtgcctgacctacaccccacccctggccaactacctgctgagcaaggagcacgcccggagctgccaccagggcagcttctgcatgctgtgtgtgatgcagaaccacatcgtgcaggcctttgccaacagcggaaatgccatcaagcctgtgtccttcatccgggacctgaagaagatcgcccggcacttccgctttggaaaccaggaggatgcccacgagttcctgcgctacaccattgatgccatgcagaaggcctgcctgaatggctgtgccaagctggaccggcagacccaggccaccaccctggtgcaccagatctttggaggctacctgcggagccgggtgaagtgcagcgtgtgcaagtctgtgtctgacacctatgacccctacctggatgtggccctggagatccggcaggccgccaacatcgtgcgggccctggagctgtttgtgaaggcagatgtgctgtctggagaaaatgcctacatgtgtgccaagtgcaagaagaaggtgcctgccagcaagcgcttcaccatccacaggaccagcaatgtgctgaccctgagcctgaagagatttgccaacttcagcggcggcaagatcaccaaggatgtgggctacccagagttcctgaacatccggccctacatgagccagaacaatggagaccctgtgatgtatggcctgtatgctgtgctggtgcacagcggctacagctgccacgccggccactactactgctacgtgaaggccagcaatggccagtggtaccagatgaatgacagcctggtgcacagcagcaatgtgaaggtggtgctgaaccagcaggcctacgtgctcttctacctgcgcatccctggcagcaagaagagccctgagggcctcatcagcaggacaggcagcagcagcctgcccggccggcccagcgtcatcccagaccacagcaagaagaacattggaaatggcatcatcagcagccccctgaccgggaagaggcaggacagcggcaccatgaagaagccccacaccacagaggagattggagtgcccatcagcagaaatggcagcaccctgggcctgaagagccagaatggctgcatcccccccaagctgcccagcggcagccccagccccaagctgagccagacccccacccacatgcccaccatcctggatgaccccgggaagaaggtgaagaagccagccccacccctgcccaccggcatgggctag

SEQ ID NO: 317904 - DNA, 1647 bp, Artificial Sequence
  derived and/or modified sequence
atgcccatcgtggacaagctgaaggaggccctgaagcccggccggaaagattccgcggacgatggcgaactaggtaaactcctggcatcctctgccaagaaagtgctgcttcaaaagattgagtttgaaccagcttccaaaagcttctcctatcagctagaggccctcaagtctaagtacgtccttctgaaccctaagacagaaggcgcttctcggcacaaatccggagacgacccacccgcccgccgccaggggtcagaacatacgtatgaaagttgcggagacggcgtgcccgcccctcaaaaggtcctgttcccgacagagcgcctcagccttagatgggaacgcgtgtttcgtgtcggcgccgggttgcacaacctcgggaacacttgcttcctgaatgcaaccatccagtgcctcacttacactccaccattggctaattatctgttgtctaaggagcatgccaggtcatgccaccagggatccttctgtatgctttgcgtcatgcaaaatcacatcgtgcaagccttcgccaactcagggaacgctatcaagccggtctcttttatccgagacctgaaaaagatcgctcgccatttccgctttggcaaccaagaagacgcccacgagtttctgcggtacacgattgatgcaatgcagaaagcttgcctgaacggatgcgctaagttggatcgacaaacacaggcaactactctagtacatcaaatcttcggtggttatctccgatccagagtcaaatgcagcgtgtgtaagagcgtatctgacacctacgacccctacttagatgtggcactcgaaattcgtcaggctgccaatattgtcagagccctggaactgttcgtgaaagccgatgttctttcgggggagaacgcatacatgtgcgcaaagtgcaagaaaaaggtgccagcaagtaagaggttcacgatccacaggacctccaacgtgctgaccttaagtctgaaacgattcgcgaatttttctggagggaagatcaccaaagacgtgggatatccagaatttctcaatattaggccctatatgtcgcagaataacggcgatccggtaatgtatggcctgtatgccgtgttagtccactctggatatagctgtcacgctggtcactactattgctatgtgaaggctagcaacggacaatggtaccaaatgaatgatagcctggtgcattcatctaacgtgaaggtagtgctgaaccagcaggcatacgtgctgttttatctgcgcattcccgggtcaaaaaaaagtcccgagggccttattagccgcacaggctccagctcgctgcccgggcgcccctctgtcatcccggaccactcgaaaaagaacattgggaatggcattatatcgagcccgctgacaggcaagcgccaggactccggaactatgaagaagccccatactacagaggagatcggcgtgccaatatccagaaatggcagcaccctcggcctgaaaagtcaaaatggatgtatcccccctaagcttcccagcggatctccttctcccaaactgtcacagactcccacccacatgccgaccatcctggatgatcctggaaagaaggtgaaaaagccagcgcctccactgcctactggcatgggttag

SEQ ID NO: 317905 - DNA, 1647 bp, Artificial Sequence
  derived and/or modified sequence
atgccaatcgtggataaactcaaagaggcattgaaacccggtaggaaggactccgctgacgacggcgaacttgggaagctgctggcttcaagcgccaagaaggttctgctgcagaagatcgaattcgaacccgcatccaagtcgttctcctaccagctcgaggcgctgaaatcaaaatatgtcctcttgaacccaaagacagaaggtgcaagccgacacaagagtggcgacgaccctcccgcacgtcgccagggatcagagcatacctatgagtcatgtggagacggggttcccgctcctcaaaaagtgctgttccctactgaacgcttatcccttcgatgggaaagagtttttcgcgtgggagccggactccacaacttaggaaacacatgttttttaaacgctactatacagtgcctcacttatactcctccgctcgctaactatctcttaagtaaagagcatgctcgatcgtgtcaccaggggtcgttttgtatgctttgcgttatgcaaaaccacatagtgcaagcattcgccaatagtggaaacgcaatcaagccggtcagtttcatcagagacttgaaaaagatcgcgagacactttcgattcgggaatcaggaagacgcccacgagttcctccggtatacaatcgacgctatgcagaaggcatgtctgaacgggtgtgcgaaattagacaggcaaacccaggccacaaccctagttcaccagatctttggagggtaccttaggtctagggtgaagtgtagcgtgtgcaagtccgtgtccgacacgtacgatccatatttggatgtagccctcgaaattcgacaagcagcaaatattgtgagggcacttgaactcttcgtcaaggccgacgtgctctccggcgagaacgcctacatgtgcgccaaatgcaaaaaaaaagtcccagcaagcaaacgtttcaccatccatagaacctccaatgtgctgacactctctctgaaacggttcgcgaactttagtggcggaaagattacgaaggacgttggctatcccgaatttcttaacatcagaccctacatgtcccagaataatggcgaccctgtcatgtatgggctctatgctgtcctcgtgcacagcggctatagttgccacgccggacactattattgttatgttaaagcgagtaacggacagtggtaccagatgaatgattcattagtgcactctagtaacgtcaaggtggtccttaatcagcaggcttacgtgctattctacctgagaattccgggttcaaaaaaatcacccgaaggcctgatttctagaacaggaagctctagtctccctggacgcccatctgtaattcctgaccattccaagaagaacatcggcaatggcatcattagctctccgctgacgggaaaaagacaagactccgggactatgaagaagccccacaccaccgaagagatcggggtcccaatcagtcggaatggatccactctggggctaaaatcacagaacggttgcatacctccaaaacttccatccgggtcacccagtcccaaactcagccaaacgccaacccatatgcctactatactcgatgatccaggtaaaaaagtaaaaaaaccggctccccctctgcccacaggaatggggtag

SEQ ID NO: 317906 - DNA, 1647 bp, Artificial Sequence
  derived and/or modified sequence
atgccaatagtggataagttgaaggaggccctgaaacccggccgcaaggactcggctgatgatggagaactggggaagcttcttgcctcctctgccaagaaggtccttttacagaaaatcgagttcgagccagccagcaagagcttctcctaccagctggaggccttaaagagcaaatatgtgttgctcaaccccaaaacagagggagctagtcgccacaagagtggagatgacccaccggccaggagacagggcagtgagcacacgtatgagagctgtggtgacggagtcccagccccgcagaaagtgcttttccccacggagcgactgtctctgaggtgggagcgggtcttccgcgtgggcgcaggactccacaaccttggcaacacctgctttctcaatgccaccatccagtgcttgacctacacaccacctctagccaactacctgctctccaaggagcatgctcgcagctgccaccagggaagcttctgcatgctgtgtgtcatgcagaaccacattgtccaggccttcgccaacagcggcaacgccatcaagcccgtctccttcatccgagacctgaaaaagatcgcccgacacttccgctttgggaaccaggaggacgcgcatgagttcctgcggtacaccatcgacgccatgcagaaagcctgcctgaatggctgtgccaagttggatcgtcaaacgcaggctactaccttggtccatcaaatttttggagggtatctcagatcacgcgtgaagtgctccgtgtgcaagagcgtctcggacacctacgacccctacttggacgtcgcgctggagatccggcaagctgcgaatattgtgcgtgctctggaactttttgtgaaagcagatgtcctgagtggagagaatgcctacatgtgtgctaaatgcaagaagaaggttccagccagcaagcgcttcaccatccacagaacatccaacgtcttaaccctttccctcaagcgctttgccaacttcagcggggggaagatcaccaaggatgtaggctatccggaattcctcaacatacgtccgtatatgtcccagaataatggtgatcctgtcatgtatggactctatgctgtcctggtgcactcgggctacagctgccatgccgggcactattactgctacgtgaaggcaagcaatggacagtggtaccagatgaatgattccttggtccattccagcaacgtcaaggtggttctgaaccagcaggcctacgtgctgttctatctgcgaattccaggctctaagaaaagtcccgagggcctcatctccaggacaggctcctcctcccttcccggccgcccgagtgtgattccagatcactccaagaagaacatcggcaatgggattatttcctccccactgactggaaagcgacaagactctgggacgatgaagaagccgcacaccactgaagagattggtgtgcccatatccaggaatggctccaccctgggcctgaagtcccagaacggctgcattcctccaaagctgccctcggggtccccttcccccaaactctcccagacacccacacacatgccaaccatcctagacgaccctggaaagaaggtgaagaagccagctcctccactgccaacgggcatgggctga

SEQ ID NO: 317907 - protein, 1397 aa, Artificial Sequence
  derived and/or modified sequence
MDTIFVKNVKEDGPAHRAGLRTGDRLVKVNGESVIGKTYSQVIALIQNSDDTLELSIMPKDEDILQLAYSQDAYLKGNEPYSGEARSIPEPPPICYPRKTYAPPARASTRATMVPEPTSALPSDPRSPAAWSDPGLRVPPAARAHLDNSSLGMSQPRPSPGAFPHLSSEPRTPRAFPEPGSRVPPSRLECQQALSHWLSNQVPRRAGERRCPAMAPRARSASQDRLEEVAAPRPWPCSTSQDALSQLGQEGWHRARSDDYLSRATRSAEALGPGALVSPRFERCGWASQRSSARTPACPTRDLPGPQAPPPSGLQGLDDLGYIGYRSYSPSFQRRTGLLHALSFRDSPFGGLPTFNLAQSPASFPPEASEPPRVVRPEPSTRALEPPAEDRGDEVVLRQKPPTGRKVQLTPARQMNLGFGDESPEPEASGRGERLGRKVAPLATTEDSLASIPFIDEPTSPSIDLQAKHVPASAVVSSAMNSAPVLGTSPSSPTFTFTLGRHYSQDCSSIKAGRRSSYLLAITTERSKSCDDGLNTFRDEGRVLRRLPNRIPSLRMLRSFFTDGSLDSWGTSEDADAPSKRHSTSDLSDATFSDIRREGWLYYKQILTKKGKKAGSGLRQWKRVYAALRARSLSLSKERREPGPAAAGAAAAGAGEDEAAPVCIGSCLVDISYSETKRRHVFRLTTADFCEYLFQAEDRDDMLGWIRAIRENSRAEGEDPGCANQALISKKLNDYRKVSHSSGPKADSSPKGSRGLGGLKSEFLKQSAARGLRTQDLPAGSKDDSAAAPKTPWGINIIKKNKKAAPRAFGVRLEECQPATENQRVPLIVAACCRIVEARGLESTGIYRVPGNNAVVSSLQEQLNRGPGDINLQDERWQDLNVISSLLKSFFRKLPEPLFTDDKYNDFIEANRIEDARERMRTLRKLIRDLPGHYYETLKFLVGHLKTIADHSEKNKMEPRNLALVFGPTLVRTSEDNMTDMVTHMPDRYKIVETLIQHSDWFFSDEEDKGERTPVGDKEPQAVPNIEYLLPNIGRTVPPGDPGSDSTTCSSAKSKGSWAPKKEPYAREMLAISFISAVNRKRKKRREARGLGSSTDDDSEQEAHKPGAGATAPGTQERPQGPLPGAVAPEAPGRLSPPAAPEERPAADTRSIVSGYSTLSTMDRSVCSGASGRRAGAGDEADDERSELSHVETDTEGAAGAGPGGRLTRRPSFSSHHLMPCDTLARRRLARGRPDGEGAGRGGPRAPEPPGSASSSSQESLRPPAAALASRPSRMEALRLRLRGTADDMLAVRLRRPLSPETRRRRSSWRRHTVVVQSPLTDLNFNEWKELGGGGPPEPAGARAHSDNKDSGLSSLESTKARAPSSAASQPPAPGDTGSLQSQPPRRSAASRLHQCL

SEQ ID NO: 317908 - DNA, 4194 bp, Artificial Sequence
  derived and/or modified sequence
atggacaccattttcgttaagaacgtgaaagaggacggaccagcgcatagagccggtttgcgcactggtgatcggctggtgaaggtcaacggggagtccgttatcggcaagacctacagccaggttatcgctctgatacagaacagcgatgacacactcgaattgtcaatcatgcctaaggacgaggacatcctacagctggcttattctcaggatgcttaccttaaaggaaacgaaccatattccggcgaggcaaggagtatcccggaaccgcctcccatttgctatcctcggaagacgtacgctccaccagctagagccagtactcgcgcgactatggtccccgagccaacttcagccctcccaagtgatccacggtcccctgccgcctggtccgatcccggtctgcgagttcctcctgcagctcgcgctcatttggacaattcctcccttggaatgtctcaacctcgtccaagtccaggcgctttcccccacctgtcttctgaaccacgaacaccccgcgccttcccagaacctggctccagggtccctccctctcgcttggagtgccagcaggctcttagccattggcttagcaatcaggtgcccagacgtgctggggagagaagatgcccggccatggctcctcgcgcccgtagtgcatcacaggacaggctagaagaagtggccgcccccagaccatggccctgctcaacttcccaagacgccttgagccagctggggcaggaaggttggcaccgggcccggtccgatgactacctctccagggccactagaagcgctgaggcattaggcccaggcgcgcttgtctcaccgcgctttgagaggtgtggttgggcatcgcagaggtctagcgcaagaacgcctgcctgtcctacacgggacctgcccggcccccaggctccgcctccctctgggctccaggggctcgatgacctcggttatattggctaccggtcatactcaccctctttccagaggagaacgggtctgcttcacgccttgtcctttagagattctccctttggcggattgcccacattcaaccttgcacagagtcccgcctccttcccgcccgaagccagcgaaccaccacgggtggtgagacctgaaccttctacaagggctttagagccccccgcggaggataggggagacgaggtggtcctgcgacaaaagccccccactggccgcaaggtacaactgacccccgccaggcagatgaacctagggttcggcgatgagagccccgaacccgaagcatctggtcgtggcgagcgactaggcaggaaagtcgctccattggccactacagaggacagtctggcctccatccctttcatcgatgagcccacaagtccatcaattgatctgcaggccaaacatgtccccgccagcgccgtggtctctagcgcaatgaacagcgcgccggtgttgggtactagcccgtcctcccctacgttcacattcactctggggcgtcattactcacaggactgctcctctataaaggccggcagaaggtccagttacctgttggctataaccaccgaacgttccaaatcttgcgacgatggactgaatacctttcgggacgagggaagagtactgagaaggctgcccaaccgcattccgagcctcagaatgctgcggtcttttttcactgacggcagtcttgatagttggggcacatccgaggacgccgatgcccccagtaaaaggcactcaacaagcgatctatccgacgctacattttccgacatacggcgcgaaggatggctatattataagcagatcctgactaagaagggaaaaaaagctggcagcggcctgcggcaatggaaacgagtctatgctgcattgcgcgctcggagcctgagcctgtctaaggagaggagggagccagggccggccgcagctggcgccgcagcggctggggctggcgaggacgaagctgcccccgtgtgcattggaagctgtctggtggacatctcgtactctgagaccaaaaggcgacacgtgttcagactgaccacagcagacttctgtgaatacctgttccaggcagaagatcgggatgatatgctggggtggattcgggctattcgcgagaattctcgggccgaaggcgaggatccgggctgtgcgaaccaggcactgatcagcaagaagctgaatgattacagaaaagtttcccactccagcggcccaaaggccgacagttctccaaaaggcagcagaggtctggggggattaaagagtgagttcctaaaacagagcgccgccagaggtctgcgtacgcaggatctgcctgcaggatccaaagacgatagcgctgcagccccaaagaccccatggggcatcaatatcataaagaagaataagaaagctgccccccgggcatttggagtaaggctggaagagtgccagcccgcaacagagaaccagcgcgtgccactgatcgttgccgcttgctgtagaatcgttgaggccagaggtctggagtctacgggcatctaccgtgtgcctgggaacaacgctgttgtgtcctctttgcaagagcaactcaaccgggggccaggagacatcaacctgcaggacgaacgctggcaggacctcaatgtgatcagttccttgctgaagtcttttttccgcaagctccctgaaccactattcactgacgataaatacaatgacttcatcgaagccaatagaatcgaagatgcaagggaacgcatgaggacactacggaagctgattagggacctcccaggccactactatgaaaccctgaagttcttagtcggacacctcaaaaccattgcagatcacagcgagaagaacaaaatggaaccaagaaatcttgcccttgtttttggccctactttggttcgaacatccgaagataatatgaccgacatggtaacacatatgcctgacaggtataaaattgtcgagaccctgattcagcacagcgactggttctttagtgacgaggaagataaaggggaacggacccccgtcggggacaaagaaccccaagctgtgccaaacattgaatatctacttcccaatatcggcagaaccgtaccccctggcgatcctgggtccgacagcacaacctgcagcagtgccaagtcgaaaggatcttgggcacctaaaaaggaaccatacgctcgtgagatgctggcaatctcctttatcagtgccgtgaacaggaagaggaaaaagcggcgcgaagctagaggtctggggagttctactgacgacgactccgaacaggaggcacataaaccaggagccggggctacagctcccggcacacaggagcggccacagggcccgctccccggcgctgttgcaccagaggcacccggcagactttctcctcctgccgcccccgaggaacgcccagcagccgacacacggtctattgtgtctggatacagtacactgtctacgatggacaggtctgtgtgtagtggggcaagtggtcgccgcgctggagctggagatgaggcagatgacgaacgctccgagctctctcacgtggaaactgataccgagggcgctgctggtgctggtcccggcgggaggctgacaaggcgccccagctttagctcacaccatttgatgccctgcgacacacttgcacggcgcagactggccaggggccgccctgacggggaaggcgcagggaggggcggcccaagggcaccagaacctccgggctccgcctcgagtagttcccaggaatccctacgccccccagcagcagcgttagcctcccgccctagtcgcatggaagccctgcggctacggctccgggggactgccgacgatatgctggcggtgaggctgcgtcgcccattgtcccccgagactcgaaggaggagaagctcctggaggaggcatacagtggtggtacagtctccattgactgacctgaattttaacgagtggaaggaactgggcgggggcggaccaccggagcctgcaggtgccagggcgcatagcgataataaagactcgggactttcatctcttgagtccaccaaggcccgcgctcctagttctgctgctagccagcccccggccccaggggacaccggctctctccagagccagcccccccgccggagcgccgcgtcccgactgcaccagtgtttgtag

SEQ ID NO: 317909 - DNA, 4194 bp, Artificial Sequence
  derived and/or modified sequence
atggacaccatctttgtgaagaatgtgaaggaggatggccctgcccaccgggccggcctgaggactggagaccggctggtgaaggtgaatggagagagcgtgattggcaagacctacagccaggtgattgccctgatccagaacagtgatgacaccctggagctgagcatcatgcccaaggatgaggacatcctgcagctggcctacagccaggatgcctacctgaagggaaatgagccctacagcggggaggcccggagcatccctgagcccccacccatctgctaccccaggaagacctacgcccccccagcccgggccagcacccgggccaccatggtgcctgagcccaccagcgccctgcccagcgaccccaggagccctgctgcctggagcgaccccggcctgcgggtgcccccagctgcccgggcccacctggacaacagcagcctgggcatgagccagccccggcccagccctggggccttcccccacctgagcagcgagcccaggaccccccgggccttccctgagcccggcagccgggtgccccccagccggctggagtgccagcaggccctgagccactggctgagcaaccaggtgccccggcgggccggggagcggcgctgcccagccatggccccccgggcccggagcgccagccaggaccggctggaggaggtggccgccccccggccctggccctgcagcaccagccaggatgccctgagccagctgggccaggagggctggcaccgggcccggagtgatgactacctgagccgggccaccaggtctgctgaggccctgggccctggggccctggtgagccccaggtttgagcgctgtggctgggccagccagaggagcagcgcccggaccccagcctgccccacccgggacctgcccggcccccaggcccccccacccagcggcctgcagggcctggatgacctgggctacatcggctaccgcagctacagccccagcttccagaggagaacaggcctgctgcacgccctgtccttccgggacagcccctttggaggcctgcccaccttcaacctggcccagagccctgccagcttccccccagaggccagcgagcccccccgggtggtgcggcctgagcccagcacccgggccctggagcccccagcagaagatagaggagatgaggtggtgctgcggcagaagcccccaactggaaggaaggtgcagctgaccccagcccggcagatgaacctgggctttggagatgagagccctgagcctgaggccagcggccgcggggagcggctgggcaggaaggtggcccccctggccaccacagaggacagcctggccagcatccccttcattgatgagcccaccagccccagcattgacctgcaggccaagcacgtgcctgccagcgctgtggtgagcagcgccatgaacagcgcccctgtgctgggcaccagccccagcagccccaccttcaccttcaccctgggccgccactacagccaggactgcagcagcatcaaggccggccgccgcagcagctacctgctggccatcaccacagagaggagcaagagctgtgatgatggcctgaacaccttcagagatgagggccgggtgctgcggcggctgcccaaccgcatccccagcctgaggatgctgcgctccttcttcacagatggcagcctggacagctggggcaccagtgaagatgctgatgcccccagcaagaggcacagcaccagtgacctgagtgatgccaccttcagtgacatccggcgggagggctggctgtactacaagcagatcctgaccaagaagggcaagaaggccggcagcggcctgcggcagtggaagagggtgtatgctgccctgcgggcccggagcctgagcctgagcaaggagcggcgggagcccggccctgctgctgctggagctgctgctgctggggccggggaggatgaagctgcccctgtgtgcatcggcagctgcctggtggacatctcctacagcgagaccaagagaagacatgtgttccggctgaccacagctgacttctgtgagtacctgttccaggctgaagatagagatgacatgctgggctggatccgggccatccgggagaacagcagagctgagggggaggaccccggctgtgccaaccaggccctgatcagcaagaagctgaatgactacaggaaggtgagccacagcagcggccccaaggctgacagcagccccaagggcagccggggcctgggcggcctgaagtctgagttcctgaagcagagcgctgcccggggcctgcggacccaggacctgcctgctggcagcaaggatgattctgctgctgcccccaagaccccctggggcatcaacatcatcaagaagaacaagaaggccgccccccgggcctttggagtgcggctggaggagtgccagcctgccacagagaaccagagggtgcccctcatcgtggccgcctgctgcagaattgtggaggcccggggcctggagagcacaggcatctacagagtgcccggcaacaatgctgtggtgagcagcctgcaggagcagctgaacagaggccctggggacatcaacctgcaggatgagcgctggcaggacctgaatgtcatcagcagcctgctgaagagcttcttcaggaagctgcctgagcccctcttcacagatgacaagtacaatgacttcatcgaggccaacagaattgaagatgcccgggagaggatgaggaccctgaggaagctgatccgggacctgcccggccactactatgagaccctgaagttcctggtgggccacctgaagaccatcgctgaccacagcgagaagaacaagatggagcccaggaacctggccctggtgtttggccccaccctggtgaggaccagcgaggacaacatgacagacatggtgacccacatgccagaccgctacaagatcgtggagaccctcatccagcacagcgactggttcttcagtgatgaagaagataaaggagagaggacccctgtgggggacaaggagccccaggccgtgcccaacatcgagtacctgctgcccaacattggaagaacagtgcccccaggggaccccggcagtgacagcaccacctgcagcagcgccaagagcaagggctcctgggcccccaagaaggagccctatgcccgggagatgctggccatctccttcatctctgctgtgaacaggaagaggaagaagagaagagaggcccggggcctgggcagcagcacagatgatgattctgagcaggaggcccacaagccaggggccggggccacagcccctggcacccaggagcggccccagggccccctgcccggggctgtggcccctgaggcccctggccgcctgagccccccagctgcccctgaggagaggcctgctgctgacaccaggagcatcgtgtctggctacagcaccctgagcaccatggacagatctgtgtgcagcggggccagcggcagaagagctggagctggagatgaagcagatgatgagaggtctgagctgagccacgtggagacagacacagaaggagctgctggagctggccctgggggccgcctgacccggcggcccagcttcagcagccaccacctgatgccctgtgacaccctggcccggcggcggctggcccggggccgcccagatggagagggcgccggccggggcggcccccgggcccctgagcccccaggcagcgccagcagcagcagccaggagagcctgcggcccccagctgctgccctggccagccggcccagcaggatggaggccctgcggctgcggctgcggggcacagcagatgacatgctggccgtgcggctgcggcggcccctgagccctgagaccaggagaagaagaagctcctggaggaggcacacagtggtggtgcagagccccctgacagacctgaacttcaatgagtggaaggagctgggcggcggcggccccccagagcctgctggggcccgggcccacagcgacaacaaggacagcggcctgagcagcctggagagcaccaaggcccgggcccccagcagcgctgccagccagcccccagcccctggggacaccggcagcctgcagagccagcccccccggcgctctgctgccagccggctgcaccagtgcctgtag

SEQ ID NO: 317910 - DNA, 4194 bp, Artificial Sequence
  derived and/or modified sequence
atggacaccatcttcgtgaagaacgtgaaggaggacggccccgcccaccgtgccggtctcaggacaggagatcgcctcgtgaaggtcaatggagagtcagtgattggcaaaacgtattctcaagtcatcgccttgattcaaaactcggatgacaccctggagcttagcatcatgcccaaagacgaggacatactacagctcgcatactcacaggatgcctacctgaaaggaaacgaaccctatagtggcgaggcccgctctatccctgaaccccctcctatttgctatcctcggaagacctatgcgccaccagcccgcgcttcaacccgggcgactatggtgccggagcccacttcggccttaccaagtgatccaaggagccctgccgcttggtctgaccctgggctacgggttcccccggctgcgcgagctcacttggataatagttcacttggcatgtcccagccccgaccctcacctggcgcatttcctcatttatcatcagaaccgcgcaccccgagagcttttcctgagccaggatccagggtgccacccagtagattggaatgtcagcaggctttgagccactggctgtcaaatcaggtccctcgacgcgcgggtgagcgacggtgccccgcaatggcgcccagagcccggtcagcgtcacaagacaggctggaagaggtggctgctccacggccatggccttgttcgaccagtcaagacgcactctcacagctcgggcaggagggctggcaccgcgctcggtccgacgattatcttagtcgtgccactcgaagcgccgaagcactgggacctggggccctcgtttccccacggttcgaacgttgtgggtgggcgagccaaagaagttccgcccgcaccccagcttgtccgaccagggacctgccagggccacaggctcccccaccatccgggctccagggtctagatgacctcggctatattggttacaggagttactccccaagttttcagcggagaaccgggctgcttcatgctctgtcctttcgtgatagccccttcggcggattacctacctttaacctggcacagagccccgcgagctttccgccggaagctagcgagcccccccgggtcgtgcgccccgagccttctacccgcgcactcgagccccctgcagaggaccgcggagatgaggtggtgttaagacagaagccaccaacagggcggaaagtgcagctgacacctgctaggcagatgaacctgggcttcggcgacgaatcccccgagcctgaggccagcgggaggggcgagcgcctcggaagaaaagtcgcacctttggcaactacggaagactctctcgcatccatcccattcattgacgagccgacttcaccctccatcgacctacaggccaagcatgtccctgcctctgctgtggtttctagcgccatgaactctgccccagttctcgggacttctcccagctcacccacattcacatttacactggggcgccactactcacaagattgttcctcgataaaggctggacggcgttcatcttacctgctcgcaattaccactgaacgatcgaaatcatgtgacgatgggctgaatacgttccgagacgaaggtagggtcctgagaaggcttccaaatcgcatccccagcctgcggatgcttcggagctttttcaccgacggctcattggactcttggggcacctccgaagacgctgatgcacctagtaaacgacactctacatctgacctgagcgacgccacgtttagcgacatcagacgggagggatggttgtactataagcagatcctcactaaaaagggaaagaaagcaggctccggactacggcaatggaaaagggtctacgccgccctgcgcgctcggtcgctgagtctttcaaaggaacggcgcgagcctggtccggccgcggctggggccgccgccgcaggcgccggcgaagatgaggctgcccccgtatgtatcgggtcctgtttggttgatatttcatactctgagacaaaaaggcggcacgtgttccgccttacaacagctgatttctgtgaatatctgttccaggctgaggatagagatgacatgctggggtggatcagagccataagggaaaactctcgggctgaaggggaagaccccggctgcgccaaccaagccctcatttccaaaaagctaaatgactatcgaaaggttagccattccagcggtccgaaggccgattcttcccctaagggttctcgcggtctcggcggtcttaagagcgaattcctgaagcaatcagcggcgaggggcctgcgcacgcaagatttaccagccggatccaaggatgatagtgcagctgctccaaagactccctggggaataaatattatcaagaaaaacaaaaaagctgccccaagggcctttggtgtgaggctggaagagtgtcagccagcgacagagaatcaacgagtgccactcattgtggcagcttgttgcagaatagtggaggctaggggccttgagtctaccggaatctacagagtgcctggcaataatgcagttgtctcatccttacaagaacagttaaaccgtggcccgggagacattaacctccaggacgaacggtggcaagaccttaacgtgattagcagcctactgaaatccttttttcgcaaactcccagaacctctctttacggatgataaatacaatgattttatagaagccaatcggattgaagatgcgagagaaagaatgcggactctccgcaagttgattcgagatcttccagggcattattacgagaccctaaagtttctggtagggcatctgaagacgattgccgaccattctgagaagaacaaaatggagccacgtaatttagctctggtattcgggccaacactcgtacggacctctgaagataacatgactgacatggtgacccatatgcctgatcggtataagatcgtggagaccctcatccagcattctgattggttcttctccgatgaggaggataagggcgagagaacaccggttggggacaaggagccgcaggcggtgcctaatatcgaatacctcttgccaaacattggccgcactgtgcctcccggcgaccccggaagtgacagcacgacctgttccagcgctaagagcaaggggagctgggctcctaaaaaagagccttatgccagggagatgctggcaatctccttcatttcggctgtgaaccgcaaaaggaagaaaaggcgggaagcacgagggctcggttccagtacagacgatgatagtgagcaggaagctcacaaacctggcgcaggcgccaccgcaccgggtacgcaggagaggcctcaagggcccttgcccggggccgtggcccccgaagccccaggccgattatctccacccgccgctcctgaagagaggcccgctgcggacacacgctctattgtgtccgggtattcgaccctgtccaccatggatcgttctgtgtgctctggcgcctccggcagacgggcgggcgcaggcgacgaagcagatgacgagcggagcgaactcagccacgtcgagaccgataccgaaggagcagcgggagcaggccctggtggacgtctaaccaggcggccaagttttagctctcaccacctgatgccctgcgatacccttgccagaagacgactggcccgcgggcggccagacggagagggcgcgggccggggcgggccacgtgccccagagccccccggttctgcaagcagcagctcccaggagtcgctgaggccacccgccgccgctcttgcctccaggccgagtcgcatggaggccttacgcctcaggctgcgtgggaccgcggacgacatgctagccgttcgattaagaagaccactatctccagagacacgaaggagaaggagctcttggcgcagacacaccgtcgtcgtccagtcaccactaacagatctcaactttaatgagtggaaagagttaggcggcggaggtccgcctgagcctgcgggagctcgggcacactccgataacaaagattctgggctctcttcccttgagagtaccaaggcgagagccccgtcgtctgccgctagccagccgccagcaccgggcgatactggatcattgcaaagtcagccgcctaggcggagcgctgcgagtaggctccaccaatgcctgtag

SEQ ID NO: 317911 - DNA, 4194 bp, Artificial Sequence
  derived and/or modified sequence
atggatacaatcttcgtaaagaacgtaaaagaagacggtccggcacatcgagcaggcctcaggaccggcgaccgcttagtgaaggtgaacggagaatccgtgattggcaaaacatatagccaggtaatcgcactgattcagaatagcgatgacacccttgaactgagcatcatgcctaaggatgaggacattctacagctggcctattctcaggacgcatacctaaagggcaatgagccatactccggggaggctcggagcatacctgagccccctcctatctgttaccccaggaagacatatgcccctcctgcaagagcaagcacccgggctaccatggtgcccgagcccaccagcgctctgccatctgacccaagatcccccgcagcgtggtccgacccgggacttagggtccctccagcagccagggcccaccttgacaatagctctctaggcatgagtcagccacggccttcaccaggggcttttcctcacctgtcctctgaacccagaaccccgcgtgctttccccgagcccggatctcgtgtgcccccttcccgcctggagtgtcaacaggccttgtcccactggctgtctaaccaagtgccaagaagagctggagagaggcggtgcccagccatggcccctagggccagatccgcttcccaggaccgcctcgaggaggtggccgcaccccgtccttggccgtgttccacatcacaggatgcactgtcgcagctcggacaggagggatggcaccgggcacggtcagatgactacctgagtcgggcaacccggagcgccgaagctttaggccctggggcactagtgtctcctagatttgagaggtgcggttgggcttcccagcgctctagcgctaggacaccagcctgtccaaccagggatctgccagggcctcaggctcctccacccagtggcctgcagggtctggacgacctgggctacattggctacagatcctattctccgtccttccagcgcaggacaggactcctgcatgcccttagcttccgcgactccccttttggtggacttccgacgtttaatctcgctcaaagtcctgcatcgtttcccccagaggctagcgagccccctcgagtggtgcgccctgaaccttccactcgggctctggaacccccagcagaagaccgcggagatgaggtcgtgctgaggcagaagcccccaacagggaggaaggtccagctcacgcctgcaaggcagatgaacctggggttcggggacgagtcacccgagccagaagcctcgggaaggggggaacgactcggcaggaaagtggccccactggcgaccactgaggatagcctggctagcatacctttcatcgatgagccgacctccccttcaattgacctccaggcaaagcatgtgcctgcgtcagccgttgtgtccagcgccatgaactctgccccagtactcggcaccagccctagtagccctacgttcactttcactcttggcagacactactcacaggactgcagctctatcaaagctgggagaaggtctagctacctactcgccataactaccgagagatccaaatcatgtgatgatggtctcaataccttcagggacgagggacgagttctgagacgcctgcctaaccgaattccctcattgaggatgctgagatcctttttcaccgatggaagcctggactcgtggggaacttctgaggacgccgacgctccaagcaagagacactctacatccgacctctccgatgcaaccttcagtgacatacgacgagaaggatggctgtactataagcagatcctgaccaagaagggcaagaaagcaggcagtggtctcagacagtggaaaagggtctatgccgcactccgtgccagatctctctctctttctaaggaaaggcgcgagccagggccagccgcagctggagcagccgcagcaggggcaggggaagacgaagcagctccggtttgcattggcagctgcctcgtggacataagttatagcgagaccaaacggaggcatgtgtttcgcctcacaacggctgacttttgcgagtatctgtttcaagcggaagaccgcgacgatatgcttggttggatccgggcaataagagagaactctcgggctgagggtgaggatccaggatgcgccaaccaagctttaattagtaagaaacttaacgattatagaaaggtgtcccacagctcagggcctaaggcagactcaagcccaaagggatccagaggactgggcggtctgaagagcgaatttctcaagcagagcgccgctaggggtctcagaacccaggacttgcccgcaggtagtaaggacgattcagctgccgcaccgaaaactccatgggggatcaacattataaagaaaaacaagaaggccgctccacgcgcttttggagtccgcttggaagagtgccagcccgcaacggagaaccagcgggttcctctgatcgtggcagcctgttgtagaatcgttgaggccagaggacttgagtcaacaggtatctacagggttccaggcaacaacgcggttgtctcctcgctgcaggaacagctgaatcggggacccggagatatcaaccttcaagacgagaggtggcaggatctcaacgtcatctcctctctcctgaagagcttctttcgaaaactgccagaacctctgtttacggacgacaagtacaacgacttcatcgaggcaaacaggatcgaggatgcccgagaacgaatgcgaacgctgcgcaaactgattcgcgatcttcctggccattactacgagacgcttaagttcttggtagggcacttgaaaaccattgccgaccacagcgaaaagaacaagatggaacccagaaacctggctttggtgttcgggcctacattggtcaggacaagtgaagataacatgacagacatggtgacacatatgcctgataggtataagatcgtggagaccctgatccagcattctgattggttcttttctgatgaggaggacaaaggcgagcggacccccgtgggggacaaggaaccgcaggctgtgccaaatatagagtacctgttacccaacattggacgaactgtcccccctggggacccgggttcagacagcaccacatgctcttctgcaaaatctaaaggttcctgggcaccaaaaaaggaaccatatgccagggagatgctggctatctcctttatttcggccgtaaaccgaaagaggaagaagaggagggaggccagggggttggggagttccactgacgacgactcggaacaggaagcccataagcccggtgcaggagcaacagcaccaggcacccaggaaaggccacagggaccgctcccaggggctgtggctccggaggccccagggaggctgagccctcccgcagccccagaagagcgtcctgcagccgacacccggagcatcgtctcaggctatagcacactgtcaactatggataggagcgtctgctctggcgctagcggtcgacgggcaggcgcaggagacgaagcagacgatgagaggagcgagctgtcacacgttgaaaccgatacagaaggcgctgcgggagctggccctggtgggcgtctgacccgacgccctagcttcagcagtcaccacctcatgccttgcgacactttggccagacggcgtctggcgagggggaggccagacggagagggagccggaagggggggtcctcgcgcacccgagcctcctgggtccgcctcctcatctagccaagaatctttgcggccaccagcagcagccctagcttcacgacctagccggatggaggctctgaggttacgcttaagagggactgctgacgatatgctcgccgtgcgtctgcggaggcccctttcccccgagactcgacgacgccgaagctcttggcggcgacacacagttgttgttcaaagccccctaaccgatctaaacttcaacgaatggaaagagctgggaggaggcggacctcctgaacccgcaggagcccgagcacattccgataacaaggactctggcctcagctccctcgaatccactaaggcgcgagctccaagttcagccgcttcccagccacctgcgccaggagacaccggatccctgcagagccagccccctcgcaggtctgccgcttcacgcctccatcagtgcctctag

SEQ ID NO: 317912 - DNA, 4194 bp, Artificial Sequence
  derived and/or modified sequence
atggacaccatcttcgtgaagaacgtgaaggaggacggccccgcccacagagccggcctgagaaccggcgacagactggtgaaggtgaacggcgagagcgtgatcggcaagacctacagccaggtgatcgccctgatccagaacagcgacgacaccctggagctgagcatcatgcccaaggacgaggacatcctgcagctggcctacagccaggacgcctacctgaagggcaacgagccctacagcggcgaggccagaagcatccccgagcccccccccatctgctaccccagaaagacctacgccccccccgccagagccagcaccagagccaccatggtgcccgagcccaccagcgccctgcccagcgaccccagaagccccgccgcctggagcgaccccggcctgagagtgccccccgccgccagagcccacctggacaacagcagcctgggcatgagccagcccagacccagccccggcgccttcccccacctgagcagcgagcccagaacccccagagccttccccgagcccggcagcagagtgccccccagcagactggagtgccagcaggccctgagccactggctgagcaaccaggtgcccagaagagccggcgagagaagatgccccgccatggcccccagagccagaagcgccagccaggacagactggaggaggtggccgcccccagaccctggccctgcagcaccagccaggacgccctgagccagctgggccaggagggctggcacagagccagaagcgacgactacctgagcagagccaccagaagcgccgaggccctgggccccggcgccctggtgagccccagattcgagagatgcggctgggccagccagagaagcagcgccagaacccccgcctgccccaccagagacctgcccggcccccaggcccccccccccagcggcctgcagggcctggacgacctgggctacatcggctacagaagctacagccccagcttccagagaagaaccggcctgctgcacgccctgagcttcagagacagccccttcggcggcctgcccaccttcaacctggcccagagccccgccagcttcccccccgaggccagcgagccccccagagtggtgagacccgagcccagcaccagagccctggagccccccgccgaggacagaggcgacgaggtggtgctgagacagaagccccccaccggcagaaaggtgcagctgacccccgccagacagatgaacctgggcttcggcgacgagagccccgagcccgaggccagcggcagaggcgagagactgggcagaaaggtggcccccctggccaccaccgaggacagcctggccagcatccccttcatcgacgagcccaccagccccagcatcgacctgcaggccaagcacgtgcccgccagcgccgtggtgagcagcgccatgaacagcgcccccgtgctgggcaccagccccagcagccccaccttcaccttcaccctgggcagacactacagccaggactgcagcagcatcaaggccggcagaagaagcagctacctgctggccatcaccaccgagagaagcaagagctgcgacgacggcctgaacaccttcagagacgagggcagagtgctgagaagactgcccaacagaatccccagcctgagaatgctgagaagcttcttcaccgacggcagcctggacagctggggcaccagcgaggacgccgacgcccccagcaagagacacagcaccagcgacctgagcgacgccaccttcagcgacatcagaagagagggctggctgtactacaagcagatcctgaccaagaagggcaagaaggccggcagcggcctgagacagtggaagagagtgtacgccgccctgagagccagaagcctgagcctgagcaaggagagaagagagcccggccccgccgccgccggcgccgccgccgccggcgccggcgaggacgaggccgcccccgtgtgcatcggcagctgcctggtggacatcagctacagcgagaccaagagaagacacgtgttcagactgaccaccgccgacttctgcgagtacctgttccaggccgaggacagagacgacatgctgggctggatcagagccatcagagagaacagcagagccgagggcgaggaccccggctgcgccaaccaggccctgatcagcaagaagctgaacgactacagaaaggtgagccacagcagcggccccaaggccgacagcagccccaagggcagcagaggcctgggcggcctgaagagcgagttcctgaagcagagcgccgccagaggcctgagaacccaggacctgcccgccggcagcaaggacgacagcgccgccgcccccaagaccccctggggcatcaacatcatcaagaagaacaagaaggccgcccccagagccttcggcgtgagactggaggagtgccagcccgccaccgagaaccagagagtgcccctgatcgtggccgcctgctgcagaatcgtggaggccagaggcctggagagcaccggcatctacagagtgcccggcaacaacgccgtggtgagcagcctgcaggagcagctgaacagaggccccggcgacatcaacctgcaggacgagagatggcaggacctgaacgtgatcagcagcctgctgaagagcttcttcagaaagctgcccgagcccctgttcaccgacgacaagtacaacgacttcatcgaggccaacagaatcgaggacgccagagagagaatgagaaccctgagaaagctgatcagagacctgcccggccactactacgagaccctgaagttcctggtgggccacctgaagaccatcgccgaccacagcgagaagaacaagatggagcccagaaacctggccctggtgttcggccccaccctggtgagaaccagcgaggacaacatgaccgacatggtgacccacatgcccgacagatacaagatcgtggagaccctgatccagcacagcgactggttcttcagcgacgaggaggacaagggcgagagaacccccgtgggcgacaaggagccccaggccgtgcccaacatcgagtacctgctgcccaacatcggcagaaccgtgccccccggcgaccccggcagcgacagcaccacctgcagcagcgccaagagcaagggcagctgggcccccaagaaggagccctacgccagagagatgctggccatcagcttcatcagcgccgtgaacagaaagagaaagaagagaagagaggccagaggcctgggcagcagcaccgacgacgacagcgagcaggaggcccacaagcccggcgccggcgccaccgcccccggcacccaggagagaccccagggccccctgcccggcgccgtggcccccgaggcccccggcagactgagcccccccgccgcccccgaggagagacccgccgccgacaccagaagcatcgtgagcggctacagcaccctgagcaccatggacagaagcgtgtgcagcggcgccagcggcagaagagccggcgccggcgacgaggccgacgacgagagaagcgagctgagccacgtggagaccgacaccgagggcgccgccggcgccggccccggcggcagactgaccagaagacccagcttcagcagccaccacctgatgccctgcgacaccctggccagaagaagactggccagaggcagacccgacggcgagggcgccggcagaggcggccccagagcccccgagccccccggcagcgccagcagcagcagccaggagagcctgagaccccccgccgccgccctggccagcagacccagcagaatggaggccctgagactgagactgagaggcaccgccgacgacatgctggccgtgagactgagaagacccctgagccccgagaccagaagaagaagaagcagctggagaagacacaccgtggtggtgcagagccccctgaccgacctgaacttcaacgagtggaaggagctgggcggcggcggcccccccgagcccgccggcgccagagcccacagcgacaacaaggacagcggcctgagcagcctggagagcaccaaggccagagcccccagcagcgccgccagccagccccccgcccccggcgacaccggcagcctgcagagccagccccccagaagaagcgccgccagcagactgcaccagtgcctgtag

SEQ ID NO: 317913 - DNA, 375 bp, Artificial Sequence
  derived and/or modified sequence
atccccattttccagagcgggaagccgacgctcaaccccgcgccgcgacttgcccgaggtcacccagtgggccagcggctccgggaccgaggcgcggggcgggttgaggccggcgctgcaggcagcggcggctgcgcggtgaacgaggcggcctgcgcggcggagtgctgagtcccgatccccggctctgtccggcccacggatcctcaagcccgggccccgggcccggccccagcctcagccctgagcgtctcggggcggatggcgcggggcggcgggggcgggcggtgctgagccctgcgcgggccatggcctcggcctgcggggcgccgggcccggggggcgccctgggcagccaggccccctcctggtacc

SEQ ID NO: 317914 - protein, 92 aa, Artificial Sequence
  derived and/or modified sequence
MAGRGGAARPNGPAAGNKICQFKLVLLGESAVGKSSLVLRFVKGQFHEYQESTIGAAFLTQTVCLDDTTVKFEIWDTAGQERYHSLAPMYYR

SEQ ID NO: 317915 - DNA, 651 bp, Artificial Sequence
  derived and/or modified sequence
atggccggcagaggcggcgccgccagacccaacggccccgccgccggcaacaagatctgccagttcaagctggtgctgctgggcgagagcgccgtgggcaagagcagcctggtgctgagattcgtgaagggccagttccacgagtaccaggagagcaccatcggcgccgccttcctgacccagaccgtgtgcctggacgacaccaccgtgaagttcgagatctgggacaccgccggccaggagagataccacagcctggcccccatgtactacagaggcgcccaggccgccatcgtggtgtacgacatcaccaacaccgacaccttcgccagagccaagaactgggtgaaggagctgcagagacaggccagccccaacatcgtgatcgccctggccggcaacaaggccgacctggccagcaagagagccgtggagttccaggaggcccaggcctacgccgacgacaacagcctgctgttcatggagaccagcgccaagaccgccatgaacgtgaacgagatcttcatggccatcgccaagaagctgcccaagaacgagccccagaacgccaccggcgcccccggcagaaacagaggcgtggacctgcaggagaacaaccccgccagcagaagccagtgctgcagcaactag

SEQ ID NO: 317916 - DNA, 651 bp, Artificial Sequence
  derived and/or modified sequence
atggccggcaggggaggagctgcccgccccaatggcccagctgctggaaacaagatctgccagttcaaactggtactcttaggggagtccgcagtgggcaagagtagcctggtcctgcgcttcgtgaaaggtcaattccacgagtatcaggagtccacgatcggcgccgccttcctaacccagactgtctgcttggacgacacgaccgtgaaatttgagatttgggatactgccggacaagaacggtatcactctctggccccaatgtattaccgaggagcccaagcagccatcgtggtctacgacattacaaacacagacacttttgctcgcgccaagaattgggtcaaagagctgcaaagacaggctagccccaatatcgtgatcgcactggcggggaataaagccgatttggcatcaaagcgagcagtggaatttcaagaggcccaagcttacgccgatgacaacagcttgctgttcatggaaacatcagccaagaccgcaatgaacgtaaatgagatatttatggctatcgcaaaaaagctgccaaagaatgaaccccaaaacgcgacaggtgcaccagggcgaaatcgcggcgttgatctccaggagaataaccccgcctcacgtagccagtgttgcagcaactag

SEQ ID NO: 317917 - DNA, 651 bp, Artificial Sequence
  derived and/or modified sequence
atggccggccggggcggggccgcccggcccaatggacctgctgctggcaacaagatctgccagttcaagctggtgctgctgggggagagcgctgtgggcaagagcagcctggtgctgcgctttgtgaagggccagttccacgagtaccaggagagcaccatcggggccgccttcctgacccagacagtgtgcctggatgacaccaccgtgaagtttgagatctgggacacagctggccaggagcgctaccacagcctggcccccatgtactacagaggagcccaggccgccatcgtggtgtatgacatcaccaacacagacacctttgcccgggccaagaactgggtgaaggagctgcagaggcaggccagccccaacatcgtgattgccctggccggcaacaaggctgacctggccagcaagagagctgtggagttccaggaggcccaggcctatgcagatgacaacagcctgctcttcatggagaccagcgccaagacagccatgaatgtgaatgagatcttcatggccatcgccaagaagctgcccaagaatgagccccagaatgccactggagcccctggcaggaacagaggagtggacctgcaggagaacaacccagccagccgcagccagtgctgcagcaactag

SEQ ID NO: 317918 - DNA, 651 bp, Artificial Sequence
  derived and/or modified sequence
atggccggccggggcggcgccgcccggcccaacggccccgccgccggcaataaaatttgtcagttcaaactggtgctgttgggcgagtctgctgtcggcaagagctctttggtcttgaggtttgtgaagggtcagtttcacgagtaccaggaatccacgattggagcagccttcctcacccagaccgtatgtctcgacgacacaactgtgaaattcgaaatctgggacacagccggccaggagcgataccattcgctggcccccatgtattatagaggggctcaggccgccattgtggtttacgatatcactaacactgacaccttcgcacgagcgaagaattgggtgaaagagctgcagaggcaggcatcaccaaatatcgtgatcgcacttgcaggaaataaagcagatctagcttccaaaagggcagttgagttccaagaagctcaggcttacgcagacgataacagcttgctatttatggaaaccagtgctaaaaccgctatgaacgttaatgagatcttcatggcaatcgctaaaaagttaccaaagaacgagccacagaatgccacaggagctcccgggagaaacaggggtgtggacctgcaagaaaataatcctgcttctaggtcacagtgctgtagcaactag

SEQ ID NO: 317919 - DNA, 651 bp, Artificial Sequence
  derived and/or modified sequence
atggcaggaagagggggtgccgcacgcccaaatggcccagcggcaggcaataagatatgtcaattcaaactggtgttgctcggcgagagtgcagttggtaagtctagcctggtccttcggtttgtgaaagggcaatttcacgagtaccaagagtctaccatcggcgcagccttcctgactcaaaccgtatgcctcgacgataccactgttaagttcgaaatctgggatacagccggtcaggagcggtatcacagccttgctcctatgtactataggggggcacaagccgctattgtcgtttatgatataaccaacactgacacattcgcccgtgccaagaattgggtcaaagagctccaacggcaggcttctccgaacatcgtgatagctttagctggcaataaagcagatctggcttccaagagggccgtggagtttcaggaagcccaggcttacgctgacgacaacagcctgctgtttatggaaacttcagccaaaactgcgatgaacgtcaacgaaatctttatggcaatagccaagaagctccccaagaacgaaccacagaatgccactggcgcacccggtaggaatcgtggtgtagacctgcaagagaacaatcccgcttccaggtctcagtgttgctccaactag

SEQ ID NO: 317920 - DNA, 651 bp, Artificial Sequence
  derived and/or modified sequence
atggctggccggggtggcgcagctcgacccaatggtcctgcggccggcaataaaatatgccagtttaagctggtcctgttgggggagtcagctgtcggaaagagctccctcgtgctgagattcgtaaaaggtcaattccacgagtaccaagagtcaacgattggtgccgcattcctgacacagaccgtgtgcctggacgatacaaccgtaaagtttgagatatgggacacagctgggcaggagagatatcactccctggctccaatgtactataggggggcccaggcagcaatcgttgtttacgatatcacaaatacagatacgtttgccagggcaaaaaactgggtcaaggaactgcaacggcaggcttccccaaatatcgtgattgctctggcagggaataaggccgatctggcttcaaagagagctgtcgagtttcaggaggcgcaggcatatgccgatgacaattccctgttgttcatggaaacctctgcaaagactgccatgaatgtcaatgaaatattcatggctatcgcgaaaaagctgcccaagaacgagcctcagaacgcaactggcgctcccggccgtaatcgaggtgtagatttacaggaaaacaatccggcatcccgctcccagtgttgcagtaattag

SEQ ID NO: 317921 - DNA, 651 bp, Artificial Sequence
  derived and/or modified sequence
atggccggacgaggaggggcggccaggccaaacggacctgctgcgggaaacaaaatatgccagtttaagctggtgctgcttggagagagcgccgtaggcaagtctagcctggtgctgcggtttgtgaagggtcagtttcacgaataccaagagagcaccattggcgccgccttcctcacgcaaacggtatgccttgacgataccaccgtgaaatttgaaatttgggacaccgccggacaagagaggtatcattccctcgctcccatgtattacaggggcgcacaagctgctatcgtggtgtatgacatcacgaatactgacacctttgctagggctaagaattgggttaaagagttacagcgccaggcttctcctaatatcgtgattgcgctagctgggaacaaagccgatctcgcctctaagcgcgccgtcgagtttcaggaagcacaggcctacgcagacgataattcactactgtttatggagacaagtgcaaaaaccgccatgaacgtgaacgagatctttatggctatcgcaaaaaaactaccgaagaacgaacctcaaaacgctactggtgctcccgggcgaaataggggggtagacctgcaagaaaataatcctgccagtcgctctcaatgttgctccaactag

SEQ ID NO: 317922 - DNA, 225 bp, Artificial Sequence
  derived and/or modified sequence
atggcgggaaggggaggcgccgcccgccccaacggacctgctgctggtaacaagatctgtcagtttaagctggtgctactgggggagagcgcagtgggcaagtcatctctggtcctccggtttgtgaaaggccagttccatgaatatcaggaatctaccatcggcgcagcatttctgacgcagacggtgtgtctagatgatactaccgtcaaatttgaaatctag

SEQ ID NO: 317923 - DNA, 279 bp, Artificial Sequence
  derived and/or modified sequence
atggccggacgaggcggcgctgctaggcctaacggccccgcggccggtaacaaaatctgccaattcaagttggttctcctcggggaaagcgctgtgggtaaatcctccctagttctgaggtttgtcaaagggcagttccacgagtatcaggaaagcacgatcggagctgcttttttgacccagaccgtgtgtcttgatgacaccacggtgaagtttgaaatctgggataccgccggacaggagcggtatcactccctggcccctatgtactaccgctag

SEQ ID NO: 317924 - DNA, 375 bp, Artificial Sequence
  derived and/or modified sequence
atggccggtcgaggaggagcggcccgacccaacggaccagctgccggcaataagatttgccagtttaagctcgtgctcctcggggagtccgccgtgggtaaaagcagtcttgtgctcaggttcgttaagggccagttccacgagtatcaggaatctacaatcggggccgccttcctcacccagacagtgtgcttagacgatactacagtcaagttcgagatctgggataccgctggacaggagcgctatcacagccttgcaccgatgtactaccgcggcgcacaggcagctattgtagtgtacgatattacgaacaccgacacatttgctagggccaaaaactgggtgaaggagttacaacgtcaggccagctag

SEQ ID NO: 317925 - DNA, 225 bp, Artificial Sequence
  derived and/or modified sequence
atggccggccggggcggggccgcccggcccaatggacctgctgctggcaacaagatctgccagttcaagctggtgctgctgggggagagcgctgtgggcaagagcagcctggtgctgcgctttgtgaagggccagttccacgagtaccaggagagcaccatcggggccgccttcctgacccagacagtgtgcctggatgacaccaccgtgaagtttgagatctag

SEQ ID NO: 317926 - DNA, 279 bp, Artificial Sequence
  derived and/or modified sequence
atggccggccggggcggggccgcccggcccaatggacctgctgctggcaacaagatctgccagttcaagctggtgctgctgggggagagcgctgtgggcaagagcagcctggtgctgcgctttgtgaagggccagttccacgagtaccaggagagcaccatcggggccgccttcctgacccagacagtgtgcctggatgacaccaccgtgaagtttgagatctgggacacagctggccaggagcgctaccacagcctggcccccatgtactacagatag

SEQ ID NO: 317927 - DNA, 375 bp, Artificial Sequence
  derived and/or modified sequence
atggccggccggggcggggccgcccggcccaatggacctgctgctggcaacaagatctgccagttcaagctggtgctgctgggggagagcgctgtgggcaagagcagcctggtgctgcgctttgtgaagggccagttccacgagtaccaggagagcaccatcggggccgccttcctgacccagacagtgtgcctggatgacaccaccgtgaagtttgagatctgggacacagctggccaggagcgctaccacagcctggcccccatgtactacagaggagcccaggccgccatcgtggtgtatgacatcaccaacacagacacctttgcccgggccaagaactgggtgaaggagctgcagaggcaggccagctag

SEQ ID NO: 317928 - DNA, 651 bp, Artificial Sequence
  derived and/or modified sequence
atggccggccggggcggcgccgcccggcccaacggccccgccgccggcaataagatctgtcagtttaagttggtcctgctgggcgaatcggcagtggggaaatcctctcttgttttaagattcgtgaaggggcaattccatgagtatcaggagagcactattggtgccgcattcttgacccagaccgtttgcctagatgatactaccgtgaaattcgaaatttgggataccgctggtcaggagcgataccattctctggctcctatgtactatcggggagctcaggctgccattgtggtctatgacattactaatacagataccttcgcccgcgcaaaaaactgggtgaaggaactacaaaggcaggccagtcctaacattgtgatagctctggccggcaataaggctgatctggcatcaaaacgggctgtggaatttcaggaggcccaggcatatgctgacgataatagcctgctgttcatggagacgagcgctaaaacggcgatgaacgtcaacgaaatatttatggccatcgcaaaaaagttgccaaagaacgagccccagaacgctactggtgctcccggcagaaacagaggcgtcgatctccaggagaataatcctgctagtaggtctcagtgctgctccaactag

SEQ ID NO: 317929 - DNA, 651 bp, Artificial Sequence
  derived and/or modified sequence
atggccggccggggcggcgccgcccggcccaacggccccgccgccggcaacaaaatctgccagttcaagttggtgctgctcggtgagtctgctgtgggcaaatcgtcgctggtattgcgctttgtgaaagggcagtttcatgaatatcaggagagtactattggggccgcctttctaacgcagacagtgtgcctggacgatacgacagtgaagtttgagatctgggatacagccgggcaggaaaggtatcatagcctggcacccatgtactaccgcggcgctcaggcagccatcgtggtttacgatattacaaataccgataccttcgcccgtgccaaaaattgggttaaggaactgcagcgacaggccagcccgaatattgtcatcgcccttgctggcaataaggcagacttggccagcaaacgggccgtagagtttcaagaagcacaggcttacgctgacgacaattcactacttttcatggaaacatcagcaaaaactgccatgaacgtcaatgagatctttatggcaattgcaaagaaactgccaaaaaatgagccccagaatgccactggggcccccgggcgtaataggggagtggatctgcaagagaataaccctgcatcgagatcacagtgttgttctaactag

SEQ ID NO: 317930 - DNA, 225 bp, Artificial Sequence
  derived and/or modified sequence
atggccggccggggcggcgccgcccggcccaacggccccgccgccggcaacaaaatctgtcagttcaaacttgtgctgctcggcgagtccgctgtcggaaaaagctcattggttcttaggttcgtcaaaggccaattccacgagtatcaagaatcaaccatcggcgctgcattcctgacccagacagtctgtctggatgacacgaccgttaagtttgaaatctag

SEQ ID NO: 317931 - DNA, 279 bp, Artificial Sequence
  derived and/or modified sequence
atggccggccggggcggcgccgcccggcccaacggccccgccgccggaaacaagatctgccagttcaaactcgtgctcttaggggaaagcgccgttggtaaaagctccctggttttgaggtttgttaaaggacagtttcatgaataccaagagagtactatcggcgccgcctttcttacacaaacagtgtgtctggacgacaccacagtcaagttcgagatttgggatactgctggccaagagagatatcattcccttgctcctatgtattatcgctag

SEQ ID NO: 317932 - DNA, 375 bp, Artificial Sequence
  derived and/or modified sequence
atggccggccggggcggcgccgcccggcccaacggccccgccgccggaaataaaatttgtcaatttaagttggtcctgctaggagagtctgccgtgggaaaaagctccctcgtcctacgctttgtgaaaggtcagtttcatgagtaccaggagagcacgattggcgcagcctttctaactcagaccgtgtgcctggatgacactacagtcaagttcgagatctgggacactgctggacaagagagataccatagtctcgctccaatgtactaccggggcgcacaagccgcgattgtggtgtatgacattacaaacactgacacatttgctcgagccaagaattgggtgaaagaactgcagaggcaggcgagctag

SEQ ID NO: 317933 - DNA, 651 bp, Artificial Sequence
  derived and/or modified sequence
atggcgggacggggtggagccgcaaggccgaacggacctgccgctggaaacaagatctgtcaattcaagttggtgctcctgggagaaagcgccgtcggaaagtcgtccctggtccttcggttcgtgaagggccaattccatgaataccaggagtctactatcggagccgcattcttaacccagactgtgtgcctggatgataccacagtgaagtttgaaatctgggatacagccggacaggaaagataccattcacttgctcccatgtactaccggggtgcgcaggccgcaatcgttgtctatgacatcaccaatactgacacattcgccagggcaaagaactgggtcaaggaactgcagcggcaggcatcccctaacatagtgatcgcgctcgccggaaataaagctgacttagcctctaagcgcgcagtagagtttcaggaggcgcaagcctacgcagacgacaattccctccttttcatggaaacaagtgccaagaccgccatgaatgtgaacgagatcttcatggcaattgctaaaaagcttcctaaaaacgaaccacaaaatgctacgggagccccaggcagaaacaggggggtggatttgcaggaaaataatccggcttcccggtcccaatgttgttccaactag

SEQ ID NO: 317934 - DNA, 651 bp, Artificial Sequence
  derived and/or modified sequence
atggccggtagagggggagctgctcgccctaacggtcccgcagctggcaacaagatctgccaatttaagcttgtgttgctgggcgagtcagccgtcggcaaatcatctctcgttctgcggttcgtcaagggacagttccatgagtatcaagagtcaactattggcgctgccttcttaacacagacagtttgtcttgacgatacaactgttaagtttgagatttgggatacggcaggccaggagcggtatcattccctagcacccatgtactatcgcggagcccaggccgcaatcgtggtctacgatattaccaacaccgatacctttgctcgtgcaaaaaactgggtgaaagagctgcagagacaagcatctccgaacatcgtgatcgccttagctgggaacaaagcagacctcgctagcaaaagagcggtggaattccaggaggcccaggcctacgccgacgataactctttgctattcatggaaacatcagcaaaaaccgcaatgaatgtaaacgagatctttatggcaattgctaagaagctccccaaaaacgaaccacagaacgcaacaggcgctccagggcgaaacagaggggtcgatttacaggaaaacaatccggctagcagaagccagtgctgtagtaactag

SEQ ID NO: 317935 - DNA, 225 bp, Artificial Sequence
  derived and/or modified sequence
atggcagggcgaggcggagcagccagacctaacggacctgctgctggcaacaagatctgccagttcaaacttgtgctactgggtgaatcagccgtgggcaaatcctcactggtgctgaggttcgtaaagggccagtttcacgaatatcaagagagcactatcggagcggcattcctcactcagacagtatgcctggatgacaccaccgtcaaatttgaaatttag

SEQ ID NO: 317936 - DNA, 279 bp, Artificial Sequence
  derived and/or modified sequence
atggcgggacgagggggagctgcccgtccaaacggccctgctgccggaaacaaaatttgccaattcaagctcgtcctgctcggcgagtccgctgtggggaaatctagtcttgtcttgaggttcgttaagggtcagtttcatgagtatcaggaatccacgatcggggcagcttttctcacgcagacggtatgtcttgatgatacaaccgtcaaatttgaaatctgggatactgcaggccaggagcgctaccactcactggccccaatgtattatcggtag

SEQ ID NO: 317937 - DNA, 375 bp, Artificial Sequence
  derived and/or modified sequence
atggccggacggggaggagccgctagacctaatgggccagcagccggaaacaagatctgccaatttaaactcgtgctacttggcgagagcgctgtcggaaagagttcactggtactccgatttgttaaaggccagttccatgagtatcaggagtccaccattggcgcagccttcctgacccagactgtgtgcctagatgataccacagttaaattcgaaatctgggatactgctggacaggaacgataccacagtctggcccctatgtactatcgcggtgcccaggctgctatagtggtctatgatatcaccaataccgacacgttcgctcgggcaaaaaattgggtcaaggagcttcagcggcaggcaagctag

SEQ ID NO: 317938 - DNA, 225 bp, Artificial Sequence
  derived and/or modified sequence
atggccggcagaggcggcgccgccagacccaacggccccgccgccggcaacaagatctgccagttcaagctggtgctgctgggcgagagcgccgtgggcaagagcagcctggtgctgagattcgtgaagggccagttccacgagtaccaggagagcaccatcggcgccgccttcctgacccagaccgtgtgcctggacgacaccaccgtgaagttcgagatctag

SEQ ID NO: 317939 - DNA, 279 bp, Artificial Sequence
  derived and/or modified sequence
atggccggcagaggcggcgccgccagacccaacggccccgccgccggcaacaagatctgccagttcaagctggtgctgctgggcgagagcgccgtgggcaagagcagcctggtgctgagattcgtgaagggccagttccacgagtaccaggagagcaccatcggcgccgccttcctgacccagaccgtgtgcctggacgacaccaccgtgaagttcgagatctgggacaccgccggccaggagagataccacagcctggcccccatgtactacagatag

SEQ ID NO: 317940 - DNA, 375 bp, Artificial Sequence
  derived and/or modified sequence
atggccggcagaggcggcgccgccagacccaacggccccgccgccggcaacaagatctgccagttcaagctggtgctgctgggcgagagcgccgtgggcaagagcagcctggtgctgagattcgtgaagggccagttccacgagtaccaggagagcaccatcggcgccgccttcctgacccagaccgtgtgcctggacgacaccaccgtgaagttcgagatctgggacaccgccggccaggagagataccacagcctggcccccatgtactacagaggcgcccaggccgccatcgtggtgtacgacatcaccaacaccgacaccttcgccagagccaagaactgggtgaaggagctgcagagacaggccagctag

SEQ ID NO: 317941 - protein, 81 aa, Artificial Sequence
  derived and/or modified sequence
MGDFVRYHYNGTFEDGKKFDSSYDRNTLVAIVVGVGRLITGMDRGLMGMCVNERRRLIVPPHLGYGSIGLAGLIPPDATLY

SEQ ID NO: 317942 - DNA, 183 bp, Artificial Sequence
  derived and/or modified sequence
atgcagaaggagctgagccccgccacctgcccccacatcctgcgcgcccgcctgcccaagagcctgagcctgggctggagccgcgacggcggcgacaaccgcctgcccagcgccggcctggccttctggccctgccccagcagcctgccctgcacctgcaccagctggagcctgaacaaggcc

SEQ ID NO: 317943 - DNA, 1546 bp, Artificial Sequence
  derived and/or modified sequence
cacagccccagcagaaggccctcacctcacaaggaacatgaggcgccttgccgggcgcgcaggccactcccaggtcactcaggattccaagttctcccccaagacgccttcagatgctgagcggcacaagggcctccccagggactggttgcaaagcctcctgctcagcttgagagggccaccagctccccactgtttactgttgttcctgagagaggccagagggagggaccagccagggagtggccagagggacagaaggggtggccttcctgagggcagggtgggtgccccagacctgagagcgctgcaggactcccctccacaggctcaggtggagcctccccagggtcctcctggccaggaaggcagagagccgacttctttcttcagctcccaacccaggcccagcccacggcgtgggagtcggggagagggagaggaggaggaaggaggaggagagagggagcttgtcttgtccctgagcagcgctctcagggcagaggtgaggcaccgggacatgaagttggaggacaagttcccaagcagggcttcctcgggctccccctcgcgacggtaatttgacacttggatctccaggacgaccaacaacaaaaaagccaggcagagacagcagctggctgtcagcagaggagctgggctgaggcgcccaggggagcagcggcgcccacgaaggaagtacgaggacagcacgtggaggctccgcgctggggcactgctgctcagcccccaacacctgagctcccagagcccggcaggagccccaacaggaagccagcgcggcatggctgccaccgacttcgtgcaggagatgcgcgccgtgggcgagaggctgctgctcaagctgcagagactgccccaggctgagcccgtggagatcgtggccttctcagtcatcatccttttcacagctactgttctgctgttgctgctgatagcctgcagctgctgctgcactcactgctgctgccctgagcggagaggcaggaaggtccaggtgcagccgacaccaccatgacggacgggcgatggctgaggagaagctggagaggagatggccaatgccatgacacaggccatcagcctggccctgcagcccttacccctcaagaccaggctcccctggccccagctctggcccagcccaggtacctggacactgacaacttgagccctaccaaggaaacaagggctggtataggtgcaaacctctcatctgccagtggacactgggtgctggggagtcagctgtttcaaagactgggtcaactgcctgggcttcttcgcctacctgcactttttaacaaaacaaggaagtaggggtccccataccttgatggagaacagtccccacctgtgggcaattggcccttggggctctgctgatacatgccaaagaggagcaaggcaatcagaggggctttgtgcaatagcttctgcatccgagctcccgccagagcgtgagcatgtcagtattctagtccagtatttgccagtttccaagtaaaagcttttgtgttacgtg

SEQ ID NO: 317944 - protein, 77 aa, Artificial Sequence
  derived and/or modified sequence
MAATDFVQEMRAVGERLLLKLQRLPQAEPVEIVAFSVIILFTATVLLLLLIACSCCCTHCCCPERRGRKVQVQPTPP

SEQ ID NO: 317945 - DNA, 234 bp, Artificial Sequence
  derived and/or modified sequence
atggccgccaccgacttcgtgcaggagatgagagccgtgggcgagagactgctgctgaagctgcagagactgccccaggccgagcccgtggagatcgtggccttcagcgtgatcatcctgttcaccgccaccgtgctgctgctgctgctgatcgcctgcagctgctgctgcacccactgctgctgccccgagagaagaggcagaaaggtgcaggtgcagcccacccccccctag

SEQ ID NO: 317946 - DNA, 234 bp, Artificial Sequence
  derived and/or modified sequence
atggctgcgacagactttgttcaggaaatgcgtgctgtgggcgaacggctgctgcttaagcttcagaggctgccgcaggcggagcccgtcgagattgttgccttttcagttattatcctgttcaccgctaccgtactcctcttactacttattgcttgttcatgctgctgtacccactgttgctgccctgagcgtagaggtcgcaaggtacaggtgcaacccactcccccttag

SEQ ID NO: 317947 - DNA, 234 bp, Artificial Sequence
  derived and/or modified sequence
atggccgccacagactttgtgcaggagatgagagctgtgggggagcggctgctgctgaagctgcagaggctgccccaggccgagcctgtggagatcgtggccttcagcgtcatcatcctcttcaccgccaccgtgctgctgctgctgctgattgcctgcagctgctgctgcacccactgctgctgcccagagcggcggggcaggaaggtgcaggtgcagcccaccccaccctag

SEQ ID NO: 317948 - DNA, 234 bp, Artificial Sequence
  derived and/or modified sequence
atggccgccaccgacttcgtgcaggagatgcgggccgtgggcgagcggttacttctcaagctacagaggctgcctcaggcagagcccgtggagatcgtggcattctctgtcataatactgtttaccgccacagttctgcttctgcttctcatagcgtgtagttgttgctgtacacattgctgttgccctgaacgtaggggccgcaaggtccaagtgcaaccgacccccccatag

SEQ ID NO: 317949 - DNA, 234 bp, Artificial Sequence
  derived and/or modified sequence
atggccgcaacggacttcgtacaggagatgcgcgctgtgggcgaacggttgctcctgaagcttcaaaggctgccacaggccgaacccgtggaaattgtagcttttagtgtcattattctgtttaccgctacggtgcttcttctgctgcttatcgcttgtagctgttgctgcacccattgttgctgccccgagcggcgaggcagaaaagtgcaggtgcagcccacacctccctag

SEQ ID NO: 317950 - protein, 178 aa, Artificial Sequence [sequence omitted]

SEQ ID NO: 317951 - DNA, 537 bp, Artificial Sequence
  derived and/or modified sequence
atgtctgtgacagcttacaaccgcgactctttcgataccactcgccaacggctggtgctggagattggagaccctgagggacccctgcttccctatcaggccgaatttctggtgcgctctcacgatgccgaagaggtgctccctagcactccagcctcacgcttcttaagcgccctgggaggcttgtgggagccgggcgagttacagctcctcaacgttacttccgcacttgaccgcggagggagggttcctttacccatcgagggtcggaaggagggcgtgtacatcaaggtcggatccgcttccccgttcagtacgtgcttgaagatggtggcctcacctgacagtcatgccaggtgcgcacagggacagcctccgctgctgtcatgctatgacactctggcgccacacttccgagtagattggtgcaacgtgaccctggttcggagggatccaggaagcggcggtggggttggtcatggtcctcacccaagtcctcccagtttgccctgttgtttccttagcccgagtctgtag

SEQ ID NO: 317952 - DNA, 537 bp, Artificial Sequence
  derived and/or modified sequence
atgtctgtgacagcctacaacagagacagctttgacaccacccggcagaggctggtgctggagatcggggaccctgagggccccctgctgccctaccaggccgagttcctggtgcgcagccatgatgctgaggaggtgctgcccagcaccccagccagccgcttcctgagcgccctgggcggcctgtgggagcctggagagctgcagctgctgaatgtgaccagcgccctggaccggggcggccgggtgcccctgcccatcgagggcaggaaggagggcgtgtacatcaaggtgggcagcgccagccccttcagcacctgcctgaagatggtggccagcccagacagccacgcccgctgtgcccagggccagccccccctgctgagctgctatgacaccctggccccccacttccgggtggactggtgcaatgtgaccctggtgagaagagaccccggcagcggcggcggcgtgggccacggcccccaccccagcccccccagcctgccctgctgcttcctgagccccagcctgtag

SEQ ID NO: 317953 - DNA, 537 bp, Artificial Sequence
  derived and/or modified sequence
atgagcgtgaccgcctacaaccgggacagcttcgacaccacccggcagcgcctggtgcttgaaattggtgaccccgaagggccactcttgccctaccaggccgagtttctggtaagatcacacgacgccgaggaagtcctaccttctacccctgcctcgagattcctgtccgctcttggcgggctttgggagcctggcgagctacagctacttaacgtgacaagtgcactggacagaggaggaagagtccccctgcctattgagggacggaaagaaggagtttatataaaggttggttcagcgagcccattcagtacatgcctcaagatggttgcatcccccgattcccatgcgaggtgtgcccagggccaaccaccgctgctctcttgttatgatactctagcaccgcacttccgcgtggactggtgtaacgtgacactcgtgcggcgggaccccggatccggcggaggcgtaggccatggtccccacccttcacctccttccctgccttgctgcttcctgagtccttcattgtag

SEQ ID NO: 317954 - DNA, 537 bp, Artificial Sequence
  derived and/or modified sequence
atgagcgtaacagcttataacagagacagttttgataccacaagacagagactcgtgctagagatcggcgaccctgagggcccactgctcccttaccaggccgagttcctggtacgcagccacgacgccgaggaagtgttgccctccactcccgcaagccgttttttgtctgcactgggaggactgtgggaaccaggcgaactgcagttgcttaacgtgacatcggcgctcgatagagggggacgggtccctctgcccatcgagggacgaaaagaaggggtatatataaaagttggcagcgcctcgccattctctacatgtctcaaaatggtagcaagcccagatagccatgcaagatgtgcccaggggcagccaccgctcctgtcttgctacgacaccctcgcacctcatttcagagtggactggtgcaatgtaacactggttcgccgagacccaggatccgggggtggggtaggccacgggccacatccctcaccgccaagcctgccctgctgcttcctgtcccccagcttgtag

SEQ ID NO: 317955 - DNA, 1349 bp, Artificial Sequence
  derived and/or modified sequence
gtcactcaccgggcgggccaggccgggcagccatggctgagacactcttctggactcctctcctcgtggttctcctggcagggctgggggacaccgaggcccagcagaccacgctacacccacttgtgggccgtgtctttgtgcacaccttggaccatgagacgtttctgagccttcctgagcatgtcggtcacagcctacaatcgggacagctttgataccactcggcagaggctggtgctggagattggggacccagaaggccccctgctgccataccaagccgagttcctggtgcgcagccacgatgcggaggaggtgctgccctcaacacctgccagccgcttcctctcagccttggggggactctgggagcccggagagcttcagctgctcaacgtcacctctgccttggaccgtgggggccgtgtcccccttcccattgagggccgaaaagaaggggtatacattaaggtgggttctgcctcacctttttctacttgcctgaagatggtggcatcccccgatagccacgcccgctgtgcccagggccagcctccacttctgtcttgctacgacaccttggcaccccacttccgcgttgactggtgcaatgtgaccctggtgaggagggaccctgggtccgggggtggggtggggcatggcccccatcccagtcccccttccctcccatgctgcttcctatctccgtctctctgattgctccagtcaccatttctttccctgatgctctcagtattgcccacaggcttagtctgaggatacacacacacacacacacacacacacacacacccctgaagttctacctttcccccacaagagggcaacagagtccgcaatccgcatgtggggtctccaactcccgcgccccagatctgcccaggtcaacagctatatcacagtccagttcccaaaccctttccctaccaagggcctctgcgtgacagctctgtctgcttttctgtaaggtgccacctagcaaacccacttacaacaaggatctgatagctcttcacactataaaccaaagatgctcacaacagctctttggatactgagctgaggttcacaggatcccacggctggtgtacactgttcctgtgaattgaccaacagagcagggactcattcagggtccacagccagcgactggtaattgacaacattcttgagcacttgctatgtgcttggcactgtcccatcaacatattttatgctcaccaccactccaggagacaggtgctactattatccttctgacattacaggtgatgaaacagaggcacataatcatcctagctaagcacttgtctgagtctggattc

SEQ ID NO: 317956 - DNA, 534 bp, Artificial Sequence
  derived and/or modified sequence
atgagcgtgaccgcctacaaccgcgacagcttcgacaccacccgccagcgcctggtgctggagatcggcgaccccgagggccccctgctgccctaccaggccgagttcctggtgcgcagccacgacgccgaggaggtgctgcccagcacccccgccagccgcttcctgagcgccctgggcggcctgtgggagcccggcgagctgcagctgctgaacgtgaccagcgccctggaccgcggcggccgcgtgcccctgcccatcgagggccgcaaggagggcgtgtacatcaaggtgggcagcgccagccccttcagcacctgcctgaagatggtggccagccccgacagccacgcccgctgcgcccagggccagccccccctgctgagctgctacgacaccctggccccccacttccgcgtggactggtgcaacgtgaccctggtgcgccgcgaccccggcagcggcggcggcgtgggccacggcccccaccccagcccccccagcctgccctgctgcttcctgagccccagcctg

SEQ ID NO: 317957 - DNA, 537 bp, Artificial Sequence
  derived and/or modified sequence
atgagcgtgaccgcctacaacagagacagcttcgacaccaccagacagagactggtgctggagatcggcgaccccgagggccccctgctgccctaccaggccgagttcctggtgagaagccacgacgccgaggaggtgctgcccagcacccccgccagcagattcctgagcgccctgggcggcctgtgggagcccggcgagctgcagctgctgaacgtgaccagcgccctggacagaggcggcagagtgcccctgcccatcgagggcagaaaggagggcgtgtacatcaaggtgggcagcgccagccccttcagcacctgcctgaagatggtggccagccccgacagccacgccagatgcgcccagggccagccccccctgctgagctgctacgacaccctggccccccacttcagagtggactggtgcaacgtgaccctggtgagaagagaccccggcagcggcggcggcgtgggccacggcccccaccccagcccccccagcctgccctgctgcttcctgagccccagcctgtag

SEQ ID NO: 317958 - DNA, 1545 bp, Artificial Sequence
  derived and/or modified sequence
atcccgagtccgagccgccgccgccatgagctgccccgtgcccgcctgctgcgcgctgctgctagtcctggggctctgccgggcgcgtccccggaacgcactgctgctcctcgccgaccgtgcactctctgtctcccacctcacgcagcggatgacggaggctttgagagtggcgcgtacaacaacagcgccatcgccaccccgcacctggacgccttggcccgccgcagcctcctctttcgcaatgccttcacctcggtcagcagctgctctcccagccgcgccagcctcctcactggcctgccccagcatcagaatgggatgtacgggctgcaccaggacgtgcaccacttcaactccttcgacaaggtgcggagcctgccgctgctgctcagccaagctggtgtgcgcacaggcatcatcgggaagaagcacgtggggccggagaccgtgtacccgtttgactttgcgtacacggaggagaatggctccgtcctccaggtggggcggaacatcactagaattaagctgctcgtccggaaattcctgcagactcaggatgaccggcctttcttcctctacgtcgccttccacgacccccaccctgtgggcactcccagccccagtacggaaccttctgtgagaagtttggcaacggagagagcggcatgggtcgtatcccagactggaccccccaggcctacgacccactggacgtgctggtgccttacttcgtccccaacaccccggcagcccgagccgacctggccgctcagtacaccaccgtcggccgcatggaccaaggagttggactggtgctccaggagctgcgtgacgccggtgtcctgaacgacacactggtgatcttcacgtccgacaacgggatccccttccccagcggcaggaccaacctgtactggccgggcactgctgaacccttactggtgtcatccccggagcacccaaaacgctggggccaagtcagcgaggcctacgtgagcctcctaggtatgcctttgtctgtctccgtcaggaaaggtgtgggagtggatctgggacggggccatgacctgtcagatgctgctccacacccattacctaatgtggctctcatatcatctgggtgaggaagggactgtcactcccactctacagaggaaaagaatgaggctcagagaggtgaagtaagctgctcaggattgcacagctggtaagcactaagctaggattctcgcctggatcctgctgctttcaaaaccattgccttttccccgcctacctccgatgagcttcagaatcacctgggatgcttgttaatatccaaattgcaaatcccagggtgtccgattcagtagatcttggcgggctcaagaatttgcatgtctgacaagttcccaggtgatgccgatactgtgggcctggggacccctctctgagcatccgtgcaccccatcctgccttcctgggggacccaaagcacctcatgaccctgctcattcctaaaaagacctaggacatctagtcccatgttatggatgtgcagac

SEQ ID NO: 317959 - protein, 205 aa, Artificial Sequence
  derived and/or modified sequence
MSCPVPACCALLLVLGLCRARPRNALLLLADRALSVSHLTQRMTEALRVARTTTAPSPPRTWTPWPAAASSFAMPSPRSAAALPAAPASSLACPSIRMGCTGCTRTCTTSTPSTRCGACRCCSAKLVCAQASSGRSTWGRRPCTRLTLRTRRRMAPSSRWGGTSLELSCSSGNSCRLRMTGLSSSTSPSTTPTLWALPAPVRNLL

SEQ ID NO: 317960 - DNA, 618 bp, Artificial Sequence
  derived and/or modified sequence
atgagctgcccggtgcccgcctgctgtgccttactgctcgtgctgggcctttgtagagcgagaccccggaacgcgctcctcttgctggcagacagagcgctttcggtgtctcacttgactcagagaatgacggaagcgctcagagtggcacgcaccacaacggccccaagtccaccccggacgtggacgccctggccagctgccgccagcagttttgccatgccctccccacgctccgcagcagctctacctgccgcaccagcttcctccctggcttgtccctccatccgaatgggatgcacagggtgtacccggacttgtaccacttccacccccagtacacggtgcggagcctgtaggtgttgttccgctaagctcgtttgcgctcaggccagctcggggcgatccacatggggccggaggccgtgcacaagacttacgcttcgcactaggcgcagaatggctcctagttcccggtggggcgggacctccctggagttgtcatgtagctctggcaattcctgtcggctgcgcatgaccggcctgagtagttcgactagcccctccactacaccgaccctgtgggctttgcccgctccggtgaggaacctgttatag

SEQ ID NO: 317961 - DNA, 618 bp, Artificial Sequence
  derived and/or modified sequence
atgagctgccccgtgcccgcctgctgcgccctgctgctggtgctgggtctttgcagggcccgaccacggaacgccctgctgttactcgccgatagagcgctttccgtcagtcatctcacgcagaggatgacagaagccctgcgcgtggctagaacaacaactgcacctagcccacccagaacctggactccctggcctgccgccgccagtagctttgcaatgccctccccccgctcagctgccgcactccccgcggcccctgctagctctcttgcctgtcccagcattaggatgggctgtactggttgtaccagaacgtgtacaacctcaactccttcaaccaggtgtggagcatgcaggtgttgttctgctaaactggtttgcgcccaggctagtagtggccgttctacttgggggaggagaccgtgcacccgccttacactccggacacgacgacgcatggccccctctagccgctggggaggcacttctctggagctctcatgctccagcggcaattcatgtcgtctgcggatgacagggctctcctcaagcacttcccccagcacaaccccaacactctgggctcttcccgcgccagtgagaaatctactgtag

SEQ ID NO: 317962 - DNA, 618 bp, Artificial Sequence
  derived and/or modified sequence
atgtcatgcccagttcccgcatgttgtgccctgctgctggtactagggctttgccgggcaagaccaagaaacgccctgctcttgctagcagatagggctctgtcagtgagtcatctgactcaacgaatgacagaggctctgagagttgccagaacaaccacagctcctagcccccctcgaacctggacaccttggccagcggcagcatcgagttttgctatgccaagcccgaggtccgccgctgctctgcccgctgccccagcttccagccttgcctgcccatccattcgaatgggctgcaccggttgcaccagaacatgcaccacttccacgccatccactcgttgcggcgcttgtaggtgctgctctgcaaagcttgtgtgtgcccaagcctcaagtggccgttctacttggggcaggcgcccatgcactaggctgaccctccggacaagacgcagaatggcaccgtccagcaggtgggggggaaccagccttgaattatcctgttcaagcggcaattcttgtcggctgcgaatgacagggctctcctccagcacctcaccctccactaccccaacactgtgggcactgccagccccagtcagaaatctgctctag

SEQ ID NO: 317963 - DNA, 618 bp, Artificial Sequence
  derived and/or modified sequence
atgagctgccccgtgcccgcctgctgcgccctgctgctggtgctgggcctgtgcagagccagacccagaaacgccctgctgctgctggccgacagagccctgagcgtgagccacctgacccagagaatgaccgaggccctgagagtggccagaaccaccaccgcccccagcccccccagaacctggaccccctggcccgccgccgccagcagcttcgccatgcccagccccagaagcgccgccgccctgcccgccgcccccgccagcagcctggcctgccccagcatcagaatgggctgcaccggctgcaccagaacctgcaccaccagcacccccagcaccagatgcggcgcctgcagatgctgcagcgccaagctggtgtgcgcccaggccagcagcggcagaagcacctggggcagaagaccctgcaccagactgaccctgagaaccagaagaagaatggcccccagcagcagatggggcggcaccagcctggagctgagctgcagcagcggcaacagctgcagactgagaatgaccggcctgagcagcagcaccagccccagcaccacccccaccctgtgggccctgcccgcccccgtgagaaacctgctgtag

SEQ ID NO: 317964 - protein, 663 aa, Artificial Sequence
  derived and/or modified sequence
MRRRQQGAAGGNFPVGGSFPEDVSPHQDSGYAPSPRYLRRFREMKPRVLQRWSRQILRGLHFLHSRVPPILHRDLKCDNVFITGPTGSVKIGDLGLATLKRASFAKSVIGTPEFMAPEMYEEKYDEAVDVYAFGMCMLEMATSEYPYSECQNAAQIYRKVTSGRKPNSFHKVKIPEVKEIIEGCIRTDKNERFTIQDLLAHAFFREERGVHVELAEEDDGEKPGLKLWLRMEDARRGGRPRDNQAIEFLFQLGRDAAEEVAQEMVALGLVCEADYQPVARAVRERVAAIQRKREKLRKARELEALPPEPGPPPATVPMAPGPPSVFPPEPEEPEADQHQPFLFRHASYSSTTSDCETDGYLSSSGFLDASDPALQPPGGVPSSLAESHLCLPSAFALSIPRSGPGSDFSPGDSYASDAASGLSDVGEGMGQMRRPPGRNLRRRPRSRLRVTSVSDQNDRVVECQLQTHNSKMVTFRFDLDGDSPEEIAAAMVYNEFILPSERDGFLRRIREIIQRVETLLKRDTGPMEAAEDTLSPQEEPAPLPALPVPLPDPSNEELQSSTSLEHRSWTAFSTSSSSPGTPLSPGNPFSPGTPISPGPIALQRESRSFSLQRAQIQRTVLEAGQRPGKLWLRATVQLRVWGLELRRKEMMGRNPKLGAAPNP

SEQ ID NO: 317965 - DNA, 1992 bp, Artificial Sequence
  derived and/or modified sequence
atgagaagaagacagcagggcgccgccggcggcaacttccccgtgggcggcagcttccccgaggacgtgagcccccaccaggacagcggctacgcccccagccccagatacctgagaagattcagagagatgaagcccagagtgctgcagagatggagcagacagatcctgagaggcctgcacttcctgcacagcagagtgccccccatcctgcacagagacctgaagtgcgacaacgtgttcatcaccggccccaccggcagcgtgaagatcggcgacctgggcctggccaccctgaagagagccagcttcgccaagagcgtgatcggcacccccgagttcatggcccccgagatgtacgaggagaagtacgacgaggccgtggacgtgtacgccttcggcatgtgcatgctggagatggccaccagcgagtacccctacagcgagtgccagaacgccgcccagatctacagaaaggtgaccagcggcagaaagcccaacagcttccacaaggtgaagatccccgaggtgaaggagatcatcgagggctgcatcagaaccgacaagaacgagagattcaccatccaggacctgctggcccacgccttcttcagagaggagagaggcgtgcacgtggagctggccgaggaggacgacggcgagaagcccggcctgaagctgtggctgagaatggaggacgccagaagaggcggcagacccagagacaaccaggccatcgagttcctgttccagctgggcagagacgccgccgaggaggtggcccaggagatggtggccctgggcctggtgtgcgaggccgactaccagcccgtggccagagccgtgagagagagagtggccgccatccagagaaagagagagaagctgagaaaggccagagagctggaggccctgccccccgagcccggccccccccccgccaccgtgcccatggcccccggcccccccagcgtgttcccccccgagcccgaggagcccgaggccgaccagcaccagcccttcctgttcagacacgccagctacagcagcaccaccagcgactgcgagaccgacggctacctgagcagcagcggcttcctggacgccagcgaccccgccctgcagccccccggcggcgtgcccagcagcctggccgagagccacctgtgcctgcccagcgccttcgccctgagcatccccagaagcggccccggcagcgacttcagccccggcgacagctacgccagcgacgccgccagcggcctgagcgacgtgggcgagggcatgggccagatgagaagaccccccggcagaaacctgagaagaagacccagaagcagactgagagtgaccagcgtgagcgaccagaacgacagagtggtggagtgccagctgcagacccacaacagcaagatggtgaccttcagattcgacctggacggcgacagccccgaggagatcgccgccgccatggtgtacaacgagttcatcctgcccagcgagagagacggcttcctgagaagaatcagagagatcatccagagagtggagaccctgctgaagagagacaccggccccatggaggccgccgaggacaccctgagcccccaggaggagcccgcccccctgcccgccctgcccgtgcccctgcccgaccccagcaacgaggagctgcagagcagcaccagcctggagcacagaagctggaccgccttcagcaccagcagcagcagccccggcacccccctgagccccggcaaccccttcagccccggcacccccatcagccccggccccatcgccctgcagagagagagcagaagcttcagcctgcagagagcccagatccagagaaccgtgctggaggccggccagagacccggcaagctgtggctgagagccaccgtgcagctgagagtgtggggcctggagctgagaagaaaggagatgatgggcagaaaccccaagctgggcgccgcccccaacccctag

SEQ ID NO: 317966 - DNA, 1992 bp, Artificial Sequence
  derived and/or modified sequence
atgcgccggcggcagcagggggctgcaggaggaaacttcccggtgggagggtcattcccagaagatgtgagccctcatcaagactcagggtatgcaccttcccctagatatttgaggcgcttcagagaaatgaaacctagggtgctacagaggtggtcacggcagattttgcggggcctacatttcctacattcaagggtcccgcccattttacatcgagatctgaaatgcgacaatgtgttcatcacgggcccaactggctcagtgaaaatcggcgatctggggctggccaccctgaaaagggccagttttgctaagtccgtcattggcaccccagagttcatggctccggagatgtacgaggagaaatacgatgaagccgtggatgtctacgccttcggcatgtgcatgctcgagatggccacgtctgagtacccctacagcgagtgtcagaatgcagctcagatttaccgcaaggtgacatcaggaaggaaacccaatagcttccataaagtgaagattccggaggtaaaagaaatcatagagggctgtattaggacagacaaaaacgagaggtttacgatccaggatctgctcgcccacgccttctttcgagaggagcggggggtacacgtagagctggccgaggaggatgacggtgagaaacccgggctgaaactctggctgagaatggaggatgcccgtaggggaggacgcccacgggacaaccaggccattgaatttttatttcaactgggccgcgatgctgctgaagaggtggcacaggaaatggttgcactggggctggtatgcgaagctgattaccagccagtcgcgagggccgtgcgagagcgggtagctgctatccaacggaagcgggagaagctacggaaagctcgggaactcgaggctctcccaccagagccagggcccccacctgccacggtccctatggctccgggccctcccagcgtcttcccgccagagcctgaagagccggaagcagatcagcaccagccttttctcttccgtcacgcgagctactccagtactactagcgattgtgaaacggatgggtatctgtctagcagcgggtttctcgatgcttcagatcccgccttacagcctccaggaggggtgcctagcagcttggccgaaagccatttgtgcctaccaagcgcttttgcactgagcatacccagatcagggcccggctcagatttcagccccggggatagttacgcctccgacgccgccagtgggctgtcggatgtcggggaaggaatgggtcagatgagacgaccacctggtaggaacctcagacgccgcccccgaagtcggctgcgcgtcaccagcgtgagcgaccagaatgacagagtcgtcgaatgccagttgcagacacacaactctaaaatggtgacatttaggttcgatttggatggagactccccggaggagattgcggcagctatggtatacaatgagttcattctgccatccgaaagagacgggttcctacggagaattcgagaaatcatccaacgcgtggagacattgcttaagagagatacaggaccgatggaggctgctgaagatacactctctcctcaggaggagccggctcctctccctgccctccctgtgccattgcctgacccttctaacgaggagctgcaatcatctacttcacttgagcacaggtcatggactgcattctctacaagctcatcctccccaggcacccccctcagccctgggaatcctttctcacccggcacccccatttcccccggaccgattgcactccaacgggaatcgagatcctttagtctacagagagcacagattcagcggaccgtgctggaagccgggcagcgacccggcaagttatggttgagggcgacagtgcagcttcgtgtttgggggctcgagctccgcagaaaggagatgatgggaagaaaccccaagttgggggcagctccaaatccttag

SEQ ID NO: 317967 - DNA, 1992 bp, Artificial Sequence
  derived and/or modified sequence
atgagaagacggcagcagggcgctgctgggggcaacttccctgtgggcggcagcttcccagaagatgtgagcccccaccaggacagcggctacgcccccagcccccgctacctgcggcgcttccgggagatgaagccccgggtgctgcagcgctggagccggcagatcctgcggggcctgcacttcctgcacagccgggtgccccccatcctgcaccgggacctgaagtgtgacaacgtgttcatcaccggccccaccggctctgtgaagattggagacctgggcctggccaccctgaagagggccagctttgccaagtctgtgattggcaccccagagttcatggcccctgagatgtatgaggagaagtatgatgaagctgtggatgtgtatgccttcggcatgtgcatgctggagatggccaccagcgagtacccctacagcgagtgccagaatgctgcccagatctacaggaaggtgaccagcggcaggaagcccaacagcttccacaaggtgaagatccctgaggtgaaggagatcatcgagggctgcatcagaacagacaagaatgaacgcttcaccatccaggacctgctggcccacgccttcttccgggaggagcggggcgtgcacgtggagctggccgaggaggatgatggagagaagccaggcctgaagctgtggctgaggatggaggatgccaggagaggaggccggccccgggacaaccaggccatcgagttcctgttccagctgggcagagatgctgctgaggaggtggcccaggagatggtggccctgggcctggtgtgtgaggccgactaccagcctgtggcccgggctgtgcgggagcgggtggccgccatccagaggaagcgggagaagctgaggaaggcccgggagctggaggccctgcccccagagcccggccccccaccagccaccgtgcccatggcccctggcccccccagcgtcttccccccagagcctgaggagcctgaggccgaccagcaccagcccttcctgttcagacatgccagctacagcagcaccaccagtgactgtgaaacagatggctacctgagcagcagcggcttcctggatgccagtgaccctgccctgcagcccccaggaggagtgcccagcagcctggccgagagccacctgtgcctgcccagcgcctttgccctgagcatccccaggagcggccctggcagtgacttcagccctggggacagctatgccagtgatgctgccagcggcctgagtgatgtgggggagggcatgggccagatgagaagacctcctggcaggaacctgcggcggcggcccaggagccggctgcgggtgacctctgtgtctgaccagaatgacagagtggtggagtgccagctgcagacccacaacagcaagatggtgaccttccgctttgacctggatggagacagccctgaggagattgctgctgccatggtgtacaatgagttcatcctgcccagcgagagagatggcttcctgcggcgcatccgggagatcatccagagggtggagaccctgctgaagagggacaccggccccatggaggccgctgaggacaccctgagcccccaggaggagcccgcccccctgcctgccctgcctgtgcccctgcctgaccccagcaatgaggagctgcagagcagcaccagcctggagcaccgctcctggacagccttcagcaccagcagcagcagccctggcacccccctgagccctggcaaccccttcagccctggcacccccatcagccctggccccatcgccctgcagcgggagagccgctccttcagcctgcagagggcccagatccagaggacagtgctggaggccggccagaggcctgggaagctgtggctgcgggccaccgtgcagctgcgggtgtggggcctggagctgcggaggaaggagatgatgggcaggaaccccaagctgggcgccgcccccaacccctag
